United States Patent Application Publication US 2017/0114356 A1 - sequence listing, part 23

SEQ ID NO: 30263 - DNA, 3668 bp, Zea Mays
cttgtagagttgaatctgcttcaaacaaataactacaaacctttaaataatattcaaggctgcaatgaatttgagctgtgcaattcacttgcagattatcgaagtgatttaatgataaccggtattatcacaaaggatattgagtctactgttttggctttggaactgaagcaacacaaactacagctgcaagagcaacgagttatgtttaccgatgtccttgaagaattgatggcactggcagaagcaactctatggaaagtgaaccagcatttggagaatattgcaatctgcactttacatgaggagaacaatgaggcaagggttgatttggagaacctgaagcaaaattgtgaagaaattatgaaaaaattgcatgccatgaacgaggaaaacacaacacttaaatgtttaatgtcctccttccaaacaaatttggatgcaaaaaacaaagctttgatggagttggaatgctctcatgcaaccatatgtacggagctggaactgacaattgatgccatgaatcgcagaagtactagagaaaattatttcatttctgaaaatgaaacgttgaagcaggaaattcggaatattttgtgcaaggatcagtgcatggttgaattaatggataacattgaagcagataagttattttccaccattgaaggtcgcttgcaattggttactgatcatgtgcacaattacattactgagcaaataaacacgatgagcaagttatccaatgacttagacattatcgaagtatcagcccaggagttaagcacacagaattcacttctcaagtccgaattaatcagaaaagaggaattaacaaagggcttatcatttgatcttagcctgttacaagagtctgcatctgtagcgaaagatcaagcagctgagattacagggttgagaaaagtaataaaatctttggaactagagcttgcatctaagtcgcttgaacttgatgatgttgtttctgataggcaacaattggaagcaatgattttgaagtgtaatcaaaatgttgctgccctagaggaggagctgggaaagaagattgatgaattaaacatagtttctatggagaatgctgaactaaaatcgcagatccagcatattgaagagattagttgcactatggaggagttagctgataaaagtgaagtaattagaagacttgaagaaaagttgattgaatcaagaactttaattgatgaaaggagtgtctgtcttcagagcttgcaaaatgatttctccaaactctcagatgaaaagacatcatgtgacactgagttgcttatcttgaaagagaagctggagatggctcaggcacttgcagaagaaagtgaagcaattgctacagaatctcggcagatagctgaggagcataaggcatatgccgaagggaaggatgaagaagtaaaggtattggagaggtcaattgaagaacttgagaatactgtggaaattgtcaaggaagaagcagagcggcaaagaatgcagcgagaagaactagaagtggagctgcagaaagttaggcaacaaatgctagctgtaccaccctctgggaaagcaaggagatatatggaagatggaatgattgatttagctgactcatccaggcacccagtagatatgcacaatgagctcctcagtgctcaagagactattagaatacttagaaaggaggtttctgagaaggaatcagagattgctcagtgcaatgcacatatctcagaactaaacattcatgctgaggcagcggcacaagaatacaagcacaagttgatggagctggagactatggcacaacaggttaagacagacaattccacagcacatgcttgctctgggagacaagagaagattaactcaaaacctcggggctcaggttctccatttaaatgtatcggcatcggctttgtgcaacagatgaattctgagaaagatgaagagcttagtgctgcaaaacaacgtattgtggaactagagggcatagcagctagtagacaaagggagatattcatgttgaatgcgaaactagcaacaacagagagcatgacgcacgatgtgattcgagatatgcttggggttaaaatgaacatgacaacctgggcggctctagctgacaaccagcaaaagctggagacaaaagagcccatcacttctcaagcacaggaaatcaaagactccaatgagctgatgaatttgaagcggcagcttgatgaattcattgaagagagacagagctggcttgacgaaataaaccagaagcaatcagagcttggagctgcccgcattactatagagaagttacgacaacgggaacactttatggtagctgaaatagagttgctaaaggctgagaattcaaactacaaaaccatcatccttaaccttgaagccgaagtgaagaaccttaccagacaacagaacctccagctccgaataaatcaccacgttaaaacgaaggaagagaacatcctgctgaagaggcagaacgaagagctaagtgcaaagctgaaacagctggggggcatccttacccgtacgaaggaagagctcgcccgctacagggtttcaaatggaagagatccgcacgaactgatcgaggaggaggagcttctgaggaagaaactagacgagagcgaacgagatagaagccagctggcggaaaacctatcaagcctatgctccagcattctgaaggtcgctggagtttcggactcagaatctgacgctactcttttgaaagcatcggagtgcttggatcagctccagtgccgtatcgcttctttggaaggccaagttgaggatctaaatctaaagtgcaaactagtgcgtgaaaaggcccgcctgtgcgagctccggagcaactcgtcgtctctgcgcacaggggcgaagggcaatctgacatcgcccagtccggacacatcgccaagcatttcgtccttccgatgacacaagcggacggatacatcgccgagaagctagtgtacattagtacgtacataacacattccgtgtaactattctagtgcagccgggctgcttagggaggattagttcagtccaacaatctccctttgctgattttatatatatctgctgtacaatatatataccgtgtgtgtacttgatgcagttccattcaacacttgtcttctctcttcgtctgtcgttttctttcttctaatgtacagcaggacttaaaaattggaatacacatgcaatcaaagcagtgccatgtttatgcagttcttttaggggtgtttggtttgaagaatcaatctgctatagatggggtggtgtaatacccaaagatttgagaaataaagtaaccctttagacaaagtgtttgagcgattttgtttattttttagcatctcaacaaatacaaggcctgaataaagcaattaataaataattaaataaaacaaatatgtattcatgctgataatcttggctgttgcatttatatgtgaacggttaaactgggatttgaatttggaattggatatttaaactagaacaaaaataggaaatagaaacaaggaaagaaaaaaaagaaaaagaaaaaactcttacctaggccgcaacccctatggtggcccaatatacctcacgcgacgctagcccaacctgggagagttggcgccgac

SEQ ID NO: 30264 - DNA, 3689 bp, Zea Mays
cttgtagagttgaatctgcttcaaacaaataactacaaacctttaaataatattcaaggctgcaatgaatttgagctgtgcaattcacttgcagattatcgaagtgatttaatgataaccggtattatcacaaaggatattgagtctactgttttggctttggaactgaagcaacacaaactacagctgcaagagcaacgagttatgtttaccgatgtccttgaagaattgatggcactggcagaagcaactctatggaaagtgaaccagcatttggagaatattgcaatctgcactttacatgaggagaacaatgaggcaagggttgatttggagaacctgaagcaaaattgtgaagaaattatgaaaaaattgcatgccatgaacgaggaaaacacaacacttaaatgtttaatgtcctccttccaaacaaatttggatgcaaaaaacaaagctttgatggagttggaatgctctcatgcaaccatatgtacggagctggaactgacaattgatgccatgaatcgcagaagtactagagaaaattatttcatttctgaaaatgaaacgttgaagcaggaaattcggaatattttgtgcaaggatcagtgcatggttgaattaatggataacattgaagcagataagttattttccaccattgaaggtcgcttgcaattggttactgatcatgtgcacaattacattactgagcaaataaacacgatgagcaagttatccaatgacttagacattatcgaagtatcagcccaggagttaagcacacagaattcacttctcaagtccgaattaatcagaaaagaggaattaacaaagggcttatcatttgatcttagcctgttacaagagtctgcatctgtagcgaaagatcaagcagctgagattacagggttgagaaaagtaataaaatctttggaactagagcttgcatctaagtcgcttgaacttgatgatgttgtttctgataggcaacaattggaagcaatgattttgaagtgtaatcaaaatgttgctgccctagaggaggagctgggaaagaagattgatgaattaaacatagtttctatggagaatgctgaactaaaatcgcagatccagcatattgaagagattagttgcactatggaggagttagctgataaaagtgaagtaattagaagacttgaagaaaagttgattgaatcaagaactttaattgatgaaaggagtgtctgtcttcagagcttgcaaaatgatttctccaaactctcagatgaaaagacatcatgtgacactgagttgcttatcttgaaagagaagctggagatggctcaggcacttgcagaagaaagtgaagcaattgctacagaatctcggcagatagctgaggagcataaggcatatgccgaagggaaggatgaagaagtaaaggtattggagaggtcaattgaagaacttgagaatactgtatgcgttttagaaagcaaagtggaaattgtcaaggaagaagcagagcggcaaagaatgcagcgagaagaactagaagtggagctgcagaaagttaggcaacaaatgctagctgtaccaccctctgggaaagcaaggagatatatggaagatggaatgattgatttagctgactcatccaggcacccagtagatatgcacaatgagctcctcagtgctcaagagactattagaatacttagaaaggaggtttctgagaaggaatcagagattgctcagtgcaatgcacatatctcagaactaaacattcatgctgaggcagcggcacaagaatacaagcacaagttgatggagctggagactatggcacaacaggttaagacagacaattccacagcacatgcttgctctgggagacaagagaagattaactcaaaacctcggggctcaggttctccatttaaatgtatcggcatcggctttgtgcaacagatgaattctgagaaagatgaagagcttagtgctgcaaaacaacgtattgtggaactagagggcatagcagctagtagacaaagggagatattcatgttgaatgcgaaactagcaacaacagagagcatgacgcacgatgtgattcgagatatgcttggggttaaaatgaacatgacaacctgggcggctctagctgacaaccagcaaaagctggagacaaaagagcccatcacttctcaagcacaggaaatcaaagactccaatgagctgatgaatttgaagcggcagcttgatgaattcattgaagagagacagagctggcttgacgaaataaaccagaagcaatcagagcttggagctgcccgcattactatagagaagttacgacaacgggaacactttatggtagctgaaatagagttgctaaaggctgagaattcaaactacaaaaccatcatccttaaccttgaagccgaagtgaagaaccttaccagacaacagaacctccagctccgaataaatcaccacgttaaaacgaaggaagagaacatcctgctgaagaggcagaacgaagagctaagtgcaaagctgaaacagctggggggcatccttacccgtacgaaggaagagctcgcccgctacagggtttcaaatggaagagatccgcacgaactgatcgaggaggaggagcttctgaggaagaaactagacgagagcgaacgagatagaagccagctggcggaaaacctatcaagcctatgctccagcattctgaaggtcgctggagtttcggactcagaatctgacgctactcttttgaaagcatcggagtgcttggatcagctccagtgccgtatcgcttctttggaaggccaagttgaggatctaaatctaaagtgcaaactagtgcgtgaaaaggcccgcctgtgcgagctccggagcaactcgtcgtctctgcgcacaggggcgaagggcaatctgacatcgcccagtccggacacatcgccaagcatttcgtccttccgatgacacaagcggacggatacatcgccgagaagctagtgtacattagtacgtacataacacattccgtgtaactattctagtgcagccgggctgcttagggaggattagttcagtccaacaatctccctttgctgattttatatatatctgctgtacaatatatataccgtgtgtgtacttgatgcagttccattcaacacttgtcttctctcttcgtctgtcgttttctttcttctaatgtacagcaggacttaaaaattggaatacacatgcaatcaaagcagtgccatgtttatgcagttcttttaggggtgtttggtttgaagaatcaatctgctatagatggggtggtgtaatacccaaagatttgagaaataaagtaaccctttagacaaagtgtttgagcgattttgtttattttttagcatctcaacaaatacaaggcctgaataaagcaattaataaataattaaataaaacaaatatgtattcatgctgataatcttggctgttgcatttatatgtgaacggttaaactgggatttgaatttggaattggatatttaaactagaacaaaaataggaaatagaaacaaggaaagaaaaaaaagaaaaagaaaaaactcttacctaggccgcaacccctatggtggcccaatatacctcacgcgacgctagcccaacctgggagagttggcgccgac

SEQ ID NO: 30265 - DNA, 3692 bp, Zea Mays
cttgtagagttgaatctgcttcaaacaaataactacaaacctttaaataatattcaaggctgcaatgaatttgagctgtgcaattcacttgcagattatcgaagtgatttaatgataaccggtattatcacaaaggatattgagtctactgttttggctttggaactgaagcaacacaaactacagctgcaagagcaacgagttatgtttaccgatgtccttgaagaattgatggcactggcagaagcaactctatggaaagtgaaccagcatttggagaatattgcaatctgcactttacatgaggagaacaatgaggcaagggttgatttggagaacctgaagcaaaattgtgaagaaattatgaaaaaattgcatgccatgaacgaggaaaacacaacacttaaatgtttaatgtcctccttccaaacaaatttggatgcaaaaaacaaagctttgatggagttggaatgctctcatgcaaccatatgtacggagctggaactgacaattgatgccatgaatcgcagaagtactagagaaaattatttcatttctgaaaatgaaacgttgaagcaggaaattcggaatattttgtgcaaggatcagtgcatggttgaattaatggataacattgaagcagataagttattttccaccattgaaggtcgcttgcaattggttactgatcatgtgcacaattacattactgagcaaataaacacgatgagcaagttatccaatgacttagacattatcgaagtatcagcccaggagttaagcacacagaattcacttctcaagtccgaattaatcagaaaagaggaattaacaaagggcttatcatttgatcttagcctgttacaagagtctgcatctgtagcgaaagatcaagcagctgagattacagggttgagaaaagtaataaaatctttggaactagagcttgcatctaagtcgcttgaacttgatgatgttgtttctgataggcaacaattggaagcaatgattttgaagtgtaatcaaaatgttgctgccctagaggaggagctgggaaagaagattgatgaattaaacatagtttctatggagaatgctgaactaaaatcgcagatccagcatattgaagagattagttgcactatggaggagttagctgataaaagtgaagtaattagaagacttgaagaaaagttgattgaatcaagaactttaattgatgaaaggagtgtctgtcttcagagcttgcaaaatgatttctccaaactctcagatgaaaagacatcatgtgacactgagttgcttatcttgaaagagaagctggagatggctcaggcacttgcagaagaaagtgaagcaattgctacagaatctcggcagatagctgaggagcataaggcatatgccgaagggaaggatgaagaagtaaaggtattggagaggtcaattgaagaacttgagaatactgtatgcgttttagaaagcaaagtggaaattgtcaaggaagaagcagagcggcaaagaatgcagcgagaagaactagaagtggagctgcagaaagttaggcaacaaatgctagctgtaccaccctctgggaaagcaaggagatatatggaagatggaatgattgatttagctgactcatccaggcacccagtagatatgcacaatgagctcctcagtgctcaagagactattagaatacttagaaaggaggtttctgagaaggaatcagagattgctcagtgcaatgcacatatctcagaactaaacattcatgctgaggcagcggcacaagaatacaagcacaagttgatggagctggagactatggcacaacaggttaagacagacaattccacagcacatgcttgctctgggagacaagagaagattaactcaaaacctcggggctcaggttctccatttaaatgtatcggcatcggctttgtgcaacagatgaattctgagaaagatgaagagcttagtgctgcaaaacaacgtattgtggaactagagggcatagcagctagtagacaaagggagatattcatgttgaatgcgaaactagcaacaacagagagcatgacgcacgatgtgattcgagatatgcttggggttaaaatgaacatgacaacctgggcggctctagctgacaaccagcaaaagctggagacaaaagagcccatcacttctcaagcacaggaaatcaaagaccagtccaatgagctgatgaatttgaagcggcagcttgatgaattcattgaagagagacagagctggcttgacgaaataaaccagaagcaatcagagcttggagctgcccgcattactatagagaagttacgacaacgggaacactttatggtagctgaaatagagttgctaaaggctgagaattcaaactacaaaaccatcatccttaaccttgaagccgaagtgaagaaccttaccagacaacagaacctccagctccgaataaatcaccacgttaaaacgaaggaagagaacatcctgctgaagaggcagaacgaagagctaagtgcaaagctgaaacagctggggggcatccttacccgtacgaaggaagagctcgcccgctacagggtttcaaatggaagagatccgcacgaactgatcgaggaggaggagcttctgaggaagaaactagacgagagcgaacgagatagaagccagctggcggaaaacctatcaagcctatgctccagcattctgaaggtcgctggagtttcggactcagaatctgacgctactcttttgaaagcatcggagtgcttggatcagctccagtgccgtatcgcttctttggaaggccaagttgaggatctaaatctaaagtgcaaactagtgcgtgaaaaggcccgcctgtgcgagctccggagcaactcgtcgtctctgcgcacaggggcgaagggcaatctgacatcgcccagtccggacacatcgccaagcatttcgtccttccgatgacacaagcggacggatacatcgccgagaagctagtgtacattagtacgtacataacacattccgtgtaactattctagtgcagccgggctgcttagggaggattagttcagtccaacaatctccctttgctgattttatatatatctgctgtacaatatatataccgtgtgtgtacttgatgcagttccattcaacacttgtcttctctcttcgtctgtcgttttctttcttctaatgtacagcaggacttaaaaattggaatacacatgcaatcaaagcagtgccatgtttatgcagttcttttaggggtgtttggtttgaagaatcaatctgctatagatggggtggtgtaatacccaaagatttgagaaataaagtaaccctttagacaaagtgtttgagcgattttgtttattttttagcatctcaacaaatacaaggcctgaataaagcaattaataaataattaaataaaacaaatatgtattcatgctgataatcttggctgttgcatttatatgtgaacggttaaactgggatttgaatttggaattggatatttaaactagaacaaaaataggaaatagaaacaaggaaagaaaaaaaagaaaaagaaaaaactcttacctaggccgcaacccctatggtggcccaatatacctcacgcgacgctagcccaacctgggagagttggcgccgac

SEQ ID NO: 30266 - DNA, 787 bp, Zea Mays
cactgggtgaggtctggcgccggggctccgaccaacagcgtgcagccagccgagccgtgaagccaggggaagggatggagaaaggaggaaatattaggaggaaagggtgaggaaggtggagagctgctgttggccgtgatccccgctatgcgactactctcacacaacaggcagtttgctcgtcgctggataaatcgcgacgattcccgagtatgctcacgagagggtaaacatctctctcacagctgctggggtggcgctatccatggtgaagagggtgtccaccgctatggcggagcggctggcactcccaacaggttgtcaatggtctcctgcaaagggaggactgggaaacagcaataacagtgccacttgggatcattccagcaggtactggaaatggaatggcacgatctctactgcatgctgctggtgaaccattctctatatctaatgttgtgttcgcaatcatcagaggtcataaacgtgcccttgatgttacttctgttgtgcagggaaaggcgaggttctttagtgtcctgatgcttacatggggtctggtggctgatgttgatattgaatctgagaagtataggtggatgggaagtgctcgccttgatttttatggtcgactcttgctttactacttagttgcaagccccaactgcaggaaatggcttttttggttactgtaaatggtgtatagctttacttagaagtgcattcatgcattgtaacagccctagaagaaaggaccatagttatcatacctgtaacagccctagga

SEQ ID NO: 30267 - DNA, 593 bp, Zea Mays
atggcggagcggctggcactcccaacagcttatgaggccataataattgcacatcagaacctgcaaaatcccaagatacaaaaattgatagaaccaatatctcgccgtgcctccagacctgtggttgtcaatggtctcctgcaaagggaggactgggaaacagcaataacagtgccacttgggatcattccagcaggtactggaaatggaatggcacgatctctactgcatgctgctggtgaaccattctctatatctaatgttgtgttcgcaatcatcagaggtcataaacgtgcccttgatgttacttctgttgtgcagggaaaggcgaggttctttagtgtcctgatgcttacatggggtctggtggctgatgttgatattgaatctgagaagtataggtggatgggaagtgctcgccttgatttttatggtcgactcttgctttactacttagttgcaagccccaactgcaggaaatggcttttttggttactgtaaatggtgtatagctttacttagaagtgcattcatgcattgtaacagccctagaagaaaggaccatagttatcatacctgtaacagccctagga

SEQ ID NO: 30268 - DNA, 700 bp, Zea Mays
atacaagaatgatatgccactcatgacctgatcactcgagtcgaccgcagccggccattgctacctctgtggcttactcttctgcaagctttcctcttcctcctcggctttgaacaaccaagaagctcagctctagcacaccgtcgtcgacgttgcaacaaaccccaaccgctaccatgatcacgacgacgaccacgacgatgacagcagctcctgatctctccctccacatcagccctccgtcgccaccggagccgaggctgctgctggggttggaactcgacgacgacacggcggcggaggcggcggccgcgacgaagaaggcggacgacgcggcggcgatgcgggagtacaacaacctccaggtgcagcggcgccagctgcaccagccaagccagacggcgggccacgggttcaagaggggcacgtcgggcagcgccgccgccggcgccggcgggaggagaagttccagggcgccgcggatgcggtggaccaccgcgctgcacgcgcacttcgtgcacgccgtcgagctccttggcggccacgagagagcaacaccaaagtcggtgctggagctgatgaacgtgaaggatcttacactggcacatgtgaagagccacctgcagatgtacagaacagtgaagcagcagggcgcagacagaccatgtgtagcagcctgtgcatggtctgaggattcaag

SEQ ID NO: 30269 - DNA, 1500 bp, Zea Mays
atacaagaatgatatgccactcatgacctgatcactcgagtcgaccgcagccggccattgctacctctgtggcttactcttctgcaagctttcctcttcctcctcggctttgaacaaccaagaagctcagctctagcacaccgtcgtcgacgttgcaacaaaccccaaccgctaccatgatcacgacgacgaccacgacgatgacagcagctcctgatctctccctccacatcagccctccgtcgccaccggagccgaggctgctgctggggttggaactcgacgacgacacggcggcggaggcggcggccgcgacgaagaaggcggacgacgcggcggcgatgcgggagtacaacaacctccaggtgcagcggcgccagctgcaccagccaagccagacggcgggccacgggttcaagaggggcacgtcgggcagcgccgccgccggcgccggcgggaggagaagttccagggcgccgcggatgcggtggaccaccgcgctgcacgcgcacttcgtgcacgccgtcgagctccttggcggccacgagagagcaacaccaaagtcggtgctggagctgatgaacgtgaaggatcttacactggcacatgtgaagagccacctgcagatgtacagaacagtgaagcagcagggcgcagacagaccatgtgtagcagttgcaggccatgggcatgccagagacatggtcgtccttctcacaaccggtgtcggtgaaggggatgctggctttgttgacgacgtttccaacagcaacagcaacagcaacaactcagtcgtcgtcaacaacaccgtccctgctgccttcaacaacaaccatactgatagcaggacgccacagtctccaggcggacgggagcagcagcagcaaccggcgccggcggtggatcgtcgtcgagacgacgccgccgccgccgcagccgcttgtgcttgggtcgtcggacggcaggtccagcatcagcggagctgcagcgaaggagtgaccaagctgcagggactcaaggtaggagatgagcgcgtcgaccgtcatcacggggacgacgccatcgcggcccatcgtctcgtggaggacgaggctcgcgacgaccacgcaggaagcggcggcggcttccaacaacggcggccgtcgccgaacaacacgagcggcacggtctccagctcggagtggctcaatcagcagcactgtagcggcgtgatgagcgtcagggtgcttggactgccgcctgcgacgccaccgagcctggagatgagcctgggccgccagggctggcagatggatcagcagtgcggcggcgagttcgagttcgacttcgagccctccccgccgtcggcggccaaagagctaactctgctcaggtgcttgtgaaacgacagacgatgcagtggtgttgctttaatctgttgcttcttaatcagactctaatcaagacaacagttagccacaaagccccagacaactaagactgtcctacgtattccttcac

SEQ ID NO: 30270 - DNA, 1497 bp, Zea Mays
atacaagaatgatatgccactcatgacctgatcactcgagtcgaccgcagccggccattgctacctctgtggcttactcttctgcaagctttcctcttcctcctcggctttgaacaaccaagaagctcagctctagcacaccgtcgtcgacgttgcaacaaaccccaaccgctaccatgatcacgacgacgaccacgacgatgacagcagctcctgatctctccctccacatcagccctccgtcgccaccggagccgaggctgctgctggggttggaactcgacgacgacacggcggcggaggcggcggccgcgacgaagaaggcggacgacgcggcggcgatgcgggagtacaacaacctccaggtgcagcggcgccagctgcaccagccaagccagacggcgggccacgggttcaagaggggcacgtcgggcagcgccgccgccggcgccggcgggaggagaagttccagggcgccgcggatgcggtggaccaccgcgctgcacgcgcacttcgtgcacgccgtcgagctccttggcggccacgagagagcaacaccaaagtcggtgctggagctgatgaacgtgaaggatcttacactggcacatgtgaagagccacctgcagatgtacagaacagtgaagcagcagggcgcagacagaccatgtgtagcagttgcaggccatgggcatgccagagacatggtcgtccttctcacaaccggtgtcggtgaaggggatgctggctttgttgacgacgtttccaacagcaacagcaacagcaacaactcagtcgtcgtcaacaacaccgtccctgctgccttcaacaacaaccatactgataggacgccacagtctccaggcggacgggagcagcagcagcaaccggcgccggcggtggatcgtcgtcgagacgacgccgccgccgccgcagccgcttgtgcttgggtcgtcggacggcaggtccagcatcagcggagctgcagcgaaggagtgaccaagctgcagggactcaaggtaggagatgagcgcgtcgaccgtcatcacggggacgacgccatcgcggcccatcgtctcgtggaggacgaggctcgcgacgaccacgcaggaagcggcggcggcttccaacaacggcggccgtcgccgaacaacacgagcggcacggtctccagctcggagtggctcaatcagcagcactgtagcggcgtgatgagcgtcagggtgcttggactgccgcctgcgacgccaccgagcctggagatgagcctgggccgccagggctggcagatggatcagcagtgcggcggcgagttcgagttcgacttcgagccctccccgccgtcggcggccaaagagctaactctgctcaggtgcttgtgaaacgacagacgatgcagtggtgttgctttaatctgttgcttcttaatcagactctaatcaagacaacagttagccacaaagccccagacaactaagactgtcctacgtattccttcac

SEQ ID NO: 30271 - DNA, 2674 bp, Zea Mays
ccccagtggaaatctcaattgacatctcacatctctaagtgtgcccttgtcgattcccttcccttccttggcggccgcaagcccgcacggcgatcctgacagacggacggtcgccggcggcttctactcataaagttgcccaaccgagccgccgcaatgctgacagatgagaagccgattccggcccatctgccgtgaccccgacgccgtccactcaagcgccttcgcctccacgctgcggtgccgccggagctggactccgctaggccgcccgtctccatcctccagcacagctgcaccgtggccgagctgacagcgcccctgcctttcccagtgggccagtgcccgccgccgctgctttggtgtcctgcatctactcctgctgctctgcctctgcatctctcgtctgcggaatggaatgggcatgggtactctcgcctgcggtggtgtttgacacatggttcacaagctctgcctctcttgccatttccatctccgcatagcgtctcccctggtcccagacctgtgcccattccatctccgcatcgtctctcccaggtcctaagcctctgccatttacagccaactgcttcccacggtggtttccttcatagatctgaccaggattgtctccgtgaggtggaaggggttgtcaaggaggcaaacggatggcggctcagcgcctgctcttcctgaaatgttgtcgcggctactccacctctgctgaggacatggtcatctcctccctccgcctcatcccctccccttctgttagtgttaccaacccacctccactccctactattcttcattctactgactctcctcctgacccccatccaccgcttaccaccatgctcttatctgccgctgatcgtctccgcggggtcttcctccgcaagccctctggtcgcaacgtgcttcaccaggcgctatcctccacaggcattggcgctaccatggcactgtctccagaggtgcttgcgaatgtcgtcaataccagcaacctgagtggtgccgccactgtgacctactttgattgggcagtcactaactccaagcctcccccatctgtccacacctgcaacattgtcatcagggcattggggaggaagaaattttttgattatcttgatgacgcccttcagatcatgcgcagaaacaacatctttccagacctgaccacattggagatcatcatggatagcctagttgctgccaggcatgtcagtagggctgttgaggtgatcagtaccgatcaatttggatttgggattggaaaaacctgccacagaaaggatgcatttaccatcctcattaggtgtctttgccggaggtcacatgttggccttgctagctcgctcttgcaggctgctcgtaaggagttgtttggtcttgatagcaatgtgtacaatgatgtcatgggtggctgggcgaggtttgggagtgttgataaactgcaggaggtttggacaaagatgcaggaggatgggctggttccaaatgaggtttcacattgccatttaattgagggattgggtagagtcgggcagactgaggacgcactcaaggcgtttgagtatatggtacatgagagatatggtccaactacaatggcctacaatgtacttattttcaattttatccacattggggatttggacagttgcatcaagtattacaaggatatgttggataagaattgctccccaaacatcgaaacgtactccaagatgattaaagcctttttgagaggtcgcagggtagctgatgcgctccaaatgtttgatgacatgttgattcaaggagttctgccaaatactgggatgataacatcatttatcaatccactgtgtacatttggaccgcctcatgctgctttgatgatctacaaaaagagtaggaaggctggttgtgtaatatccttgaaagcttataagcttttgctggaaagactcgctaaatttgggaagagtggaatcgttttggacatttgggaagagatgcaggagtgtggatatcaacctgataaagagatttacgaatttattgtaaatgggctttgcaatgtgggtaaggtcgatgctgctgtgtctgtggtggaggaatcacttcggaatggcttctgtcttgggagagttgtttacagcaaactgaacaacaagctgttggaaatggacaaagttgagaccgcatataatttgttcaagaaagtcaaacatgcacgtgcacttacgaattcacgcaattattgccgtgctaatggttggcatttttgagcataaccagtttgtctgcagaagagccatggagtccattccgcatcggggaacactgtttacgtgcacccaggtcgtcctccaaccaacatctagcaattcaagtgggcagaacggcgatagaggatgtgagctacaacacttgaaggtcaaagtgacatctggtgatgatgctcaatgtaatcttctatatggacactttgtacgcatgaggaaaaattatgctgcactaatattcaagagagaaagctcgtggatgccagtaggtcttttgtacatactgcttgctcaacacatgtcatgtcgaggctgcccttttgtgtattgcttggtaaatgctgcgaaacgttcctgaatatatgggtttttgagccttggaagaggatctggaagag

SEQ ID NO: 30272 - DNA, 2259 bp, Zea Mays
cttacatttacattgtcaaacttaaaaacccggccacttctctctactctagatctcactgctgcgccgtagcgctagtgccgccgcccgctcaccctcatcccctaggcctccacttctctgattggggcgacttcatggcgagcgggcacaaatccgacatgggcgcctctgctccgacgaccgctctctcctctgcgcctccactgcccctctccctgttaggcggcgacagcaaggaggaggaggaggaagggttggctgggccaccgtcggcaccacgcgaggcacgagcgcaaccgcgcctatgagttccatagctccgagccgtcgacgctaggcggcagtgccctcgtctggacctgcccgcgcccaggcggagccgccgccgacccgagatctgcctaggtcgcccgcctgctctggatgaccaaggtcacctccgcggacgctgagcagctgagctcctcccgcgaaggcgtgaacccgcccccagccgaggcactgagctccgccctgccccgctcgggcgtgcccctgcacaggcccagccgcctcgctcctgtttgccgccacggttccagtaacgacgaggctgagcgacaactccagtgtcccgatgttgaataagtgaagtggatgagtcagatggtggaggagacagtgtgtaggagcagcctgtttatgtggccgtagtggatctcgcatgttccgaagagttcctggaactcatcaagagtgcacttcttacagccctagaagcctgtttgtgagcttggtattcctcctgaaaacatcactgcaaaccaattgttatttggcacattgagggagtacgccggatttgatcccacagagcccacttcacgcagtgggggtaaagcaaaagcagtgcagcaaataaaataggaccatggctacaagacaattgttacaattggtgatggcgcaactgatctggaggctcggcaacctggcggagcagactgtgtgccgccagagctagtggagggaggcgggtcattcgattcgccatgcttaggattggagaatcaatagagtaatagtatatacatggtggggagtgaaaccaacagaggaagaatccgttcttgatcaaaattagtcgactgcttggttcgtcgtctgcgtgttcgatcggaggttggcgacgccttggcgtgggcgctttccgcaagaaagcaaggaaattggtcggcttctacgctaccagtccggtccacttcgttcacctttccctttcggtgccaccaacatctaactgtacatgcatgcttgcttagtgctgaccgccgctaatgcgctggatatttctgggagtggaaacgaaagtgtactctgaatttcaagttcctgtcaaaagtaagatcctctgacgaaggtgtgtactctgaatttcaagtgccaacaatctatgttttccagtcaaaaagtattacatggtgcccggctgttagcttctccttttcagttgttgcccttgccggcctggcatttgttcaacctttcctctctctctctctctctctctctctctctctctttctgctacagccattttactgatgataacagtgctaattggtcaatttcacatatatttaaatatatatatatatatggagctaatactggtgaagtagtaggtgtggttgtgatcatgcataaactaactgttgctgccacatggattggagagggagatcgatccacagaaaatggtatcatttgtcaagtgcatgttaggacttgatgctgttgtttgggacattattgggtcgtcattgttggagaaagttgtgtatctacttacagaattggatgttaatataacatgggaagatattcttcaagatgaacacaacaaaggtatatttgacatggagcttgaggatttggctgaggatgaacataaccttggccgcacaagtgtagagacttgaattcatatatacttagttaggctcaatgttagcataaacagttgatgagcaagttttcccattagtattttagtttgaatttagagtacaattatgtatgagttatttgataatgcttatttatgagatattgaatggtgtttatctatattgtattaattatagtgttattaaatatatgtgtttgtatttttctcttttaaattattataatgcggtaattgaagaatgtattgacatgtaagtcatttcgtttaaatcttaataagacagctatcgaaacgtctaatatgag

SEQ ID NO: 30273 - DNA, 1921 bp, Zea Mays
gtcaaacttaaaaacccggccacttctctctactctagatctcactgctgcgccgtagcgctagtgccgccgcccgctcaccctcatcccctaggcctccacttctctgattggggcgacttcatggcgagcgggcacaaatccgacatgggcgcctctgctccgacgaccgctctctcctctgcgcctccactgcccctctccctgttaggcggcgacagcaaggaggaggaggaggaagggttggctgggccaccgtcggcaccacgcgaggcacgagcgcaaccgcgcctatgagttccatagctccgagccgtcgacgctaggcggcagtgccctcgtctggacctgcccgcgcccaggcggagccgccgccgacccgagatctgcctaggtcgcccgcctgctctggatgaccaaggtcacctccgcggacgctgagcagctgagctcctcccgcgaaggcgtgaacccgcccccagccgaggcactgagctccgccctgccccgctcgggcgtgcccctgcacaggcccagccgcctcgctcctgtttgccgccacggttccagtaacgacgaggctgagcgacaactccagtgtcccgatgtgtgacccgagttcaactcctctttcgtcgacctcgagatcccagtggatgagtcagatggtggaggagacagtgtgtaggagcagcctgtttatgtggccgtagtggatctcgcatgttccgaagagttcctggaactcatcaagagtgcacttcttacagccctagaagcctgtttgtgagcttggtattcctcctgaaaacatcactgcaaaccaattgttatttggcacattgagggagtacgccggatttgatcccacagagcccacttcacgcagtgggggtaaagcaaaagcagtgcagcaaataaaataggaccatggctacaagacaattgttacaattggtgatggcgcaactgatctggaggctcggcaacctggcggagcagactgtgtgccgccagagctagtggagggaggcgggtcattcgattcgccatgcttaggattggagaatcaatagagtaatagtatatacatggtggggagtgaaaccaacagaggaagaatccgttcttgatcaaaattagtcgactgcttggttcgtcgtctgcgtgttcgatcggaggttggcgacgccttggcgtgggcgctttccgcaagaaagcaaggaaattgtgctgaccgccgctaatgcgctggatatttctgggagtggaaacgaaagtgtactctgaatttcaagttcctgtcaaaagtaagatcctctgacgaaggtgtggttgtgatcatgcataaactaactgttgctgccacatggattggagagggagatcgatccacagaaaatggtatcatttgtcaagtgcatgttaggacttgatgctgttgtttgggacattattgggtcgtcattgttggagaaagttgtgtatctacttacagaattggatgttaatataacatgggaagatattcttcaagatgaacacaacaaaggtatatttgacatggagcttgaggatttggctgaggatgaacataaccttggccgcacaagtgtagagacttgaattcatatatacttagttaggctcaatgttagcataaacagttgatgagcaagttttcccattagtattttagtttgaatttagagtacaattatgtatgagttatttgataatgcttatttatgagatattgaatggtgtttatctatattgtattaattatagtgttattaaatatatgtgtttgtatttttctcttttaaattattataatgcggtaattgaagaatgtattgacatgtaagtcatttcgtttaaatcttaataagacagctatcgaaacgtctaatatgag

SEQ ID NO: 30274 - DNA, 2137 bp, Zea Mays
cttctctctactctagatctcactgctgcgccgtagcgctagtgccgccgcccgctcaccctcatcccctaggcctccacttctctgattggggcgacttcatggcgagcgggcacaaatccgacatgggcgcctctgctccgacgaccgctctctcctctgcgcctccactgcccctctccctgttaggcggcgacagcaaggaggaggaggaggaagggttggctgggccaccgtcggcaccacgcgaggcacgagcgcaaccgcgcctatgagttccatagctccgagccgtcgacgctaggcggcagtgccctcgtctggacctgcccgcgcccaggcggagccgccgccgacccgagatctgcctaggtcgcccgcctgctctggatgaccaaggtcacctccgcggacgctgagcagctgagctcctcccgcgaaggcgtgaacccgcccccagccgaggcactgagctccgccctgccccgctcgggcgtgcccctgcacaggcccagccgcctcgctcctgtttgccgccacggttccagtaacgacgaggctgagcgacaactccagtgtcccgatgttgaataagtgaagtggatgagtcagatggtggaggagacagtgtgtaggagcagcctgtttatgtggccgtagtggatctcgcatgtaagttccgaagagttcctggaactcatcaagagtgcacttcttacagccctagaagcctgtttgtgagcttggtattcctcctgaaaacatcactgcaaaccaattgttatttggcacattgagggagtacgccggatttgatcccacagagcccacttcacgcagtgggggtaaagcaaaagcagtgcagcaaataaaataggaccatggctacaagacaattgttacaattggtgatggcgcaactgatctggaggctcggcaacctggcggagcagactgtgtgccgccagagctagtggagggaggcgggtcattcgattcgccatgcttaggattggagaatcaatagagtaatagtatatacatggtggggagtgaaaccaacagaggaagaatccgttcttgatcaaaattagtcgactgcttggttcgtcgtctgcgtgttcgatcggaggttggcgacgccttggcgtgggcgctttccgcaagaaagcaaggaaattgtgctgaccgccgctaatgcgctggatatttctgggagtggaaacgaaagtgtactctgaatttcaagttcctgtcaaaagtaagatcctctgacgaaggtgtgtactctgaatttcaagtgccaacaatctatgttttccagtcaaaaagtattacatggtgcccggctgttagcttctccttttcagttgttgcccttgccggcctggcatttgttcaacctttcctctctctctctctctctctctctctctctctctttctgctacagccattttactgatgataacagtgctaattggtcaatttcacatatatttaaatatatatatatatatggagctaatactggtgaagtagtaggtgtggttgtgatcatgcataaactaactgttgctgccacatggattggagagggagatcgatccacagaaaatggtatcatttgtcaagtgcatgttaggacttgatgctgttgtttgggacattattgggtcgtcattgttggagaaagttgtgtatctacttacagaattggatgttaatataacatgggaagatattcttcaagatgaacacaacaaaggtatatttgacatggagcttgaggatttggctgaggatgaacataaccttggccgcacaagtgtagagacttgaattcatatatacttagttaggctcaatgttagcataaacagttgatgagcaagttttcccattagtattttagtttgaatttagagtacaattatgtatgagttatttgataatgcttatttatgagatattgaatggtgtttatctatattgtattaattatagtgttattaaatatatgtgtttgtatttttctcttttaaattattataatgcggtaattgaagaatgtattgacatgtaagtcatttcgtttaaatcttaataagacagctatcgaaacgtctaatatgag

SEQ ID NO: 30275 - DNA, 1985 bp, Zea Mays
cttctctctactctagatctcactgctgcgccgtagcgctagtgccgccgcccgctcaccctcatcccctaggcctccacttctctgattggggcgacttcatggcgagcgggcacaaatccgacatgggcgcctctgctccgacgaccgctctctcctctgcgcctccactgcccctctccctgttaggcggcgacagcaaggaggaggaggaggaagggttggctgggccaccgtcggcaccacgcgaggcacgagcgcaaccgcgcctatgagttccatagctccgagccgtcgacgctaggcggcagtgccctcgtctggacctgcccgcgcccaggcggagccgccgccgacccgagatctgcctaggtcgcccgcctgctctggatgaccaaggtcacctccgcggacgctgagcagctgagctcctcccgcgaaggcgtgaacccgcccccagccgaggcactgagctccgccctgccccgctcgggcgtgcccctgcacaggcccagccgcctcgctcctgtttgccgccacggttccagtaacgacgaggctgagcgacaactccagtgtcccgatgtgtgacccgagttcaactcctctttcgtcgacctcgagatcccaggtactatgatacacagctaccttctcgcaacgtgatgtgggatgaattttgacctgtaggttgaataagtgaagtggatgagtcagatggtggaggagacagtgtgtaggagcagcctgtttatgtggccgtagtggatctcgcatgttccgaagagttcctggaactcatcaagagtgcacttcttacagccctagaagcctgtttgtgagcttggtattcctcctgaaaacatcactgcaaaccaattgttatttggcacattgagggagtacgccggatttgatcccacagagcccacttcacgcagtgggggtaaagcaaaagcagtgcagcaaataaaataggaccatggctacaagacaattgttacaattggtgatggcgcaactgatctggagtgtcatttgcaggctcggcaacctggcggagcagactgtgtgccgccagagctagtggagggaggcgggtcattcgattcgccatgcttaggattggagaatcaatagagtaatagtatatacatggtggggagtgaaaccaacagaggaagaatccgttcttgatcaaaattagtcgactgcttggttcgtcgtctgcgtgttcgatcggaggttggcgacgccttggcgtgggcgctttccgcaagaaagcaaggaaattgtgctgaccgccgctaatgcgctggatatttctgggagtggaaacgaaagtgtactctgaatttcaagttcctgtcaaaagtaagatcctctgacgaaggtgtggttgtgatcatgcataaactaactgttgctgccacatggattggagagggagatcgatccacagaaaatggtatcatttgtcaagtgcatgttaggacttgatgctgttgtttgggacattattgggtcgtcattgttggagaaagttgtgtatctacttacagaattggatgttaatataacatgggaagatattcttcaagatgaacacaacaaaggtatatttgacatggagcttgaggatttggctgaggatgaacataaccttggccgcacaagtgtagagacttgaattcatatatacttagttaggctcaatgttagcataaacagttgatgagcaagttttcccattagtattttagtttgaatttagagtacaattatgtatgagttatttgataatgcttatttatgagatattgaatggtgtttatctatattgtattaattatagtgttattaaatatatgtgtttgtatttttctcttttaaattattataatgcggtaattgaagaatgtattgacatgtaagtcatttcgtttaaatcttaataagacagctatcgaaacgtctaatatgag

SEQ ID NO: 30276 - DNA, 1856 bp, Zea Mays
cttctctctactctagatctcactgctgcgccgtagcgctagtgccgccgcccgctcaccctcatcccctaggcctccacttctctgattggggcgacttcatggcgagcgggcacaaatccgacatgggcgcctctgctccgacgaccgctctctcctctgcgcctccactgcccctctccctgttaggcggcgacagcaaggaggaggaggaggaagggttggctgggccaccgtcggcaccacgcgaggcacgagcgcaaccgcgcctatgagttccatagctccgagccgtcgacgctaggcggcagtgccctcgtctggacctgcccgcgcccaggcggagccgccgccgacccgagatctgcctaggtcgcccgcctgctctggatgaccaaggtcacctccgcggacgctgagcagctgagctcctcccgcgaaggcgtgaacccgcccccagccgaggcactgagctccgccctgccccgctcgggcgtgcccctgcacaggcccagccgcctcgctcctgtttgccgccacggttccagtaacgacgaggctgagcgacaactccagtgtcccgattggatgagtcagatggtggaggagacagtgtgtaggagcagcctgtttatgtggccgtagtggatctcgcatgttccgaagagttcctggaactcatcaagagtgcacttcttacagccctagaagcctgtttgtgagcttggtattcctcctgaaaacatcactgcaaaccaattgttatttggcacattgagggagtacgccggatttgatcccacagagcccacttcacgcagtgggggtaaagcaaaagcagtgcagcaaataaaataggaccatggctacaagacaattgttacaattggtgatggcgcaactgatctggaggctcggcaacctggcggagcagactgtgtgccgccagagctagtggagggaggcgggtcattcgattcgccatgcttaggattggagaatcaatagagtaatagtatatacatggtggggagtgaaaccaacagaggaagaatccgttcttgatcaaaattagtcgactgcttggttcgtcgtctgcgtgttcgatcggaggttggcgacgccttggcgtgggcgctttccgcaagaaagcaaggaaattgtgctgaccgccgctaatgcgctggatatttctgggagtggaaacgaaagtgtactctgaatttcaagttcctgtcaaaagtaagatcctctgacgaagtaggtgtggttgtgatcatgcataaactaactgttgctgccacatggattggagagggagatcgatccacagaaaatggtatcatttgtcaagtgcatgttaggacttgatgctgttgtttgggacattattgggtcgtcattgttggagaaagttgtgtatctacttacagaattggatgttaatataacatgggaagatattcttcaagatgaacacaacaaaggtatatttgacatggagcttgaggatttggctgaggatgaacataaccttggccgcacaagtgtagagacttgaattcatatatacttagttaggctcaatgttagcataaacagttgatgagcaagttttcccattagtattttagtttgaatttagagtacaattatgtatgagttatttgataatgcttatttatgagatattgaatggtgtttatctatattgtattaattatagtgttattaaatatatgtgtttgtatttttctcttttaaattattataatgcggtaattgaagaatgtattgacatgtaagtcatttcgtttaaatcttaataagacagctatcgaaacgtctaatatgag

SEQ ID NO: 30277 - DNA, 2191 bp, Zea Mays
cttctctctactctagatctcactgctgcgccgtagcgctagtgccgccgcccgctcaccctcatcccctaggcctccacttctctgattggggcgacttcatggcgagcgggcacaaatccgacatgggcgcctctgctccgacgaccgctctctcctctgcgcctccactgcccctctccctgttaggcggcgacagcaaggaggaggaggaggaagggttggctgggccaccgtcggcaccacgcgaggcacgagcgcaaccgcgcctatgagttccatagctccgagccgtcgacgctaggcggcagtgccctcgtctggacctgcccgcgcccaggcggagccgccgccgacccgagatctgcctaggtcgcccgcctgctctggatgaccaaggtcacctccgcggacgctgagcagctgagctcctcccgcgaaggcgtgaacccgcccccagccgaggcactgagctccgccctgccccgctcgggcgtgcccctgcacaggcccagccgcctcgctcctgtttgccgccacggttccagtaacgacgaggctgagcgacaactccagtgtcccgatgttgaataagtgaagtggatgagtcagatggtggaggagacagtgtgtaggagcagcctgtttatgtggccgtagtggatctcgcatgttccgaagagttcctggaactcatcaagagtgcacttcttacagccctagaagcctgtttgtgagcttggtattcctcctgaaaacatcactgcaaaccaattgttatttggcacattgagggagtacgccggatttgatcccacagagcccacttcacgcagtgggggaccatggctacaagacaattgttacaattggtgatggcgcaactgatctggaggctcggcaacctggcggagcagactgtgtgccgccagagctagtggagggaggcgggtcattcgattcgccatgcttaggattggagaatcaatagagtaatagtatatacatggtggggagtgaaaccaacagaggaagaatccgttcttgatcaaaattagtcgactgcttggttcgtcgtctgcgtgttcgatcggaggttggcgacgccttggcgtgggcgctttccgcaagaaagcaaggaaattggtcggcttctacgctaccagtccggtccacttcgttcacctttccctttcggtgccaccaacatctaactgtacatgcatgcttgcttagtgctgaccgccgctaatgcgctggatatttctgggagtggaaacgaaagtgtactctgaatttcaagttcctgtcaaaagtaagatcctctgacgaaggtgtgtactctgaatttcaagtgccaacaatctatgttttccagtcaaaaagtattacatggtgcccggctgttagcttctccttttcagttgttgcccttgccggcctggcatttgttcaacctttcctctctctctctctctctctctctctctctctctttctgctacagccattttactgatgataacagtgctaattggtcaatttcacatatatttaaatatatatatatatatggagctaatactggtgaagtagtaggtgtggttgtgatcatgcataaactaactgttgctgccacatggattggagagggagatcgatccacagaaaatggtatcatttgtcaagtgcatgttaggacttgatgctgttgtttgggacattattgggtcgtcattgttggagaaagttgtgtatctacttacagaattggatgttaatataacatgggaagatattcttcaagatgaacacaacaaaggtatatttgacatggagcttgaggatttggctgaggatgaacataaccttggccgcacaagtgtagagacttgaattcatatatacttagttaggctcaatgttagcataaacagttgatgagcaagttttcccattagtattttagtttgaatttagagtacaattatgtatgagttatttgataatgcttatttatgagatattgaatggtgtttatctatattgtattaattatagtgttattaaatatatgtgtttgtatttttctcttttaaattattataatgcggtaattgaagaatgtattgacatgtaagtcatttcgtttaaatcttaataagacagctatcgaaacgtctaatatgag

SEQ ID NO: 30278 - DNA, 1939 bp, Zea Mays
cttctctctactctagatctcactgctgcgccgtagcgctagtgccgccgcccgctcaccctcatcccctaggcctccacttctctgattggggcgacttcatggcgagcgggcacaaatccgacatgggcgcctctgctccgacgaccgctctctcctctgcgcctccactgcccctctccctgttaggcggcgacagcaaggaggaggaggaggaagggttggctgggccaccgtcggcaccacgcgaggcacgagcgcaaccgcgcctatgagttccatagctccgagccgtcgacgctaggcggcagtgccctcgtctggacctgcccgcgcccaggcggagccgccgccgacccgagatctgcctaggtcgcccgcctgctctggatgaccaaggtcacctccgcggacgctgagcagctgagctcctcccgcgaaggcgtgaacccgcccccagccgaggcactgagctccgccctgccccgctcgggcgtgcccctgcacaggcccagccgcctcgctcctgtttgccgccacggttccagtaacgacgaggctgagcgacaactccagtgtcccgatgttgaataagtgaagtggatgagtcagatggtggaggagacagtgtgtaggagcagcctgtttatgtggccgtagtggatctcgcatgttccgaagagttcctggaactcatcaagagtgcacttcttacagccctagaagcctgtttgtgagcttggtattcctcctgaaaacatcactgcaaaccaattgttatttggcacattgagggagtacgccggatttgatcccacagagcccacttcacgcagtgggggtaaagcaaaagcagtgcagcaaataaaataggaccatggctacaagacaattgttacaattggtgatggcgcaactgatctggaggctcggcaacctggcggagcagactgtgtgccgccagagctagtggagggaggcgggtcattcgattcgccatgcttaggattggagaatcaatagagtaatagtatatacatggtggggagtgaaaccaacagaggaagaatccgttcttgatcaaaattagtcgactgcttggttcgtcgtctgcgtgttcgatcggaggttggcgacgccttggcgtgggcgctttccgcaagaaagcaaggaaattggtcggcttctacgctaccagtccggtccacttcgttcacctttccctttcggtgccaccaacatctaactgtacatgcatgcttgcttagtgctgaccgccgctaatgcgctggatatttctgggagtggaaacgaaagtgtactctgaatttcaagttcctgtcaaaagtgtggttgtgatcatgcataaactaactgttgctgccacatggattggagagggagatcgatccacagaaaatggtatcatttgtcaagtgcatgttaggacttgatgctgttgtttgggacattattgggtcgtcattgttggagaaagttgtgtatctacttacagaattggatgttaatataacatgggaagatattcttcaagatgaacacaacaaaggtatatttgacatggagcttgaggatttggctgaggatgaacataaccttggccgcacaagtgtagagacttgaattcatatatacttagttaggctcaatgttagcataaacagttgatgagcaagttttcccattagtattttagtttgaatttagagtacaattatgtatgagttatttgataatgcttatttatgagatattgaatggtgtttatctatattgtattaattatagtgttattaaatatatgtgtttgtatttttctcttttaaattattataatgcggtaattgaagaatgtattgacatgtaagtcatttcgtttaaatcttaataagacagctatcgaaacgtctaatatgag

SEQ ID NO: 30279 - DNA, 2227 bp, Zea Mays
cttctctctactctagatctcactgctgcgccgtagcgctagtgccgccgcccgctcaccctcatcccctaggcctccacttctctgattggggcgacttcatggcgagcgggcacaaatccgacatgggcgcctctgctccgacgaccgctctctcctctgcgcctccactgcccctctccctgttaggcggcgacagcaaggaggaggaggaggaagggttggctgggccaccgtcggcaccacgcgaggcacgagcgcaaccgcgcctatgagttccatagctccgagccgtcgacgctaggcggcagtgccctcgtctggacctgcccgcgcccaggcggagccgccgccgacccgagatctgcctaggtcgcccgcctgctctggatgaccaaggtcacctccgcggacgctgagcagctgagctcctcccgcgaaggcgtgaacccgcccccagccgaggcactgagctccgccctgccccgctcgggcgtgcccctgcacaggcccagccgcctcgctcctgtttgccgccacggttccagtaacgacgaggctgagcgacaactccagtgtcccgatgtgtgacccgagttcaactcctctttcgtcgacctcgagatcccagtggatgagtcagatggtggaggagacagtgtgtaggagcagcctgtttatgtggccgtagtggatctcgcatgttccgaagagttcctggaactcatcaagagtgcacttcttacagccctagaagcctgtttgtgagcttggtattcctcctgaaaacatcactgcaaaccaattgttatttggcacattgagggagtacgccggatttgatcccacagagcccacttcacgcagtgggggtaaagcaaaagcagtgcagcaaataaaataggaccatggctacaagacaattgttacaattggtgatggcgcaactgatctggaggctcggcaacctggcggagcagactgtgtgccgccagagctagtggagggaggcgggtcattcgattcgccatgcttaggattggagaatcaatagagtaatagtatatacatggtggggagtgaaaccaacagaggaagaatccgttcttgatcaaaattagtcgactgcttggttcgtcgtctgcgtgttcgatcggaggttggcgacgccttggcgtgggcgctttccgcaagaaagcaaggaaattggtcggcttctacgctaccagtccggtccacttcgttcacctttccctttcggtgccaccaacatctaactgtacatgcatgcttgcttagtgctgaccgccgctaatgcgctggatatttctgggagtggaaacgaaagtgtactctgaatttcaagttcctgtcaaaagtaagatcctctgacgaaggtgtgtactctgaatttcaagtgccaacaatctatgttttccagtcaaaaagtattacatggtgcccggctgttagcttctccttttcagttgttgcccttgccggcctggcatttgttcaacctttcctctctctctctctctctctctctctctctctctttctgctacagccattttactgatgataacagtgctaattggtcaatttcacatatatttaaatatatatatatatatggagctaatactggtgaagtagtaggtgtggttgtgatcatgcataaactaactgttgctgccacatggattggagagggagatcgatccacagaaaatggtatcatttgtcaagtgcatgttaggacttgatgctgttgtttgggacattattgggtcgtcattgttggagaaagttaatataacatgggaagatattcttcaagatgaacacaacaaaggtatatttgacatggagcttgaggatttggctgaggatgaacataaccttggccgcacaagtgtagagacttgaattcatatatacttagttaggctcaatgttagcataaacagttgatgagcaagttttcccattagtattttagtttgaatttagagtacaattatgtatgagttatttgataatgcttatttatgagatattgaatggtgtttatctatattgtattaattatagtgttattaaatatatgtgtttgtatttttctcttttaaattattataatgcggtaattgaagaatgtattgacatgtaagtcatttcgtttaaatcttaataagacagctatcgaaacgtctaatatgag

SEQ ID NO: 30280 - DNA, 1016 bp, Zea Mays
tgtttctcggcctacatgtgagaagtttcttcttaatgcaatgccgcaggggcaggcaccagcttctcagttcgaattctgtttcattccggctgtatgatctcaagcagcaaggctatattgagagacaagaggttaagcagatggttgttgcaacacttgccgagtcaggaatgaatctttcggatgaaattgtagagagtataattgacaagacatttgaggaggcagacacaaagcatgatggaagaattgacaaggaagagtggcgcaatctagtcattcggcatccttctttgctgaagaacatgactcttcagtacctcaaggacatcaccactacatttccaagctttgtctttcactctcaggttgatgataactgaaattgatggggttactttgaaaagaaacattagaagatattctcatgggttctgatatggttttcatttttcaaaattgggttgttggattgaaagattgtagtgttgtgaagtacgtgcatgttggattcgaggactcgattttttttgtcaaccttgtttctttcatttgcatgtctggatgcgcatgaataagatatgaagtttatgtctaaagttttcttttttttccttgttttctttggctggccggcaatcggatccagtttttagaagcttgtctttctgtacaggatagaaacagcgttttaaggatttatattgtccttgtacttttttctgctgtagctagagcagaatattttttggttgaaggtggcgtgcttccattttttaatatatgtgtgttttatcttcaattcattctttctcccattacttctccaagcattttagtttccaagtaccatgtttttcccctgagttgatagatattgttatggtgcatatatattccattgaacaatatttacaggtccatattggaacatttgaattcaagtgtcatatactcatattctccaaaagtttatatatgttatggacaatcaaattaaacctgcaaacaca

SEQ ID NO: 30281 - DNA, 974 bp, Zea Mays
gtcgattcaacaatcttttagtaatatactgagtttatgtttcattccggctgtatgatctcaagcagcaaggctatattgagagacaagaggttaagcagatggttgttgcaacacttgccgagtcaggaatgaatctttcggatgaaattgtagagagtataattgacaagacatttgaggaggcagacacaaagcatgatggaagaattgacaaggaagagtggcgcaatctagtcattcggcatccttctttgctgaagaacatgactcttcagtacctcaaggacatcaccactacatttccaagctttgtctttcactctcaggttgatgataactgaaattgatggggttactttgaaaagaaacattagaagatattctcatgggttctgatatggttttcatttttcaaaattgggttgttggattgaaagattgtagtgttgtgaagtacgtgcatgttggattcgaggactcgattttttttgtcaaccttgtttctttcatttgcatgtctggatgcgcatgaataagatatgaagtttatgtctaaagttttcttttttttccttgttttctttggctggccggcaatcggatccagtttttagaagcttgtctttctgtacaggatagaaacagcgttttaaggatttatattgtccttgtacttttttctgctgtagctagagcagaatattttttggttgaaggtggcgtgcttccattttttaatatatgtgtgttttatcttcaattcattctttctcccattacttctccaagcattttagtttccaagtaccatgtttttcccctgagttgatagatattgttatggtgcatatatattccattgaacaatatttacaggtccatattggaacatttgaattcaagtgtcatatactcatattctccaaaagtttatatatgttatggacaatcaaattaaacctgcaaacaca

SEQ ID NO: 30282 - DNA, 4115 bp, Zea Mays
gattattcaacaggcatcctcccccgacttccatttcgccaccccctacccgactccactgggcgctcgcgctcgcgcacgcgcacgcgcacgccgcagcccccctccgcagccgacgacgacgagcggaagggaagagggtcaactctcgatctccgcacggtccgtggggacgcacgcacggcgcgcgtggcggtctacccggtcgggggtcggatcctagctgaatcggggagatttgccggccaggaaggaaaacgacaagtgaaacgaagctgtacgtgttcaggtgatcggataatggctagtgatcggataatggttgacactttgaccgaggacaatggtggtgatgctagatcctcatcatctgaagagatgccaagtgaccaacagagtcatcctggggattctttagctgagtggaggtcaagtgagcaagttgagaatggaacaccatccacttcaccagcatactcagacaatgatgatgatgactgtggacctaggccttctgatctttatgggaagtttacatggagaattgataatttctcccaaatcaacaagagagagctaagaagtaattcctttgatgttggtggatttaagtggtatatcttaatttacccacaaggatgtgatgtatgcaatcacctctcactctttctttgtgttgccaaccatgataagctactcccaggatggagtcactttgcgcaatttacaatagctgtaattaatagagaccctaagaaatctaagtattctgatacactgcatcggttttggaagaaagagcatgattgggggtggaaaaagtttatggaactgtcaaaattacatgatggctttattgttgaggatgttcttaccatcaaagcccaagttcaagttatcagggagaagacagaccgtccatttcgttgccttgatggccattaccgaagggaactaattagggtgtatctatcaaatgttgaacaagtttgccggcgctttattgatgaaagaagaagcaagcttagcaggttgattgaggataaactggggtggtccagtttcagtggattctggctagcaatggatccaagtgtgcgtcgacacatgacaagggaaaagactgaaactatattgaaagttatagtgaaacaattctttatagagaaagaagttacatcaaccttggtaattgactctctatatagtggacttaaggcacttgaataccagagcaagaacaaaaaggcgatacctaaactaacagagacagatgctcggagcactccaatggtacttattgatcaggacatgtttgttttggctgatgatgtaatatttctgcttgaaagagctgcattggacacactgccacaccaacatttgcccacaaaagatgataaaagttcgcaaaaccgcacaaaggatggcaactcaggtcaggagttcagcaaagattctattgagcgtgatgatagacgacttatagagctaggctggaagacattggagcttttttccttagctcatatattcagccgaatacaagtggcacatcaagaggctgtggctttgaagcgccaagaggaacttattcgtgaagaagaagaagctgggctagctgaaattgaactcaaggcaaagcgtagtgccgctgaaaaggaaaaacgtgccaagaaaaaacaggcaaaacagaagaaaaatagtcgaaaaggtaataaggggaaaagtggcaagtccaacatcaataaggaaataattatggaccacagtcattcagatgatagaatattggatgatttttgtggacaaattgaagagatgcccttaaatgctgacaaccctgaagaagtttctgatatatctgacagtagagacgataattcagacatgcttcatgttgatattgaagaccgtgaatctagccctgttaattgggagatagatgcttcagaaactcaaactactattcctggaagtagtgaggtgcaaaatgaccatgcaggaaagaggacctctactgtggatgatagctcatcgtcttgttcatctgactcagtgccttcagttactgtgaatggatcatataaaggaggtgcctggacaagcgtcagatcctcatccaataggggaaacaacaggaggaataaggatactgaagcacgggcaggatttgcacaaggtggatcatgttcatcgcataatggttttataggctctggcagcaatgcctctggccactcaaaggaaagacacgaacctgaggatgataaagttgtcttgcagaggaagcaacatgcacaatggaacattgatatcattagctcctccaagtcaagaatggcagagtcttcattttcttctgtgagctctattaagaagcaacctcaaccaaattttttgctagaaagcaccaatagtttgaatcaccgtggaagcgaagcttctggcactgtgacttccactacaacagcgggtgcctcttcaaccccggccactcagttagttttgaataaaggacctgtatccagtgctgcaacccagaatgagaagccactacctctgcaggtgcttgtaccatccaaatctgaagtgcagaagcaggcttccctaactggcagtgcaactaccgaggccgtttcagtatcaaggcccttgactgccccacaagtccctgcagcaaaacaaagtgcaccagtcacttcaacagctcagaatgcaccttttctttctcgttcaatgagtgctgttgggcggttggggaatgaaccatctgccaatgctcctagtttcgttccccgttcacgaacatatcgcaatgccatgatggagaaaagttctggtggtggaagctgtttcacacatcagcaaggttcatcggagcaagcagttgcaccatggcaatcgatgtttacatcgcaacctttcattcggccatcagagaccttgtcttggaaagaggaaacattattgagatctgggtttacatttggaactgtgaagcccgagtcactgaacccatatcagggcagagaagagaactcacagcaagcgagcagcaacagcagtgattgtgcgccatcgagttcaaacatcagaagcgagatcgagaagctgaatttgagcggaagaccacgaagcaagcaactgttgtcagaaatttcgaccagatttactccctatcagccacaaggcttggtcgctgatgagttcccacacctagacatcatcaacgacttgctggatgaggagcagagtgacagaagaagggttcttcaacctgattttgttcaacagtcctatatgcctcatggtgccagcacacctgattatggtgagccatacttgtttgaccagtccgagcaatacttcgatgaggagcctccaaggttttatagtccattgagcagtgctcctcggaggttgagggacctgagctattcgcactttgatctcccatcacactccagcagcagccagtttgatgatctgatgatgagtcagtggccatacagccgcactgacatctccatgcctagttttgggtcagacacaagtggctacccctatcaggtgtgggatctcgcgaatggatcaagcaggtacccatcgtatcgccctgccaatgggcattgagagttttaatgattgcattgacaataatgtgtggttaagtccatgatgttcgcttctgagctgagtgtaattgtaatagttccccatagcagtgatataaagaattgttcctcagtttccttgttcaatcaatagttatatgacccccctcctccctcttttctctagttcagttttgcccagtggtaataaatctaagtcggctaaaatgatctggctaatcgtgttgtgaaatgtgtatgatgcaagcaaatggtagggtgtttttaagccatgccagtgcttcagctgatactacattaaactgggagtattctttgtttctccctctgacgagtgacgacgtgttattgatcgtctcatgttctctttgtatatttcagagtaaattctggatatagcccatggacataaactaattatttgatgcacactctggacctttggggtatgttttattccattgatggatatataag

SEQ ID NO: 30283 - DNA, 4108 bp, Zea Mays
gcatcctcccccgacttccatttcgccaccccctacccgactccactgggcgctcgcgctcgcgcacgcgcacgcgcacgccgcagcccccctccgcagccgacgacgacgagcggaagggaagagggtcaactctcgatctccgcacggtccgtggggacgcacgcacggcgcgcgtggcggtctacccggtcgggggtcggatcctagctgaatcggggagatttgccggccagctgcaggaaggaaaacgacaagtgaaacgaagctgtacgtgttcaggtgatcggataatggctagtgatcggataatggttgacactttgaccgaggacaatggtggtgatgctagatcctcatcatctgaagagatgccaagtgaccaacagagtcatcctggggattctttagctgagtggaggtcaagtgagcaagttgagaatggaacaccatccacttcaccagcatactcagacaatgatgatgatgactgtggacctaggccttctgatctttatgggaagtttacatggagaattgataatttctcccaaatcaacaagagagagctaagaagtaattcctttgatgttggtggatttaagtggtatatcttaatttacccacaaggatgtgatgtatgcaatcacctctcactctttctttgtgttgccaaccatgataagctactcccaggatggagtcactttgcgcaatttacaatagctgtaattaatagagaccctaagaaatctaagtattctgatacactgcatcggttttggaagaaagagcatgattgggggtggaaaaagtttatggaactgtcaaaattacatgatggctttattgttgaggatgttcttaccatcaaagcccaagttcaagttatcagggagaagacagaccgtccatttcgttgccttgatggccattaccgaagggaactaattagggtgtatctatcaaatgttgaacaagtttgccggcgctttattgatgaaagaagaagcaagcttagcaggttgattgaggataaactggggtggtccagtttcagtggattctggctagcaatggatccaagtgtgcgtcgacacatgacaagggaaaagactgaaactatattgaaagttatagtgaaacaattctttatagagaaagaagttacatcaaccttggtaattgactctctatatagtggacttaaggcacttgaataccagagcaagaacaaaaaggcgatacctaaactaacagagacagatgctcggagcactccaatggtacttattgatcaggacatgtttgttttggctgatgatgtaatatttctgcttgaaagagctgcattggacacactgccacaccaacatttgcccacaaaagatgataaaagttcgcaaaaccgcacaaaggatggcaactcaggtcaggagttcagcaaagattctattgagcgtgatgatagacgacttatagagctaggctggaagacattggagcttttttccttagctcatatattcagccgaatacaagtggcacatcaagaggctgtggctttgaagcgccaagaggaacttattcgtgaagaagaagaagctgggctagctgaaattgaactcaaggcaaagcgtagtgccgctgaaaaggaaaaacgtgccaagaaaaaacaggcaaaacagaagaaaaatagtcgaaaaggtaataaggggaaaagtggcaagtccaacatcaataaggaaataattatggaccacagtcattcagatgatagaatattggatgatttttgtggacaaattgaagagatgcccttaaatgctgacaaccctgaagaagtttctgatatatctgacagtagagacgataattcagacatgcttcatgttgatattgaagaccgtgaatctagccctgttaattgggagatagatgcttcagaaactcaaactactattcctggaagtagtgaggtgcaaaatgaccatgcaggaaagaggacctctactgtggatgatagctcatcgtcttgttcatctgactcagtgccttcagttactgtgaatggatcatataaaggaggtgcctggacaagcgtcagatcctcatccaataggggaaacaacaggaggaataaggatactgaagcacgggcaggatttgcacaaggtggatcatgttcatcgcataatggttttataggctctggcagcaatgcctctggccactcaaaggaaagacacgaacctgaggatgataaagttgtcttgcagaggaagcaacatgcacaatggaacattgatatcattagctcctccaagtcaagaatggcagagtcttcattttcttctgtgagctctattaagaagcaacctcaaccaaattttttgctagaaagcaccaatagtttgaatcaccgtggaagcgaagcttctggcactgtgacttccactacaacagcgggtgcctcttcaaccccggccactcagttagttttgaataaaggacctgtatccagtgctgcaacccagaatgagaagccactacctctgcaggtgcttgtaccatccaaatctgaagtgcagaagcaggcttccctaactggcagtgcaactaccgaggccgtttcagtatcaaggcccttgactgccccacaagtccctgcagcaaaacaaagtgcaccagtcacttcaacagctcagaatgcaccttttctttctcgttcaatgagtgctgttgggcggttggggaatgaaccatctgccaatgctcctagtttcgttccccgttcacgaacatatcgcaatgccatgatggagaaaagttctggtggtggaagctgtttcacacatcagcaaggttcatcggagcaagcagttgcaccatggcaatcgatgtttacatcgcaacctttcattcggccatcagagaccttgtcttggaaagaggaaacattattgagatctgggtttacatttggaactgtgaagcccgagtcactgaacccatatcagggcagagaagagaactcacagcaagcgagcagcaacagcagtgattgtgcgccatcgagttcaaacatcagaagcgagatcgagaagctgaatttgagcggaagaccacgaagcaagcaactgttgtcagaaatttcgaccagatttactccctatcagccacaaggcttggtcgctgatgagttcccacacctagacatcatcaacgacttgctggatgaggagcagagtgacagaagaagggttcttcaacctgattttgttcaacagtcctatatgcctcatggtgccagcacacctgattatggtgagccatacttgtttgaccagtccgagcaatacttcgatgaggagcctccaaggttttatagtccattgagcagtgctcctcggaggttgagggacctgagctattcgcactttgatctcccatcacactccagcagcagccagtttgatgatctgatgatgagtcagtggccatacagccgcactgacatctccatgcctagttttgggtcagacacaagtggctacccctatcaggtgtgggatctcgcgaatggatcaagcaggtacccatcgtatcgccctgccaatgggcattgagagttttaatgattgcattgacaataatgtgtggttaagtccatgatgttcgcttctgagctgagtgtaattgtaatagttccccatagcagtgatataaagaattgttcctcagtttccttgttcaatcaatagttatatgacccccctcctccctcttttctctagttcagttttgcccagtggtaataaatctaagtcggctaaaatgatctggctaatcgtgttgtgaaatgtgtatgatgcaagcaaatggtagggtgtttttaagccatgccagtgcttcagctgatactacattaaactgggagtattctttgtttctccctctgacgagtgacgacgtgttattgatcgtctcatgttctctttgtatatttcagagtaaattctggatatagcccatggacataaactaattatttgatgcacactctggacctttggggtatgttttattccattgatggatatataag

SEQ ID NO: 30284 - DNA, 4106 bp, Zea Mays
cctcccccgacttccatttcgccaccccctacccgactccactgggcgctcgcgctcgcgcacgcgcacgcgcacgccgcagcccccctccgcagccgacgacgacgagcggaagggaagagggtcaactctcgatctccgcacggtccgtggggacgcacgcacggcgcgcgtggcggtctacccggtcgggggtcggatcctagctgaatcggggagatttgccggccaggaaggaaaacgacaagtgaaacgaagctgtacgtgttcaggtgatcggataatggctagtgatcggataatggttgacactttgaccgaggacaatggtggtgatgctagatcctcatcatctgaagagatgccaagtgaccaacagagtcatcctggggattctttagctgagtggaggtcaagtgagcaagttgagaatggaacaccatccacttcaccagcatactcagacaatgatgatgatgactgtggacctaggccttctgatctttatgggaagtttacatggagaattgataatttctcccaaatcaacaagagagagctaagaagtaattcctttgatgttggtggatttaagtggtatatcttaatttacccacaaggatgtgatgtatgcaatcacctctcactctttctttgtgttgccaaccatgataagctactcccaggatggagtcactttgcgcaatttacaatagctgtaattaatagagaccctaagaaatctaagtattctgcatttcagatacactgcatcggttttggaagaaagagcatgattgggggtggaaaaagtttatggaactgtcaaaattacatgatggctttattgttgaggatgttcttaccatcaaagcccaagttcaagttatcagggagaagacagaccgtccatttcgttgccttgatggccattaccgaagggaactaattagggtgtatctatcaaatgttgaacaagtttgccggcgctttattgatgaaagaagaagcaagcttagcaggttgattgaggataaactggggtggtccagtttcagtggattctggctagcaatggatccaagtgtgcgtcgacacatgacaagggaaaagactgaaactatattgaaagttatagtgaaacaattctttatagagaaagaagttacatcaaccttggtaattgactctctatatagtggacttaaggcacttgaataccagagcaagaacaaaaaggcgatacctaaactaacagagacagatgctcggagcactccaatggtacttattgatcaggacatgtttgttttggctgatgatgtaatatttctgcttgaaagagctgcattggacacactgccacaccaacatttgcccacaaaagatgataaaagttcgcaaaaccgcacaaaggatggcaactcaggtcaggagttcagcaaagattctattgagcgtgatgatagacgacttatagagctaggctggaagacattggagcttttttccttagctcatatattcagccgaatacaagtggcacatcaagaggctgtggctttgaagcgccaagaggaacttattcgtgaagaagaagaagctgggctagctgaaattgaactcaaggcaaagcgtagtgccgctgaaaaggaaaaacgtgccaagaaaaaacaggcaaaacagaagaaaaatagtcgaaaaggtaataaggggaaaagtggcaagtccaacatcaataaggaaataattatggaccacagtcattcagatgatagaatattggatgatttttgtggacaaattgaagagatgcccttaaatgctgacaaccctgaagaagtttctgatatatctgacagtagagacgataattcagacatgcttcatgttgatattgaagaccgtgaatctagccctgttaattgggagatagatgcttcagaaactcaaactactattcctggaagtagtgaggtgcaaaatgaccatgcaggaaagaggacctctactgtggatgatagctcatcgtcttgttcatctgactcagtgccttcagttactgtgaatggatcatataaaggaggtgcctggacaagcgtcagatcctcatccaataggggaaacaacaggaggaataaggatactgaagcacgggcaggatttgcacaaggtggatcatgttcatcgcataatggttttataggctctggcagcaatgcctctggccactcaaaggaaagacacgaacctgaggatgataaagttgtcttgcagaggaagcaacatgcacaatggaacattgatatcattagctcctccaagtcaagaatggcagagtcttcattttcttctgtgagctctattaagaagcaacctcaaccaaattttttgctagaaagcaccaatagtttgaatcaccgtggaagcgaagcttctggcactgtgacttccactacaacagcgggtgcctcttcaaccccggccactcagttagttttgaataaaggacctgtatccagtgctgcaacccagaatgagaagccactacctctgcaggtgcttgtaccatccaaatctgaagtgcagaagcaggcttccctaactggcagtgcaactaccgaggccgtttcagtatcaaggcccttgactgccccacaagtccctgcagcaaaacaaagtgcaccagtcacttcaacagctcagaatgcaccttttctttctcgttcaatgagtgctgttgggcggttggggaatgaaccatctgccaatgctcctagtttcgttccccgttcacgaacatatcgcaatgccatgatggagaaaagttctggtggtggaagctgtttcacacatcagcaaggttcatcggagcaagcagttgcaccatggcaatcgatgtttacatcgcaacctttcattcggccatcagagaccttgtcttggaaagaggaaacattattgagatctgggtttacatttggaactgtgaagcccgagtcactgaacccatatcagggcagagaagagaactcacagcaagcgagcagcaacagcagtgattgtgcgccatcgagttcaaacatcagaagcgagatcgagaagctgaatttgagcggaagaccacgaagcaagcaactgttgtcagaaatttcgaccagatttactccctatcagccacaaggcttggtcgctgatgagttcccacacctagacatcatcaacgacttgctggatgaggagcagagtgacagaagaagggttcttcaacctgattttgttcaacagtcctatatgcctcatggtgccagcacacctgattatggtgagccatacttgtttgaccagtccgagcaatacttcgatgaggagcctccaaggttttatagtccattgagcagtgctcctcggaggttgagggacctgagctattcgcactttgatctcccatcacactccagcagcagccagtttgatgatctgatgatgagtcagtggccatacagccgcactgacatctccatgcctagttttgggtcagacacaagtggctacccctatcaggtgtgggatctcgcgaatggatcaagcaggtacccatcgtatcgccctgccaatgggcattgagagttttaatgattgcattgacaataatgtgtggttaagtccatgatgttcgcttctgagctgagtgtaattgtaatagttccccatagcagtgatataaagaattgttcctcagtttccttgttcaatcaatagttatatgacccccctcctccctcttttctctagttcagttttgcccagtggtaataaatctaagtcggctaaaatgatctggctaatcgtgttgtgaaatgtgtatgatgcaagcaaatggtagggtgtttttaagccatgccagtgcttcagctgatactacattaaactgggagtattctttgtttctccctctgacgagtgacgacgtgttattgatcgtctcatgttctctttgtatatttcagagtaaattctggatatagcccatggacataaactaattatttgatgcacactctggacctttggggtatgttttattccattgatggatatataag

SEQ ID NO: 30285 - DNA, 4177 bp, Zea Mays
ccgacttccatttcgccaccccctacccgactccactgggcgctcgcgctcgcgcacgcgcacgcgcacgccgcagcccccctccgcagccgacgacgacgagcggaagggaagagggtcaactctcgatctccgcacggtccgtggggacgcacgcacggcgcgcgtggcggtctacccggtcgggggtcggatcctagctgaatcggggagatttgccggccaggaaggaaaacgacaagtgaaacgaagctgtacgtgttcaggtgatcggataatggctagtgatcggataatggttgacactttgaccgaggacaatggtggtgatgctagatcctcatcatctgaagagatgccaagtgaccaacagagtcatcctggggattctttagctgagtggaggtcaagtgagcaagttgagaatggaacaccatccacttcaccagcatactcagacaatgatgatgatgactgtggacctaggccttctgatctttatgggaagtttacatggagaattgataatttctcccaaatcaacaagagagagctaagaagtaattcctttgatgttggtggatttaagtggtatatcttaatttacccacaaggatgtgatgtatgcaatcacctctcactctttctttgtgttgccaaccatgataagctactcccaggatggagtcactttgcgcaatttacaatagctgtaattaatagagaccctaagaaatctaagtattctgatacactgcatcggttttggaagaaagagcatgattgggggtggaaaaagtttatggaactgtcaaaattacatgatggctttattgttgaggatgttcttaccatcaaagcccaagttcaagttatcagggagaagacagaccgtccatttcgttgccttgatggccattaccgaagggaactaattagggtgtatctatcaaatgttgaacaagtttgccggcgctttattgatgaaagaagaagcaagcttagcaggttgattgaggataaactggggtggtccagtttcagtggattctggctagcaatggatccaagtgtgcgtcgacacatgacaagggaaaagactgaaactatattgaaagttatagtgaaacaattctttatagagaaagaagttacatcaaccttggtaattgactctctatatagtggacttaaggcacttgaataccagagcaagaacaaaaaggcgatacctaaactaacagagacagatgctcggagcactccaatggtacttattgatcaggacatgtttgttttggctgatgatgtaatatttctgcttgaaagagctgcattggacacactgccacaccaacatttgcccacaaaagatgataaaagttcgcaaaaccgcacaaagtattgctctgaaatggggccatgacttgggaaatcgtctatgatttgtatcttaacgagttatgaactgaaaaagaagagtacacgatggcaactcaggtcaggagttcagcaaagattctattgagcgtgatgatagacgacttatagagctaggctggaagacattggagcttttttccttagctcatatattcagccgaatacaagtggcacatcaagaggctgtggctttgaagcgccaagaggaacttattcgtgaagaagaagaagctgggctagctgaaattgaactcaaggcaaagcgtagtgccgctgaaaaggaaaaacgtgccaagaaaaaacaggcaaaacagaagaaaaatagtcgaaaaggtaataaggggaaaagtggcaagtccaacatcaataaggaaataattatggaccacagtcattcagatgatagaatattggatgatttttgtggacaaattgaagagatgcccttaaatgctgacaaccctgaagaagtttctgatatatctgacagtagagacgataattcagacatgcttcatgttgatattgaagaccgtgaatctagccctgttaattgggagatagatgcttcagaaactcaaactactattcctggaagtagtgaggtgcaaaatgaccatgcaggaaagaggacctctactgtggatgatagctcatcgtcttgttcatctgactcagtgccttcagttactgtgaatggatcatataaaggaggtgcctggacaagcgtcagatcctcatccaataggggaaacaacaggaggaataaggatactgaagcacgggcaggatttgcacaaggtggatcatgttcatcgcataatggttttataggctctggcagcaatgcctctggccactcaaaggaaagacacgaacctgaggatgataaagttgtcttgcagaggaagcaacatgcacaatggaacattgatatcattagctcctccaagtcaagaatggcagagtcttcattttcttctgtgagctctattaagaagcaacctcaaccaaattttttgctagaaagcaccaatagtttgaatcaccgtggaagcgaagcttctggcactgtgacttccactacaacagcgggtgcctcttcaaccccggccactcagttagttttgaataaaggacctgtatccagtgctgcaacccagaatgagaagccactacctctgcaggtgcttgtaccatccaaatctgaagtgcagaagcaggcttccctaactggcagtgcaactaccgaggccgtttcagtatcaaggcccttgactgccccacaagtccctgcagcaaaacaaagtgcaccagtcacttcaacagctcagaatgcaccttttctttctcgttcaatgagtgctgttgggcggttggggaatgaaccatctgccaatgctcctagtttcgttccccgttcacgaacatatcgcaatgccatgatggagaaaagttctggtggtggaagctgtttcacacatcagcaaggttcatcggagcaagcagttgcaccatggcaatcgatgtttacatcgcaacctttcattcggccatcagagaccttgtcttggaaagaggaaacattattgagatctgggtttacatttggaactgtgaagcccgagtcactgaacccatatcagggcagagaagagaactcacagcaagcgagcagcaacagcagtgattgtgcgccatcgagttcaaacatcagaagcgagatcgagaagctgaatttgagcggaagaccacgaagcaagcaactgttgtcagaaatttcgaccagatttactccctatcagccacaaggcttggtcgctgatgagttcccacacctagacatcatcaacgacttgctggatgaggagcagagtgacagaagaagggttcttcaacctgattttgttcaacagtcctatatgcctcatggtgccagcacacctgattatggtgagccatacttgtttgaccagtccgagcaatacttcgatgaggagcctccaaggttttatagtccattgagcagtgctcctcggaggttgagggacctgagctattcgcactttgatctcccatcacactccagcagcagccagtttgatgatctgatgatgagtcagtggccatacagccgcactgacatctccatgcctagttttgggtcagacacaagtggctacccctatcaggtgtgggatctcgcgaatggatcaagcaggtacccatcgtatcgccctgccaatgggcattgagagttttaatgattgcattgacaataatgtgtggttaagtccatgatgttcgcttctgagctgagtgtaattgtaatagttccccatagcagtgatataaagaattgttcctcagtttccttgttcaatcaatagttatatgacccccctcctccctcttttctctagttcagttttgcccagtggtaataaatctaagtcggctaaaatgatctggctaatcgtgttgtgaaatgtgtatgatgcaagcaaatggtagggtgtttttaagccatgccagtgcttcagctgatactacattaaactgggagtattctttgtttctccctctgacgagtgacgacgtgttattgatcgtctcatgttctctttgtatatttcagagtaaattctggatatagcccatggacataaactaattatttgatgcacactctggacctttggggtatgttttattccattgatggatatataag

SEQ ID NO: 30286 - DNA, 4633 bp, Zea Mays
ccaccccctacccgactccactgggcgctcgcgctcgcgcacgcgcacgcgcacgccgcagcccccctccgcagccgacgacgacgagcggaagggaagagggtcaactctcgatctccgcacggtccgtggggacgcacgcacggcgcgcgtggcggtctacccggtcgggggtcggatcctagctgaatcggggagatttgccggccaggaaggaaaacgacaagtgaaacgaagctgtacgtgttcaggtgatcggataatggctagtgatcggataatggttgacactttgaccgaggacaatggtggtgatgctagatcctcatcatctgaagagatgccaagtgaccaacagagtcatcctggggattctttagctgagtggaggtcaagtgagcaagttgagaatggaacaccatccacttcaccagcatactcagacaatgatgatgatgactgtggacctaggccttctgatctttatgggaagtttacatggagaattgataatttctcccaaatcaacaagagagagctaagaagtaattcctttgatgttggtggatttaagtggtatatcttaatttacccacaaggatgtgatgtatgcaatcacctctcactctttctttgtgttgccaaccatgataagctactcccaggatggagtcactttgcgcaatttacaatagctgtaattaatagagaccctaagaaatctaagtattctgatacactgcatcggttttggaagaaagagcatgattgggggtggaaaaagtttatggaactgtcaaaattacatgatggctttattgttgaggatgttcttaccatcaaagcccaagttcaagttatcagggagaagacagaccgtccatttcgttgccttgatggccattaccgaagggaactaattagggtgtatctatcaaatgttgaacaagtttgccggcgctttattgatgaaagaagaagcaagcttagcaggttgattgaggataaactggggtggtccagtttcagtggattctggctagcaatggatccaagtgtgcgtcgacacatgacaagggaaaagactgaaactatattgaaagttatagtgaaacaattctttatagagaaagaagttacatcaaccttggtaattgactctctatatagtggacttaaggcacttgaataccagagcaagaacaaaaaggcgatacctaaactaacagagacagatgctcggagcactccaatggtacttattgatcaggacatgtttgttttggctgatgatgtaatatttctgcttgaaagagctgcattggacacactgccacaccaacatttgcccacaaaagatgataaaagttcgcaaaaccgcacaaaggtaggcacgtttccttgaccccttacacattggtttataaggtattaaggttaatggccatcctaggtgtttccaacttgtaagcggtggactagaacagctatttactgatgtacccttttacatgttcaatatcaaaattgaaagcatttttatcacggtgtgcattttatgttgtgcagactgcaaaggcccacagtttttcagatgttgttcaaattaaattgaaatttactttcaaaaaaatgaacttaacattcccacacctttcagccctggcatgtatctgcgtttactgatcgagttactgctgctgttgttgtgtgtgttttcctgctttctttttgtattggtgttttcttctgcctattcaaggaaaaaaacactactatgcagtattgctctgaaatggggccatgacttgggaaatcgtctatgatttgtatcttaacgagttatgaactgaaaaagaagagtacacgtaatctccatttccttatccaatttatctctccatgaattttatcctactgacatggagccctaacagatgctcttgttataggatggcaactcaggtcaggagttcagcaaagattctattgagcgtgatgatagacgacttatagagctaggctggaagacattggagcttttttccttagctcatatattcagccgaatacaagtggcacatcaagaggctgtggctttgaagcgccaagaggaacttattcgtgaagaagaagaagctgggctagctgaaattgaactcaaggcaaagcgtagtgccgctgaaaaggaaaaacgtgccaagaaaaaacagaagaaaaatagtcgaaaaggtaataaggggaaaagtggcaagtccaacatcaataaggaaataattatggaccacagtcattcagatgatagaatattggatgatttttgtggacaaattgaagagatgcccttaaatgctgacaaccctgaagaagtttctgatatatctgacagtagagacgataattcagacatgcttcatgttgatattgaagaccgtgaatctagccctgttaattgggagatagatgcttcagaaactcaaactactattcctggaagtagtgaggtgcaaaatgaccatgcaggaaagaggacctctactgtggatgatagctcatcgtcttgttcatctgactcagtgccttcagttactgtgaatggatcatataaaggaggtgcctggacaagcgtcagatcctcatccaataggggaaacaacaggaggaataaggatactgaagcacgggcaggatttgcacaaggtggatcatgttcatcgcataatggttttataggctctggcagcaatgcctctggccactcaaaggaaagacacgaacctgaggatgataaagttgtcttgcagaggaagcaacatgcacaatggaacattgatatcattagctcctccaagtcaagaatggcagagtcttcattttcttctgtgagctctattaagaagcaacctcaaccaaattttttgctagaaagcaccaatagtttgaatcaccgtggaagcgaagcttctggcactgtgacttccactacaacagcgggtgcctcttcaaccccggccactcagttagttttgaataaaggacctgtatccagtgctgcaacccagaatgagaagccactacctctgcaggtgcttgtaccatccaaatctgaagtgcagaagcaggcttccctaactggcagtgcaactaccgaggccgtttcagtatcaaggcccttgactgccccacaagtccctgcagcaaaacaaagtgcaccagtcacttcaacagctcagaatgcaccttttctttctcgttcaatgagtgctgttgggcggttggggaatgaaccatctgccaatgctcctagtttcgttccccgttcacgaacatatcgcaatgccatgatggagaaaagttctggtggtggaagctgtttcacacatcagcaaggttcatcggagcaagcagttgcaccatggcaatcgatgtttacatcgcaacctttcattcggccatcagagaccttgtcttggaaagaggaaacattattgagatctgggtttacatttggaactgtgaagcccgagtcactgaacccatatcagggcagagaagagaactcacagcaagcgagcagcaacagcagtgattgtgcgccatcgagttcaaacatcagaagcgagatcgagaagctgaatttgagcggaagaccacgaagcaagcaactgttgtcagaaatttcgaccagatttactccctatcagccacaaggcttggtcgctgatgagttcccacacctagacatcatcaacgacttgctggatgaggagcagagtgacagaagaagggttcttcaacctgattttgttcaacagtcctatatgcctcatggtgccagcacacctgattatggtgagccatacttgtttgaccagtccgagcaatacttcgatgaggagcctccaaggttttatagtccattgagcagtgctcctcggaggttgagggacctgagctattcgcactttgatctcccatcacactccagcagcagccagtttgatgatctgatgatgagtcagtggccatacagccgcactgacatctccatgcctagttttgggtcagacacaagtggctacccctatcaggtgtgggatctcgcgaatggatcaagcaggtacccatcgtatcgccctgccaatgggcattgagagttttaatgattgcattgacaataatgtgtggttaagtccatgatgttcgcttctgagctgagtgtaattgtaatagttccccatagcagtgatataaagaattgttcctcagtttccttgttcaatcaatagttatatgacccccctcctccctcttttctctagttcagttttgcccagtggtaataaatctaagtcggctaaaatgatctggctaatcgtgttgtgaaatgtgtatgatgcaagcaaatggtagggtgtttttaagccatgccagtgcttcagctgatactacattaaactgggagtattctttgtttctccctctgacgagtgacgacgtgttattgatcgtctcatgttctctttgtatatttcagagtaaattctggatatagcccatggacataaactaattatttgatgcacactctggacctttggggtatgttttattccattgatggatatataag

SEQ ID NO: 30287 - DNA, 3485 bp, Zea Mays
ctccactgggcgctcgcgctcgcgcacgcgcacgcgcacgccgcagcccccctccgcagccgacgacgacgagcggaagggaagagggtcaactctcgatctccgcacggtccgtggggacgcacgcacggcgcgcgtggcggtctacccggtcgggggtcggatcctagctgaatcggggagatttgccggccaggtgatcggataatggctagtgatcggataatggttgacactttgaccgaggacaatggtggtgatgctagatcctcatcatctgaagagatgccaagtgaccaacagagtcatcctggggattctttagctgagtggaggtcaagtgagcaagttgagaatggaacaccatccacttcaccagcatactcagacaatgatgatgatgactgtggacctaggccttctgatctttatgggaagtttacatggagaattgataatttctcccaaatcaacaagagagagctaagaagtaattcctttgatgttggtggatttaagtggtatatcttaatttacccacaaggatgtgatgtatgcaatcacctctcactctttctttgtgttgccaaccatgataagctactcccaggatggagtcactttgcgcaatttacaatagctgtaattaatagagaccctaagaaatctaagtattctgatacactgcatcggttttggaagaaagagcatgattgggggtggaaaaagtttatggaactgtcaaaattacatgatggctttattgttgaggatgttcttaccatcaaagcccaagttcaagttatcagacagaccgtccatttcgttgccttgatggccattaccgaagggaactaattagggtgtatctatcaaatgttgaacaagtttgccggcgctttattgatgaaagaagaagcaagcttagcaggttgattgaggataaactggggtggtccagtttcagtggattctggctagcaatggatccaagtgtgcgtcgacacatgacaagggaaaagactgaaactatattgaaagttatagtgaaacaattctttatagagaaagaagttacatcaaccttggtaattgactctctatatagtggacttaaggcacttgaataccagagcaagaacaaaaaggcgatacctaaactaacagagacagatgctcggagcactccaatggtacttattgatcaggacatgtttgttttggctgatgatgtaatatttctgcttgaaagagctgcattggacacactgccacaccaacatttgcccacaaaagatgataaaagttcgcaaaaccgcacaaagccgaatacaagtggcacatcaagaggctgtggctttgaagcgccaagaggaacttattcgtgaagaagaagaagctgggctagctgaaattgaactcaaggcaaagcgtagtgccgctgaaaaggaaaaacgtgccaagaaaaaacaggcaaaacagaagaaaaatagtcgaaaaggtaataaggggaaaagtggcaagtccaacatcaataaggaaataattatggaccacagtcattcagatgatagaatattggatgatttttgtggacaaattgaagagatgcccttaaatgctgacaaccctgaagaagtttctgatatatctgacagtagagacgataattcagacatgcttcatgttgatattgaagaccgtgaatctagccctgttaattgggagatagatgcttcagaaactcaaactactattcctggaagtagtgaggtgcaaaatgaccatgcaggaaagaggacctctactgtggatgatagctcatcgtcttgttcatctgactcagtgccttcagttactgtgaatggatcatataaaggaggtgcctggacaagcgtcagatcctcatccaataggggaaacaacaggaggaataaggatactgaagcacgggcaggatttgcacaaggtggatcatgttcatcgcataatggttttataggctctggcagcaatgcctctggccactcaaaggaaagacacgaacctgaggatgataaagttgtcttgcagaggaagcaacatgcacaatggaacattgatatcattagctcctccaagtcaagaatggcagagtcttcattttcttctgtgagctctattaagaagcaacctcaaccaaattttttgctagaaagcaccaatagtttgaatcaccgtggaagcgaagcttctggcactgtgacttccactacaacagcgggtgcctcttcaaccccggccactcagttagttttgaataaaggacctgtatccagtgctgcaacccagaatgagaagccactacctctgcaggtgcttgtaccatccaaatctgaagtgcagaagcaggcttccctaactggcagtgcaactaccgaggccgtttcagtatcaaggcccttgactgccccacaagtccctgcagcaaaacaaagtgcaccagtcacttcaacagctcagaatgcaccttttctttctcgttcaatgagtgctgttgggcggttggggaatgaaccatctgccaatgctcctagtttcgttccccgttcacgaacatatcgcaatgccatgatggagaaaagttctggtggtggaagctgtttcacacatcagcaaggttcatcggagcaagcagttgcaccatggcaatcgatgtttacatcgcaacctttcattcggccatcagagaccttgtcttggaaagaggaaacattattgagatctgggtttacatttggaactgtgaagcccgagtcactgaacccatatcagggcagagaagagaactcacagcaagcgagcagcaacagcagtgattgtgcgccatcgagttcaaacatcagaagcgagatcgagaagctgaatttgagcggaagaccacgaagcaagcaactgttgtcagaaatttcgaccagatttactccctatcagccacaaggcttggtcgctgatgagttcccacacctagacatcatcaacgacttgctggatgaggagcagagtgacagaagaagggttcttcaacctgattttgttcaacagtcctatatgcctcatggtgccagcacacctgattatggtgagccatacttgtttgaccagtccgagcaatacttcgatgaggagcctccaaggttttatagtccattgagcagtgctcctcggaggttgagggacctgagctattcgcactttgatctcccatcacactccagcagcagccagtttgatgatctgatgatgagtcagtggccatacagccgcactgacatctccatgcctagttttgggtcagacacaagtggctacccctatcaggtgtgggatctcgcgaatggatcaagcagagtaaattctggatatagcccatggacataaactaattatttgatgcacactctggacctttggggtatgttttattccattgatggatatataag

SEQ ID NO: 30288 - DNA, 3964 bp, Zea Mays
ctcgcgctcgcgcacgcgcacgcgcacgccgcagcccccctccgcagccgacgacgacgagcggaagggaagagggtcaactctcgatctccgcacggtccgtggggacgcacgcacggcgcgcgtggcggtctacccggtcgggggtcggatcctagctgaatcggggagatttgccggccaggaaggaaaacgacaagtgaaacgaagctgtacgtgttcaggtgatcggataatggctagtgatcggataatggttgacactttgaccgaggacaatggtggtgatgctagatcctcatcatctgaagagatgccaagtgaccaacagagtcatcctggggattctttagctgagtggaggtcaagtgagcaagttgagaatggaacaccatccacttcaccagcatactcagacaatgatgatgatgactgtggacctaggccttctgatctttatgggaagtttacatggagaattgataatttctcccaaatcaacaagagagagctaagaagtaattcctttgatgttggtggatttaagtggtatatcttaatttacccacaaggatgtgatgtatgcaatcacctctcactctttctttgtgttgccaaccatgataagctactcccaggatggagtcactttgcgcaatttacaatagctgtaattaatagagaccctaagaaatctaagtattctgatacactgcatcggttttggaagaaagagcatgattgggggtggaaaaagtttatggaactgtcaaaattacatgatggctttattgttgaggatgttcttaccatcaaagcccaagttcaagttatcagtttgccggcgctttattgatgaaagaagaagcaagcttagcaggttgattgaggataaactggggtggtccagtttcagtggattctggctagcaatggatccaagtgtgcgtcgacacatgacaagggaaaagactgaaactatattgaaagttatagtgaaacaattctttatagagaaagaagttacatcaaccttggtaattgactctctatatagtggacttaaggcacttgaataccagagcaagaacaaaaaggcgatacctaaactaacagagacagatgctcggagcactccaatggtacttattgatcaggacatgtttgttttggctgatgatgtaatatttctgcttgaaagagctgcattggacacactgccacaccaacatttgcccacaaaagatgataaaagttcgcaaaaccgcacaaaggatggcaactcaggtcaggagttcagcaaagattctattgagcgtgatgatagacgacttatagagctaggctggaagacattggagcttttttccttagctcatatattcagccgaatacaagtggcacatcaagaggctgtggctttgaagcgccaagaggaacttattcgtgaagaagaagaagctgggctagctgaaattgaactcaaggcaaagcgtagtgccgctgaaaaggaaaaacgtgccaagaaaaaacaggcaaaacagaagaaaaatagtcgaaaaggtaataaggggaaaagtggcaagtccaacatcaataaggaaataattatggaccacagtcattcagatgatagaatattggatgatttttgtggacaaattgaagagatgcccttaaatgctgacaaccctgaagaagtttctgatatatctgacagtagagacgataattcagacatgcttcatgttgatattgaagaccgtgaatctagccctgttaattgggagatagatgcttcagaaactcaaactactattcctggaagtagtgaggtgcaaaatgaccatgcaggaaagaggacctctactgtggatgatagctcatcgtcttgttcatctgactcagtgccttcagttactgtgaatggatcatataaaggaggtgcctggacaagcgtcagatcctcatccaataggggaaacaacaggaggaataaggatactgaagcacgggcaggatttgcacaaggtggatcatgttcatcgcataatggttttataggctctggcagcaatgcctctggccactcaaaggaaagacacgaacctgaggatgataaagttgtcttgcagaggaagcaacatgcacaatggaacattgatatcattagctcctccaagtcaagaatggcagagtcttcattttcttctgtgagctctattaagaagcaacctcaaccaaattttttgctagaaagcaccaatagtttgaatcaccgtggaagcgaagcttctggcactgtgacttccactacaacagcgggtgcctcttcaaccccggccactcagttagttttgaataaaggacctgtatccagtgctgcaacccagaatgagaagccactacctctgcaggtgcttgtaccatccaaatctgaagtgcagaagcaggcttccctaactggcagtgcaactaccgaggccgtttcagtatcaaggcccttgactgccccacaagtccctgcagcaaaacaaagtgcaccagtcacttcaacagctcagaatgcaccttttctttctcgttcaatgagtgctgttgggcggttggggaatgaaccatctgccaatgctcctagtttcgttccccgttcacgaacatatcgcaatgccatgatggagaaaagttctggtggtggaagctgtttcacacatcagcaaggttcatcggagcaagcagttgcaccatggcaatcgatgtttacatcgcaacctttcattcggccatcagagaccttgtcttggaaagaggaaacattattgagatctgggtttacatttggaactgtgaagcccgagtcactgaacccatatcagggcagagaagagaactcacagcaagcgagcagcaacagcagtgattgtgcgccatcgagttcaaacatcagaagcgagatcgagaagctgaatttgagcggaagaccacgaagcaagcaactgttgtcagaaatttcgaccagatttactccctatcagccacaaggcttggtcgctgatgagttcccacacctagacatcatcaacgacttgctggatgaggagcagagtgacagaagaagggttcttcaacctgattttgttcaacagtcctatatgcctcatggtgccagcacacctgattatggtgagccatacttgtttgaccagtccgagcaatacttcgatgaggagcctccaaggttttatagtccattgagcagtgctcctcggaggttgagggacctgagctattcgcactttgatctcccatcacactccagcagcagccagtttgatgatctgatgatgagtcagtggccatacagccgcactgacatctccatgcctagttttgggtcagacacaagtggctacccctatcaggtgtgggatctcgcgaatggatcaagcaggtacccatcgtatcgccctgccaatgggcattgagagttttaatgattgcattgacaataatgtgtggttaagtccatgatgttcgcttctgagctgagtgtaattgtaatagttccccatagcagtgatataaagaattgttcctcagtttccttgttcaatcaatagttatatgacccccctcctccctcttttctctagttcagttttgcccagtggtaataaatctaagtcggctaaaatgatctggctaatcgtgttgtgaaatgtgtatgatgcaagcaaatggtagggtgtttttaagccatgccagtgcttcagctgatactacattaaactgggagtattctttgtttctccctctgacgagtgacgacgtgttattgatcgtctcatgttctctttgtatatttcagagtaaattctggatatagcccatggacataaactaattatttgatgcacactctggacctttggggtatgttttattccattgatggatatataag

SEQ ID NO: 30289 - DNA, 4010 bp, Zea Mays
gcccccctccgcagccgacgacgacgagcggaagggaagagggtcaactctcgatctccgcacggtccgtggggacgcacgcacggcgcgcgtggcggtctacccggtcgggggtcggatcctagctgaatcggggagatttgccggccaggaaggaaaacgacaagtgaaacgaagctgtacgtgttcaggtgatcggataatggctagtgatcggataatggttgacactttgaccgaggacaatggtggtgatgctagatcctcatcatctgaagagatgccaagtgaccaacagagtcatcctggggattctttagctgagtggaggtcaagtgagcaagttgagaatggaacaccatccacttcaccagcatactcagacaatgatgatgatgactgtggacctaggccttctgatctttatgggaagtttacatggagaattgataatttctcccaaatcaacaagagagagctaagaagtaattcctttgatgttggtggatttaagtggtatatcttaatttacccacaaggatgtgatgtatgcaatcacctctcactctttctttgtgttgccaaccatgataagctactcccaggatggagtcactttgcgcaatttacaatagctgtaattaatagagaccctaagaaatctaagtattctgatacactgcatcggttttggaagaaagagcatgattgggggtggaaaaagtttatggaactgtcaaaattacatgatggctttattgttgaggatgttcttaccatcaaagcccaagttcaagttatcagacagaccgtccatttcgttgccttgatggccattaccgaagggaactaattagggtgtatctatcaaatgttgaacaagtttgccggcgctttattgatgaaagaagaagcaagcttagcaggttgattgaggataaactggggtggtccagtttcagtggattctggctagcaatggatccaagtgtgcgtcgacacatgacaagggaaaagactgaaactatattgaaagttatagtgaaacaattctttatagagaaagaagttacatcaaccttggtaattgactctctatatagtggacttaaggcacttgaataccagagcaagaacaaaaaggcgatacctaaactaacagagacagatgctcggagcactccaatggtacttattgatcaggacatgtttgttttggctgatgatgtaatatttctgcttgaaagagctgcattggacacactgccacaccaacatttgcccacaaaagatgataaaagttcgcaaaaccgcacaaaggatggcaactcaggtcaggagttcagcaaagattctattgagcgtgatgatagacgacttatagagctaggctggaagacattggagcttttttccttagctcatatattcagccgaatacaagtggcacatcaagaggctgtggctttgaagcgccaagaggaacttattcgtgaagaagaagaagctgggctagctgaaattgaactcaaggcaaagcgtagtgccgctgaaaaggaaaaacgtgccaagaaaaaacaggcaaaacagaagaaaaatagtcgaaaaggtaataaggggaaaagtggcaagtccaacatcaataaggaaataattatggaccacagtcattcagatgatagaatattggatgatttttgtggacaaattgaagagatgcccttaaatgctgacaaccctgaagaagtttctgatatatctgacagtagagacgataattcagacatgcttcatgttgatattgaagaccgtgaatctagccctgttaattgggagatagatgcttcagaaactcaaactactattcctggaagtagtgaggtgcaaaatgaccatgcaggaaagaggacctctactgtggatgatagctcatcgtcttgttcatctgactcagtgccttcagttactgtgaatggatcatataaaggaggtgcctggacaagcgtcagatcctcatccaataggggaaacaacaggaggaataaggatactgaagcacgggcaggatttgcacaaggtggatcatgttcatcgcataatggttttataggctctggcagcaatgcctctggccactcaaaggaaagacacgaacctgaggatgataaagttgtcttgcagaggaagcaacatgcacaatggaacattgatatcattagctcctccaagtcaagaatggcagagtcttcattttcttctgtgagctctattaagaagcaacctcaaccaaattttttgctagaaagcaccaatagtttgaatcaccgtggaagcgaagcttctggcactgtgacttccactacaacagcgggtgcctcttcaaccccggccactcagttagttttgaataaaggacctgtatccagtgctgcaacccagaatgagaagccactacctctgcaggtgcttgtaccatccaaatctgaagtgcagaagcaggcttccctaactggcagtgcaactaccgaggccgtttcagtatcaaggcccttgactgccccacaagtccctgcagcaaaacaaagtgcaccagtcacttcaacagctcagaatgcaccttttctttctcgttcaatgagtgctgttgggcggttggggaatgaaccatctgccaatgctcctagtttcgttccccgttcacgaacatatcgcaatgccatgatggagaaaagttctggtggtggaagctgtttcacacatcagcaaggttcatcggagcaagcagttgcaccatggcaatcgatgtttacatcgcaacctttcattcggccatcagagaccttgtcttggaaagaggaaacattattgagatctgggtttacatttggaactgtgaagcccgagtcactgaacccatatcagggcagagaagagaactcacagcaagcgagcagcaacagcagtgattgtgcgccatcgagttcaaacatcagaagcgagatcgagaagctgaatttgagcggaagaccacgaagcaagcaactgttgtcagaaatttcgaccagatttactccctatcagccacaaggcttggtcgctgatgagttcccacacctagacatcatcaacgacttgctggatgaggagcagagtgacagaagaagggttcttcaacctgattttgttcaacagtcctatatgcctcatggtgccagcacacctgattatggtgagccatacttgtttgaccagtccgagcaatacttcgatgaggagcctccaaggttttatagtccattgagcagtgctcctcggaggttgagggacctgagctattcgcactttgatctcccatcacactccagcagcagccagtttgatgatctgatgatgagtcagtggccatacagccgcactgacatctccatgcctagttttgggtcagacacaagtggctacccctatcaggtgtgggatctcgcgaatggatcaagcaggtacccatcgtatcgccctgccaatgggcattgagagttttaatgattgcattgacaataatgtgtggttaagtccatgatgttcgcttctgagctgagtgtaattgtaatagttccccatagcagtgatataaagaattgttcctcagtttccttgttcaatcaatagttatatgacccccctcctccctcttttctctagttcagttttgcccagtggtaataaatctaagtcggctaaaatgatctggctaatcgtgttgtgaaatgtgtatgatgcaagcaaatggtagggtgtttttaagccatgccagtgcttcagctgatactacattaaactgggagtattctttgtttctccctctgacgagtgacgacgtgttattgatcgtctcatgttctctttgtatatttcagagtaaattctggatatagcccatggacataaactaattatttgatgcacactctggacctttggggtatgttttattccattgatggatatataag

SEQ ID NO: 30290 - DNA, 1528 bp, Zea Mays
cgcagccgacgacgacgagcggaagggaagagggtcaactctcgatctccgcacggtccgtggggacgcacgcacggcgcgcgtggcggtctacccggtcgggggtcggatcctagctgaatcggggagatttgccggccaggtgatcggataatggctagtgatcggataatggttgacactttgaccgaggacaatggtggtgatgctagatcctcatcatctgaagagatgccaagtgaccaacagagtcatcctggggattctttagctgagtggaggtcaagtgagcaagttgagaatggaacaccatccacttcaccagcatactcagacaatgatgatgatgactgtggacctaggccttctgatctttatgggaagtttacatggagaattgataatttctcccaaatcaacaagagagagctaagaagtaattcctttgatgttggtggatttaagtggtatatcttaatttacccacaaggatgtgatgtatgcaatcacctctcactctttctttgtgttgccaaccatgataagctactcccaggatggagtcactttgcgcaatttacaatagctgtaattaatagagaccctaagaaatctaagtattctgatacactgcatcggttttggaagaaagagcatgattgggggtggaaaaagtttatggaactgtcaaaattacatgatggctttattgttgaggatgttcttaccatcaaagcccaagttcaagttatcagggagaagacagaccgtccatttcgttgccttgatggccattaccgaagggaactaattagggtgtatctatcaaatgttgaacaagtttgccggcgctttattgatgaaagaagaagcaagcttagcaggttgattgaggataaactggggtggtccagtttcagtggattctggctagcaatggatccaagtgtgcgtcgacacatgacaagggaaaagactgaaactatattgaaagttatagtgaaacaattctttatagagaaagaagttacatcaaccttggtaattgactctctatatagtggacttaaggcacttgaataccagagcaagaacaaaaaggcgatacctaaactaacagagacagatgctcggagcactccaatggtacttattgatcaggacatgtttgttttggctgatgatgtaatatttctgcttgaaagagctgcattggacacactgccacaccaacatttgcccacaaaagatgataaaagttcgcaaaaccgcacaaagtattgctctgaaatggggccatgacttgggaaatcgtctatgatttgtatcttaacgagttatgaactgaaaaagaagagtacacgatggcaactcaggtcaggagttcagcaaagattctattgagcgtgatgatagacgacttatagagctaggctggaagacattggagcttttttccttagctcatatattcaggcgaacacggcacccatcgctcgtcgacttcgtcctcgccatgcgcaggcga

SEQ ID NO: 30291 - DNA, 3880 bp, Zea Mays
cgcagccgacgacgacgagcggaagggaagagggtcaactctcgatctccgcacggtccgtggggacgcacgcacggcgcgcgtggcggtctacccggtcgggggtcggatcctagctgaatcggggagatttgccggccaggtgatcggataatggctagtgatcggataatggttgacactttgaccgaggacaatggtggtgatgctagatcctcatcatctgaagagatgccaagtgaccaacagagtcatcctggggattctttagctgagtggaggtcaagtgagcaagttgagaatggaacaccatccacttcaccagcatactcagacaatgatgatgatgactgtggacctaggccttctgatctttatgggaagtttacatggagaattgataatttctcccaaatcaacaagagagagctaagaagtaattcctttgatgttggtggatttaagtggtatatcttaatttacccacaaggatgtgatgtatgcaatcacctctcactctttctttgtgttgccaaccatgataagctactcccaggatggagtcactttgcgcaatttacaatagctgtaattaatagagaccctaagaaatctaagtattctgatacactgcatcggttttggaagaaagagcatgattgggggtggaaaaagtttatggaactgtcaaaattacatgatggctttattgttgaggatgttcttaccatcaaagcccaagttcaagttatcagggagaagacagaccgtccatttcgttgccttgatggccattaccgaagggaactaattagggtgtatctatcaaatgttgaacaagtttgccggcgctttattgatgaaagaagaagcaagcttagcaggttgattgaggataaactggggtggtccagtttcagtggattctggctagcaatggatccaagtgtgcgtcgacacatgacaagggaaaagactgaaactatattgaaagttatagtgaaacaattctttatagagaaagaagttacatcaaccttggtaattgactctctatatagtggacttaaggcacttgaataccagagcaagaacaaaaaggcgatacctaaactaacagagacagatgctcggagcactccaatggtacttattgatcaggacatgtttgttttggctgatgatgtaatatttctgcttgaaagagctgcattggacacactgccacaccaacatttgcccacaaaagatgataaaagttcgcaaaaccgcacaaaggatggcaactcaggtcaggagttcagcaaagattctattgagcgtgatgatagacgacttatagagctaggctggaagacattggagcttttttccttagctcatatattcagccgaatacaagtggcacatcaagaggctgtggctttgaagcgccaagaggaacttattcgtgaagaagaagaagctgggctagctgaaattgaactcaaggcaaagcgtagtgccgctgaaaaggaaaaacgtgccaagaaaaaacaggcaaaacagaagaaaaatagtcgaaaaggtaataaggggaaaagtggcaagtccaacatcaataaggaaataattatggaccacagtcattcagatgatagaatattggatgatttttgtggacaaattgaagagatgcccttaaatgctgacaaccctgaagaagtttctgatatatctgacagtagagacgataattcagacatgcttcatgttgatattgaagaccgtgaatctagccctctactgtggatgatagctcatcgtcttgttcatctgactcagtgccttcagttactgtgaatggatcatataaaggaggtgcctggacaagcgtcagatcctcatccaataggggaaacaacaggaggaataaggatactgaagcacgggcaggatttgcacaaggtggatcatgttcatcgcataatggttttataggctctggcagcaatgcctctggccactcaaaggaaagacacgaacctgaggatgataaagttgtcttgcagaggaagcaacatgcacaatggaacattgatatcattagctcctccaagtcaagaatggcagagtcttcattttcttctgtgagctctattaagaagcaacctcaaccaaattttttgctagaaagcaccaatagtttgaatcaccgtggaagcgaagcttctggcactgtgacttccactacaacagcgggtgcctcttcaaccccggccactcagttagttttgaataaaggacctgtatccagtgctgcaacccagaatgagaagccactacctctgcaggtgcttgtaccatccaaatctgaagtgcagaagcaggcttccctaactggcagtgcaactaccgaggccgtttcagtatcaaggcccttgactgccccacaagtccctgcagcaaaacaaagtgcaccagtcacttcaacagctcagaatgcaccttttctttctcgttcaatgagtgctgttgggcggttggggaatgaaccatctgccaatgctcctagtttcgttccccgttcacgaacatatcgcaatgccatgatggagaaaagttctggtggtggaagctgtttcacacatcagcaaggttcatcggagcaagcagttgcaccatggcaatcgatgtttacatcgcaacctttcattcggccatcagagaccttgtcttggaaagaggaaacattattgagatctgggtttacatttggaactgtgaagcccgagtcactgaacccatatcagggcagagaagagaactcacagcaagcgagcagcaacagcagtgattgtgcgccatcgagttcaaacatcagaagcgagatcgagaagctgaatttgagcggaagaccacgaagcaagcaactgttgtcagaaatttcgaccagatttactccctatcagccacaaggcttggtcgctgatgagttcccacacctagacatcatcaacgacttgctggatgaggagcagagtgacagaagaagggttcttcaacctgattttgttcaacagtcctatatgcctcatggtgccagcacacctgattatggtgagccatacttgtttgaccagtccgagcaatacttcgatgaggagcctccaaggttttatagtccattgagcagtgctcctcggaggttgagggacctgagctattcgcactttgatctcccatcacactccagcagcagccagtttgatgatctgatgatgagtcagtggccatacagccgcactgacatctccatgcctagttttgggtcagacacaagtggctacccctatcaggtgtgggatctcgcgaatggatcaagcaggtacccatcgtatcgccctgccaatgggcattgagagttttaatgattgcattgacaataatgtgtggttaagtccatgatgttcgcttctgagctgagtgtaattgtaatagttccccatagcagtgatataaagaattgttcctcagtttccttgttcaatcaatagttatatgacccccctcctccctcttttctctagttcagttttgcccagtggtaataaatctaagtcggctaaaatgatctggctaatcgtgttgtgaaatgtgtatgatgcaagcaaatggtagggtgtttttaagccatgccagtgcttcagctgatactacattaaactgggagtattctttgtttctccctctgacgagtgacgacgtgttattgatcgtctcatgttctctttgtatatttcagagtaaattctggatatagcccatggacataaactaattatttgatgcacactctggacctttggggtatgttttattccattgatggatatataag

SEQ ID NO: 30292 - DNA, 3934 bp, Zea Mays
cgcagccgacgacgacgagcggaagggaagagggtcaactctcgatctccgcacggtccgtggggacgcacgcacggcgcgcgtggcggtctacccggtcgggggtcggatcctagctgaatcggggagatttgccggccaggaaggaaaacgacaagtgaaacgaagctgtacgtgttcagatcctcatcatctgaagagatgccaagtgaccaacagagtcatcctggggattctttagctgagtggaggtcaagtgagcaagttgagaatggaacaccatccacttcaccagcatactcagacaatgatgatgatgactgtggacctaggccttctgatctttatgggaagtttacatggagaattgataatttctcccaaatcaacaagagagagctaagaagtaattcctttgatgttggtggatttaagtggtatatcttaatttacccacaaggatgtgatgtatgcaatcacctctcactctttctttgtgttgccaaccatgataagctactcccaggatggagtcactttgcgcaatttacaatagctgtaattaatagagaccctaagaaatctaagtattctgatacactgcatcggttttggaagaaagagcatgattgggggtggaaaaagtttatggaactgtcaaaattacatgatggctttattgttgaggatgttcttaccatcaaagcccaagttcaagttatcagaagacagaccgtccatttcgttgccttgatggccattaccgaagggaactaattagggtgtatctatcaaatgttgaacaagtttgccggcgctttattgatgaaagaagaagcaagcttagcaggttgattgaggataaactggggtggtccagtttcagtggattctggctagcaatggatccaagtgtgcgtcgacacatgacaagggaaaagactgaaactatattgaaagttatagtgaaacaattctttatagagaaagaagttacatcaaccttggtaattgactctctatatagtggacttaaggcacttgaataccagagcaagaacaaaaaggcgatacctaaactaacagagacagatgctcggagcactccaatggtacttattgatcaggacatgtttgttttggctgatgatgtaatatttctgcttgaaagagctgcattggacacactgccacaccaacatttgcccacaaaagatgataaaagttcgcaaaaccgcacaaaggatggcaactcaggtcaggagttcagcaaagattctattgagcgtgatgatagacgacttatagagctaggctggaagacattggagcttttttccttagctcatatattcagccgaatacaagtggcacatcaagaggctgtggctttgaagcgccaagaggaacttattcgtgaagaagaagaagctgggctagctgaaattgaactcaaggcaaagcgtagtgccgctgaaaaggaaaaacgtgccaagaaaaaacaggcaaaacagaagaaaaatagtcgaaaaggtaataaggggaaaagtggcaagtccaacatcaataaggaaataattatggaccacagtcattcagatgatagaatattggatgatttttgtggacaaattgaagagatgcccttaaatgctgacaaccctgaagaagtttctgatatatctgacagtagagacgataattcagacatgcttcatgttgatattgaagaccgtgaatctagccctgttaattgggagatagatgcttcagaaactcaaactactattcctggaagtagtgaggtgcaaaatgaccatgcaggaaagaggacctctactgtggatgatagctcatcgtcttgttcatctgactcagtgccttcagttactgtgaatggatcatataaaggaggtgcctggacaagcgtcagatcctcatccaataggggaaacaacaggaggaataaggatactgaagcacgggcaggatttgcacaaggtggatcatgttcatcgcataatggttttataggctctggcagcaatgcctctggccactcaaaggaaagacacgaacctgaggatgataaagttgtcttgcagaggaagcaacatgcacaatggaacattgatatcattagctcctccaagtcaagaatggcagagtcttcattttcttctgtgagctctattaagaagcaacctcaaccaaattttttgctagaaagcaccaatagtttgaatcaccgtggaagcgaagcttctggcactgtgacttccactacaacagcgggtgcctcttcaaccccggccactcagttagttttgaataaaggacctgtatccagtgctgcaacccagaatgagaagccactacctctgcaggtgcttgtaccatccaaatctgaagtgcagaagcaggcttccctaactggcagtgcaactaccgaggccgtttcagtatcaaggcccttgactgccccacaagtccctgcagcaaaacaaagtgcaccagtcacttcaacagctcagaatgcaccttttctttctcgttcaatgagtgctgttgggcggttggggaatgaaccatctgccaatgctcctagtttcgttccccgttcacgaacatatcgcaatgccatgatggagaaaagttctggtggtggaagctgtttcacacatcagcaaggttcatcggagcaagcagttgcaccatggcaatcgatgtttacatcgcaacctttcattcggccatcagagaccttgtcttggaaagaggaaacattattgagatctgggtttacatttggaactgtgaagcccgagtcactgaacccatatcagggcagagaagagaactcacagcaagcgagcagcaacagcagtgattgtgcgccatcgagttcaaacatcagaagcgagatcgagaagctgaatttgagcggaagaccacgaagcaagcaactgttgtcagaaatttcgaccagatttactccctatcagccacaaggcttggtcgctgatgagttcccacacctagacatcatcaacgacttgctggatgaggagcagagtgacagaagaagggttcttcaacctgattttgttcaacagtcctatatgcctcatggtgccagcacacctgattatggtgagccatacttgtttgaccagtccgagcaatacttcgatgaggagcctccaaggttttatagtccattgagcagtgctcctcggaggttgagggacctgagctattcgcactttgatctcccatcacactccagcagcagccagtttgatgatctgatgatgagtcagtggccatacagccgcactgacatctccatgcctagttttgggtcagacacaagtggctacccctatcaggtgtgggatctcgcgaatggatcaagcaggtacccatcgtatcgccctgccaatgggcattgagagttttaatgattgcattgacaataatgtgtggttaagtccatgatgttcgcttctgagctgagtgtaattgtaatagttccccatagcagtgatataaagaattgttcctcagtttccttgttcaatcaatagttatatgacccccctcctccctcttttctctagttcagttttgcccagtggtaataaatctaagtcggctaaaatgatctggctaatcgtgttgtgaaatgtgtatgatgcaagcaaatggtagggtgtttttaagccatgccagtgcttcagctgatactacattaaactgggagtattctttgtttctccctctgacgagtgacgacgtgttattgatcgtctcatgttctctttgtatatttcagagtaaattctggatatagcccatggacataaactaattatttgatgcacactctggacctttggggtatgttttattccattgatggatatataag

SEQ ID NO: 30293 - DNA, 4030 bp, Zea Mays
cgcagccgacgacgacgagcggaagggaagagggtcaactctcgatctccgcacggtccgtggggacgcacgcacggcgcgcgtggcggtctacccggtcgggggtcggatcctagctgaatcggggagatttgccggccaggtgatcggataatggctagtgatcggataatggttgacactttgaccgaggacaatggtggtgatgctagatcctcatcatctgaagagatgccaagtgaccaacagagtcatcctggggattctttagctgagtggaggtcaagtgagcaagttgagaatggaacaccatccacttcaccagcatactcagacaatgatgatgatgactgtggacctaggccttctgatctttatgggaagtttacatggagaattgataatttctcccaaatcaacaagagagagctaagaagtaattcctttgatgttggtggatttaagtggtatatcttaatttacccacaaggatgtgatgtatgcaatcacctctcactctttctttgtgttgccaaccatgataagctactcccaggatggagtcactttgcgcaatttacaatagctgtaattaatagagaccctaagaaatctaagtattctgatacactgcatcggttttggaagaaagagcatgattgggggtggaaaaagtttatggaactgtcaaaattacatgatggctttattgttgaggatgttcttaccatcaaagcccaagttcaagttatcagtttgccggcgctttattgatgaaagaagaagcaagcttagcaggttgattgaggataaactggggtggtccagtttcagtggattctggctagcaatggatccaagtgtgcgtcgacacatgacaagggaaaagactgaaactatattgaaagttatagtgaaacaattctttatagagaaagaagttacatcaaccttggtaattgactctctatatagtggacttaaggcacttgaataccagagcaagaacaaaaaggcgatacctaaactaacagagacagatgctcggagcactccaatggtacttattgatcaggacatgtttgttttggctgatgatgtaatatttctgcttgaaagagctgcattggacacactgccacaccaacatttgcccacaaaagatgataaaagttcgcaaaaccgcacaaaggtaggcacgtttccttgaccccttacacattggtttataaggtattaaggttaatggccatcctaggtgtttccaacttgtaagcggtggactagaacagctatttactgatgtacccttttacatgttcaatatcaaaattgaaagcatttttatcacggtgtgcattttatgttgtgcagactgcaaaggcccacagtttttcagatgttgttcaaattaaattgaaatttactttcaaaaaaatgaacttaacattcccacacctttcagccctggcatgtatctgcgtttactgatcgagttactgctgctgttgttgtgtgtgttttcctgctttctttttgtattggtgttttcttctgcctattcaaggaaaaaaacactactatgcagtattgctctgaaatggggccatgacttgggaaatcgtctatgatttgtatcttaacgagttatgaactgaaaaagaagagtacacgtaatctccatttccttatccaatttatctctccatgaattttatcctactgacatggagccctaacagatgctcttgttataggatggcaactcaggtcaggagttcagcaaagattctattgagcgtgatgatagacgacttatagagctaggctggaagacattggagcttttttccttagctcatatattcagccgaatacaagtggcacatcaagaggctgtggctttgaagcgccaagaggaacttattcgtgaagaagaagaagctgggctagctgaaattgaactcaaggcaaagcgtagtgccgctgaaaaggaaaaacgtgccaagaaaaaacaggcaaaacagaagaaaaatagtcgaaaaggtaataaggggaaaagtggcaagtccaacatcaataaggaaataattatggaccacagtcattcagatgatagaatattggatgatttttgtggacaaattgaagagatgcccttaaatgctgacaaccctgaagaagtttctgatatatctgacagtagagacgataattcagacatgcttcatgttgatattgaagaccgtgaatctagccctgttaattgggagatagatgcttcagaaactcaaactactattcctggaagtagtgaggtgcaaaatgaccatgcaggaaagaggacctctactgtggatgatagctcatcgtcttgttcatctgactcagtgccttcagttactgtgaatggatcatataaaggaggtgcctggacaagcgtcagatcctcatccaataggggaaacaacaggaggaataaggatactgaagcacgggcaggatttgcacaaggtggatcatgttcatcgcataatggttttataggctctggcagcaatgcctctggccactcaaaggaaagacacgaacctgaggatgataaagttgtcttgcagaggaagcaacatgcacaatggaacattgatatcattagctcctccaagtcaagaatggcagagtcttcattttcttctgtgagctctattaagaagcaacctcaaccaaattttttgctagaaagcaccaatagtttgaatcaccgtggaagcgaagcttctggcactgtgacttccactacaacagcgggtgcctcttcaaccccggccactcagttagttttgaataaaggacctgtatccagtgctgcaacccagaatgagaagccactacctctgcaggtgcttgtaccatccaaatctgaagtgcagaagcaggcttccctaactggcagtgcaactaccgaggccgtttcagtatcaaggcccttgactgccccacaagtccctgcagcaaaacaaagtgcaccagtcacttcaacagctcagaatgcaccttttctttctcgttcaatgagtgctgttgggcggttggggaatgaaccatctgccaatgctcctagtttcgttccccgttcacgaacatatcgcaatgccatgatggagaaaagttctggtggtggaagctgtttcacacatcagcaaggttcatcggagcaagcagttgcaccatggcaatcgatgtttacatcgcaacctttcattcggccatcagagaccttgtcttggaaagaggaaacattattgagatctgggtttacatttggaactgtgaagcccgagtcactgaacccatatcagggcagagaagagaactcacagcaagcgagcagcaacagcagtgattgtgcgccatcgagttcaaacatcagaagcgagatcgagaagctgaatttgagcggaagaccacgaagcaagcaactgttgtcagaaatttcgaccagatttactccctatcagccacaaggcttggtcgctgatgagttcccacacctagacatcatcaacgacttgctggatgaggagcagagtgacagaagaagggttcttcaacctgattttgttcaacagtcctatatgcctcatggtgccagcacacctgattatggtgagccatacttgtttgaccagtccgagcaatacttcgatgaggagcctccaaggttttatagtccattgagcagtgctcctcggaggttgagggacctgagctattcgcactttgatctcccatcacactccagcagcagccagtttgatgatctgatgatgagtcagtggccatacagccgcactgacatctccatgcctagttttgggtcagacacaagtggctacccctatcaggtgtgggatctcgcgaatggatcaagcagagtaaattctggatatagcccatggacataaactaattatttgatgcacactctggacctttggggtatgttttattccattgatggatatataag

SEQ ID NO: 30294 - DNA, 3643 bp, Zea Mays
catcaggggcacctagctgcctgttgtaaggacctaggccttctgatctttatgggaagtttacatggagaattgataatttctcccaaatcaacaagagagagctaagaagtaattcctttgatgttggtggatttaagtggtatatcttaatttacccacaaggatgtgatgtatgcaatcacctctcactctttctttgtgttgccaaccatgataagctactcccaggatggagtcactttgcgcaatttacaatagctgtaattaatagagaccctaagaaatctaagtattctgatacactgcatcggttttggaagaaagagcatgattgggggtggaaaaagtttatggaactgtcaaaattacatgatggctttattgttgaggatgttcttaccatcaaagcccaagttcaagttatcagggagaagacagaccgtccatttcgttgccttgatggccattaccgaagggaactaattagggtgtatctatcaaatgttgaacaagtttgccggcgctttattgatgaaagaagaagcaagcttagcaggttgattgaggataaactggggtggtccagtttcagtggattctggctagcaatggatccaagtgtgcgtcgacacatgacaagggaaaagactgaaactatattgaaagttatagtgaaacaattctttatagagaaagaagttacatcaaccttggtaattgactctctatatagtggacttaaggcacttgaataccagagcaagaacaaaaaggcgatacctaaactaacagagacagatgctcggagcactccaatggtacttattgatcaggacatgtttgttttggctgatgatgtaatatttctgcttgaaagagctgcattggacacactgccacaccaacatttgcccacaaaagatgataaaagttcgcaaaaccgcacaaaggatggcaactcaggtcaggagttcagcaaagattctattgagcgtgatgatagacgacttatagagctaggctggaagacattggagcttttttccttagctcatatattcagccgaatacaagtggcacatcaagaggctgtggctttgaagcgccaagaggaacttattcgtgaagaagaagaagctgggctagctgaaattgaactcaaggcaaagcgtagtgccgctgaaaaggaaaaacgtgccaagaaaaaacaggcaaaacagaagaaaaatagtcgaaaaggtaataaggggaaaagtggcaagtccaacatcaataaggaaataattatggaccacagtcattcagatgatagaatattggatgatttttgtggacaaattgaagagatgcccttaaatgctgacaaccctgaagaagtttctgatatatctgacagtagagacgataattcagacatgcttcatgttgatattgaagaccgtgaatctagccctgttaattgggagatagatgcttcagaaactcaaactactattcctggaagtagtgaggtgcaaaatgaccatgcaggaaagaggacctctactgtggatgatagctcatcgtcttgttcatctgactcagtgccttcagttactgtgaatggatcatataaaggaggtgcctggacaagcgtcagatcctcatccaataggggaaacaacaggaggaataaggatactgaagcacgggcaggatttgcacaaggtggatcatgttcatcgcataatggttttataggctctggcagcaatgcctctggccactcaaaggaaagacacgaacctgaggatgataaagttgtcttgcagaggaagcaacatgcacaatggaacattgatatcattagctcctccaagtcaagaatggcagagtcttcattttcttctgtgagctctattaagaagcaacctcaaccaaattttttgctagaaagcaccaatagtttgaatcaccgtggaagcgaagcttctggcactgtgacttccactacaacagcgggtgcctcttcaaccccggccactcagttagttttgaataaaggacctgtatccagtgctgcaacccagaatgagaagccactacctctgcaggtgcttgtaccatccaaatctgaagtgcagaagcaggcttccctaactggcagtgcaactaccgaggccgtttcagtatcaaggcccttgactgccccacaagtccctgcagcaaaacaaagtgcaccagtcacttcaacagctcagaatgcaccttttctttctcgttcaatgagtgctgttgggcggttggggaatgaaccatctgccaatgctcctagtttcgttccccgttcacgaacatatcgcaatgccatgatggagaaaagttctggtggtggaagctgtttcacacatcagcaaggttcatcggagcaagcagttgcaccatggcaatcgatgtttacatcgcaacctttcattcggccatcagagaccttgtcttggaaagaggaaacattattgagatctgggtttacatttggaactgtgaagcccgagtcactgaacccatatcagggcagagaagagaactcacagcaagcgagcagcaacagcagtgattgtgcgccatcgagttcaaacatcagaagcgagatcgagaagctgaatttgagcggaagaccacgaagcaagcaactgttgtcagaaatttcgaccagatttactccctatcagccacaaggcttggtcgctgatgagttcccacacctagacatcatcaacgacttgctggatgaggagcagagtgacagaagaagggttcttcaacctgattttgttcaacagtcctatatgcctcatggtgccagcacacctgattatggtgagccatacttgtttgaccagtccgagcaatacttcgatgaggagcctccaaggttttatagtccattgagcagtgctcctcggaggttgagggacctgagctattcgcactttgatctcccatcacactccagcagcagccagtttgatgatctgatgatgagtcagtggccatacagccgcactgacatctccatgcctagttttgggtcagacacaagtggctacccctatcaggtgtgggatctcgcgaatggatcaagcaggtacccatcgtatcgccctgccaatgggcattgagagttttaatgattgcattgacaataatgtgtggttaagtccatgatgttcgcttctgagctgagtgtaattgtaatagttccccatagcagtgatataaagaattgttcctcagtttccttgttcaatcaatagttatatgacccccctcctccctcttttctctagttcagttttgcccagtggtaataaatctaagtcggctaaaatgatctggctaatcgtgttgtgaaatgtgtatgatgcaagcaaatggtagggtgtttttaagccatgccagtgcttcagctgatactacattaaactgggagtattctttgtttctccctctgacgagtgacgacgtgttattgatcgtctcatgttctctttgtatatttcagagtaaattctggatatagcccatggacataaactaattatttgatgcacactctggacctttggggtatgttttattccattgatggatatataag

SEQ ID NO: 30295 - DNA, 2806 bp, Zea Mays
ccgcccccgtcttccaccattgcccctcgcctcgacttcccccaatttctttccacgcctcttcctctctttgccctcgagccccctgcccctgcgcggccttcaaatcatcccgctgtttccccgccctctccttggcgcgcagctccggagcgccgggcgccgggtgggtccagcttcttggatctcgtgcgggactgattggcccgtcagtcccggcaggttggattgggtctgtcggcgacagaattggatctggcgagcttcccgaagcccggagcggcgtgtctgtcgggactgatagccgccggcgccgcggcgatttcctatccggcactctgtttcttgtgatagggcggcgatggcgaaccacgagctagtccttggacacgggcaggatgcggagctggcgctggggccgaaccaccacgacttcggccaagaccacgggctgggtctcggacacagccacgacctcggcctcggcggccacgcacacgaccacgagctcgtgctgggccagtcgcacgagcacgaccaccagctcgtcctcgggcaccaccacgatgacgatcaccagctggttctcgggcacgacgaccaccaccaccaccatgttcaccacgccggtgagctagttctgaggcagggccacgatggggactctgagactctggaagtgcagggccaccaccatgacgagcttgacttgtcggagagccacgagctgacgcttgccgagacacaccacctgggcgttgatcagaatttcgatcagctctcgctggagcaggctcatgagctcgcgctgcagccgcatgatctctcccaggctcctcttgcagtcgctcctgttgtccagtcacggaccatggttgtgagccctgagtttcagctcgcagtgggacagcagtttcccgatgttgtcagctgccgcagggccatccgcaacactgccatcgcctgccactttgagatacagacggtgaagtctgacaagtcccgcttcaccgctaagtgtgctgccgagagctgcccgtggcgcatacatgcagcaaagctccccggtgtgcccaccttctccattagaaccatacatgacaaccacagctgtgtcgggatcaaccatcttggccatcagcaggcatctgttcagtgggttgcgaacactgtcgaagagaggctacgtgagaacccagaatacaagcctaaggaaattttggaagaaatccacaaggcccatggcatcaccctatcctacaagcaagcttggagaggtaaggagcggatcatggctgcggttcgagggtcttttgaggaaggataccgtctcctgcctgagtactgtaggcaggtggaaagaacaaatccaggaagtatagctcgagtgtatggaaacccagatgacaattgctttcggcgactcttcatatcattcagtgcatcaatatttggctttgtcaatgcatgccgtccacttattgggcttgataggacccttctgaaaaacaagtatcttggcaccttgtttcttgccactggttttgatggggatggtgctctctttcctctggcatttggcgtggttgatgaggaaactgacgagaactgggtatggttcttgtctgagctgcatgagttgctggagaagaacacagagaacatgccaaggctgaccatcttgtccgatagacggaagggcattactgatggagttgaattcaacttcccaactgcattccacgggtactgcatgcgccatgttagtgaagccttcaaaaaggagttcaacaatcctgtgcttgccaaccttctctgggaagctgctcatgcgctgactgtgattgagtttgaaactaagctgctagagatagaggacgcttcaccagaagctgttgtttggataaggcacctaccttcacgtctttgggccacggcttactttgaggggacaaggtacggtcatctaacagcaaacatcgcggagtcgctgaattcctggatactggatgcctctggccttcctatagttcagatgatggaatgcatccgtcgccagctgatgacttggttcaacgagcgacgcgaagcaagcatgcagtggaacacaatcctcgtgcctgcagccgagcgtcgtgttcaggaggccattgagcgtgcacggggttaccaggtggcccgggccaacgaggcggaattcgaggtcatctcagctcacgagggaacaaacgttgtggacatccgcaacaggtgctgtctgtgccgggggtggcagctctatggcgtgccgtgtgctcatggtgtggcagctctcctctcctgcaggcagaacgtccaccgctacactgagagctgcttcaccgtggcaacataccgcaagacttattcgcagaccatacacccaatccctgacaggaccctctgggatgaaacagcagatcaaggccaggtcaaggtggagatgatcatcaatccaccgaagtcactgaggcccgcagcacagccaaggaagaagagggttagagcggaggaccgtgggcgagtcaagcgggttgttcattgcagccgctgcaaccagactggacacttcagaaccacatgtgctgctccaatatgaacaacggccaaccgaactgggcacttcagtccagaacttgttggttattaattagagctgcagcattcctgtgacaagttagcgtctacttgtgcaagcttcttgcttgcagatgggtcttttccttccgttttcggaaattcagtgttaaatggaaatggttaccggaaatacggaaacgaaatcagt

SEQ ID NO: 30296 - DNA, 2750 bp, Zea Mays
ccgcccccgtcttccaccattgcccctcgcctcgacttcccccaatttctttccacgcctcttcctctctttgccctcgagccccctgcccctgcgcggccttcaaatcatcccgctgtttccccgccctctccttggcgcgcagctccggagcgccgggcgccgggttggattgggtctgtcggcgacagaattggatctggcgagcttcccgaagcccggagcggcgtgtctgtcgggactgatagccgccggcgccgcggcgatttcctatccggcactctgtttcttgtgatagggcggcgatggcgaaccacgagctagtccttggacacgggcaggatgcggagctggcgctggggccgaaccaccacgacttcggccaagaccacgggctgggtctcggacacagccacgacctcggcctcggcggccacgcacacgaccacgagctcgtgctgggccagtcgcacgagcacgaccaccagctcgtcctcgggcaccaccacgatgacgatcaccagctggttctcgggcacgacgaccaccaccaccaccatgttcaccacgccggtgagctagttctgaggcagggccacgatggggactctgagactctggaagtgcagggccaccaccatgacgagcttgacttgtcggagagccacgagctgacgcttgccgagacacaccacctgggcgttgatcagaatttcgatcagctctcgctggagcaggctcatgagctcgcgctgcagccgcatgatctctcccaggctcctcttgcagtcgctcctgttgtccagtcacggaccatggttgtgagccctgagtttcagctcgcagtgggacagcagtttcccgatgttgtcagctgccgcagggccatccgcaacactgccatcgcctgccactttgagatacagacggtgaagtctgacaagtcccgcttcaccgctaagtgtgctgccgagagctgcccgtggcgcatacatgcagcaaagctccccggtgtgcccaccttctccattagaaccatacatgacaaccacagctgtgtcgggatcaaccatcttggccatcagcaggcatctgttcagtgggttgcgaacactgtcgaagagaggctacgtgagaacccagaatacaagcctaaggaaattttggaagaaatccacaaggcccatggcatcaccctatcctacaagcaagcttggagaggtaaggagcggatcatggctgcggttcgagggtcttttgaggaaggataccgtctcctgcctgagtactgtaggcaggtggaaagaacaaatccaggaagtatagctcgagtgtatggaaacccagatgacaattgctttcggcgactcttcatatcattcagtgcatcaatatttggctttgtcaatgcatgccgtccacttattgggcttgataggacccttctgaaaaacaagtatcttggcaccttgtttcttgccactggttttgatggggatggtgctctctttcctctggcatttggcgtggttgatgaggaaactgacgagaactgggtatggttcttgtctgagctgcatgagttgctggagaagaacacagagaacatgccaaggctgaccatcttgtccgatagacggaagggcattactgatggagttgaattcaacttcccaactgcattccacgggtactgcatgcgccatgttagtgaagccttcaaaaaggagttcaacaatcctgtgcttgccaaccttctctgggaagctgctcatgcgctgactgtgattgagtttgaaactaagctgctagagatagaggacgcttcaccagaagctgttgtttggataaggcacctaccttcacgtctttgggccacggcttactttgaggggacaaggtacggtcatctaacagcaaacatcgcggagtcgctgaattcctggatactggatgcctctggccttcctatagttcagatgatggaatgcatccgtcgccagctgatgacttggttcaacgagcgacgcgaagcaagcatgcagtggaacacaatcctcgtgcctgcagccgagcgtcgtgttcaggaggccattgagcgtgcacggggttaccaggtggcccgggccaacgaggcggaattcgaggtcatctcagctcacgagggaacaaacgttgtggacatccgcaacaggtgctgtctgtgccgggggtggcagctctatggcgtgccgtgtgctcatggtgtggcagctctcctctcctgcaggcagaacgtccaccgctacactgagagctgcttcaccgtggcaacataccgcaagacttattcgcagaccatacacccaatccctgacaggaccctctgggatgaaacagcagatcaaggccaggtcaaggtggagatgatcatcaatccaccgaagtcactgaggcccgcagcacagccaaggaagaagagggttagagcggaggaccgtgggcgagtcaagcgggttgttcattgcagccgctgcaaccagactggacacttcagaaccacatgtgctgctccaatatgaacaacggccaaccgaactgggcacttcagtccagaacttgttggttattaattagagctgcagcattcctgtgacaagttagcgtctacttgtgcaagcttcttgcttgcagatgggtcttttccttccgttttcggaaattcagtgttaaatggaaatggttaccggaaatacggaaacgaaatcagt

SEQ ID NO: 30297 - DNA, 1665 bp, Zea Mays
atcgccatccaccactggtcggtccactccaccgcccgtcccccgtgccgttccgtgcgtcgcatgactgtcgccgcactccgcttgccgccgcccgccgcagctccctccggccgcgcgcgcctcgtgggggccgccgcgcaccgctgctcccccaggtgaggtgagggaggcgtttgggtggtggtgctcccagctgctgctgacgcggagcggccggacgaggacgacggcggcggcggcgtacccgaagatggcgcggccgccgatcctatccgtcgcgctgccgtctgacaccggccgtgtgctcagcatccagtcccacaccgtccaggggtatgttggcaacaaatcggccgtctttcccctgcagctccttggctttgatgtggatccaataaactctgtacagttttctaatcatacaggatacccaacatttagaggtcaggttcttaatggcaaacagctctgggaccttattgaaggactggaggaaaatcagttgcttcattatacccatttattaacaggttatataggctcagtttcctttttagatactgtgctacaagttgttgagaaattgcgatcagttaatcctgatcttgtatatgtttgtgacccagttctaggtgatgaaggaaaactatatgttcctcaggagctaatatctgtttatcaacagaaggttgttccagttgcttcaatgcttacacctaaccaatttgaagttgaactacttactggattgaggatcacctccgaagaagatggtttgacagcttgtaataccctccacagtgccggaccacagaaggtggttataactagtgctcttattgaaggtaagctgctccttatcggaagtcacaaaaaaacagaggaacaacagccagaacaatttaagattgagataccaaagatacctgcatatttcacgggaactggagatttgacaactgctctcctactaggatggagtaataaatatcctgatagcctcgagaaagcagcagaactggcagtttccagtttgcaggcacttctgaaaagaactgtggaagactataaaatggccggcttcgacccatcgaccagcagcttagagatccggttgatccaaagccaggacgagatccgaaacccaactgttacatgcaaggctgtgaagtatggaagctgaatccatagtacccccactgacaaaggtgccaacaataatgagcagtgcctgcaccgccgataagcgggtgcacctacttccatgactcttggtcctcagttttgggatgctgattctgttacaccttagctccaaaatgagaaacaatcatatttctgaaaaaagggttatagacttatagggttatattcaggctgtgcgattgctgcagtctttgggaatgcgtggtggcctgagtgagattgtaaatggtccttatcattgttgtcttcctcgttgtgttgttgttgttgctgctcccgctgagttgtggtggttggttggaaactctaggtatgctttgtttgaggcacattacgaacatatggtgttgagatgtgctcataatgcttattatgataagtgattattgaaaagatagttataatttaatattgaccttagtgtgagtgtagtgttgtgcaacatgtcttttgagt

SEQ ID NO: 30298 - DNA, 1702 bp, Zea Mays
atcgccatccaccactggtcggtccactccaccgcccgtcccccgtgccgttccgtgcgtcgcatgactgtcgccgcactccgcttgccgccgcccgccgcagctccctccggccgcgcgcgcctcgtgggggccgccgcgcaccgctgctcccccaggtgaggtgaggtcagtggtggattgagaagggaggctatcggattcgggaggcgtttgggtggtggtgctcccagctgctgctgacgcggagcggccggacgaggacgacggcggcggcggcgtacccgaagatggcgcggccgccgatcctatccgtcgcgctgccgtctgacaccggccgtgtgctcagcatccagtcccacaccgtccaggggtatgttggcaacaaatcggccgtctttcccctgcagctccttggctttgatgtggatccaataaactctgtacagttttctaatcatacaggatacccaacatttagaggtcaggttcttaatggcaaacagctctgggaccttattgaaggactggaggaaaatcagttgcttcattatacccatttattaacaggttatataggctcagtttcctttttagatactgtgctacaagttgttgagaaattgcgatcagttaatcctgatcttgtatatgtttgtgacccagttctaggtgatgaaggaaaactatatgttcctcaggagctaatatctgtttatcaacagaaggttgttccagttgcttcaatgcttacacctaaccaatttgaagttgaactacttactggattgaggatcacctccgaagaagatggtttgacagcttgtaataccctccacagtgccggaccacagaaggtggttataactagtgctcttattgaaggtaagctgctccttatcggaagtcacaaaaaaacagaggaacaacagccagaacaatttaagattgagataccaaagatacctgcatatttcacgggaactggagatttgacaactgctctcctactaggatggagtaataaatatcctgatagcctcgagaaagcagcagaactggcagtttccagtttgcaggcacttctgaaaagaactgtggaagactataaaatggccggcttcgacccatcgaccagcagcttagagatccggttgatccaaagccaggacgagatccgaaacccaactgttacatgcaaggctgtgaagtatggaagctgaatccatagtacccccactgacaaaggtgccaacaataatgagcagtgcctgcaccgccgataagcgggtgcacctacttccatgactcttggtcctcagttttgggatgctgattctgttacaccttagctccaaaatgagaaacaatcatatttctgaaaaaagggttatagacttatagggttatattcaggctgtgcgattgctgcagtctttgggaatgcgtggtggcctgagtgagattgtaaatggtccttatcattgttgtcttcctcgttgtgttgttgttgttgctgctcccgctgagttgtggtggttggttggaaactctaggtatgctttgtttgaggcacattacgaacatatggtgttgagatgtgctcataatgcttattatgataagtgattattgaaaagatagttataatttaatattgaccttagtgtgagtgtagtgttgtgcaacatgtcttttgagt

SEQ ID NO: 30299 - DNA, 1778 bp, Zea Mays
atcgccatccaccactggtcggtccactccaccgcccgtcccccgtgccgttccgtgcgtcgcatgactgtcgccgcactccgcttgccgccgcccgccgcagctccctccggccgcgcgcgcctcgtgggggccgccgcgcaccgctgctcccccaggtgcgcgacgcaacaggcatggcctgcagcagcagcaacagtatttaaataaattaaataaatattttttccaagatcattatcgaacaagcaatcgcctcactggtcaacctgactgaatagggaggcgtttgggtggtggtgctcccagctgctgctgacgcggagcggccggacgaggacgacggcggcggcggcgtacccgaagatggcgcggccgccgatcctatccgtcgcgctgccgtctgacaccggccgtgtgctcagcatccagtcccacaccgtccaggggtatgttggcaacaaatcggccgtctttcccctgcagctccttggctttgatgtggatccaataaactctgtacagttttctaatcatacaggatacccaacatttagaggtcaggttcttaatggcaaacagctctgggaccttattgaaggactggaggaaaatcagttgcttcattatacccatttattaacaggttatataggctcagtttcctttttagatactgtgctacaagttgttgagaaattgcgatcagttaatcctgatcttgtatatgtttgtgacccagttctaggtgatgaaggaaaactatatgttcctcaggagctaatatctgtttatcaacagaaggttgttccagttgcttcaatgcttacacctaaccaatttgaagttgaactacttactggattgaggatcacctccgaagaagatggtttgacagcttgtaataccctccacagtgccggaccacagaaggtggttataactagtgctcttattgaaggtaagctgctccttatcggaagtcacaaaaaaacagaggaacaacagccagaacaatttaagattgagataccaaagatacctgcatatttcacgggaactggagatttgacaactgctctcctactaggatggagtaataaatatcctgatagcctcgagaaagcagcagaactggcagtttccagtttgcaggcacttctgaaaagaactgtggaagactataaaatggccggcttcgacccatcgaccagcagcttagagatccggttgatccaaagccaggacgagatccgaaacccaactgttacatgcaaggctgtgaagtatggaagctgaatccatagtacccccactgacaaaggtgccaacaataatgagcagtgcctgcaccgccgataagcgggtgcacctacttccatgactcttggtcctcagttttgggatgctgattctgttacaccttagctccaaaatgagaaacaatcatatttctgaaaaaagggttatagacttatagggttatattcaggctgtgcgattgctgcagtctttgggaatgcgtggtggcctgagtgagattgtaaatggtccttatcattgttgtcttcctcgttgtgttgttgttgttgctgctcccgctgagttgtggtggttggttggaaactctaggtatgctttgtttgaggcacattacgaacatatggtgttgagatgtgctcataatgcttattatgataagtgattattgaaaagatagttataatttaatattgaccttagtgtgagtgtagtgttgtgcaacatgtcttttgagt

SEQ ID NO: 30300 - DNA, 1522 bp, Zea Mays
atcgccatccaccactggtcggtccactccaccgcccgtcccccgtgccgttccgtgcgtcgcatgactgtcgccgcactccgcttgccgccgcccgccgcagctccctccggccgcgcgcgcctcgtgggggccgccgcgcaccgctgctcccccaggtgaggtgagggaggcgtttgggtggtggtgctcccagctgctgctgacgcggagcggccggacgaggacgacggcggcggcggcgtacccgaagatggcgcggccgccgatcctatccgtcgcgctgccgtctgacaccggccgtgtgctcagcatccagtcccacaccgtccaggggtatgttggcaacaaatcggccgtctttcccctgcagctccttggctttgatgtggatccaataaactctgtacagttttctaatcatacaggttatataggctcagtttcctttttagatactgtgctacaagttgttgagaaattgcgatcagttaatcctgatcttgtatatgtttgtgacccagttctaggtgatgaaggaaaactatatgttcctcaggagctaatatctgtttatcaacagaaggttgttccagttgcttcaatgcttacacctaaccaatttgaagttgaactacttactggattgaggatcacctccgaagaagatggtttgacagcttgtaataccctccacagtgccggaccacagaaggtggttataactagtgctcttattgaaggaacaacagccagaacaatttaagattgagataccaaagatacctgcatatttcacgggaactggagatttgacaactgctctcctactaggatggagtaataaatatcctgatagcctcgagaaagcagcagaactggcagtttccagtttgcaggcacttctgaaaagaactgtggaagactataaaatggccggcttcgacccatcgaccagcagcttagagatccggttgatccaaagccaggacgagatccgaaacccaactgttacatgcaaggctgtgaagtatggaagctgaatccatagtacccccactgacaaaggtgccaacaataatgagcagtgcctgcaccgccgataagcgggtgcacctacttccatgactcttggtcctcagttttgggatgctgattctgttacaccttagctccaaaatgagaaacaatcatatttctgaaaaaagggttatagacttatagggttatattcaggctgtgcgattgctgcagtctttgggaatgcgtggtggcctgagtgagattgtaaatggtccttatcattgttgtcttcctcgttgtgttgttgttgttgctgctcccgctgagttgtggtggttggttggaaactctaggtatgctttgtttgaggcacattacgaacatatggtgttgagatgtgctcataatgcttattatgataagtgattattgaaaagatagttataatttaatattgaccttagtgtgagtgtagtgttgtgcaacatgtcttttgagt

SEQ ID NO: 30301 - DNA, 1674 bp, Zea Mays
atcgccatccaccactggtcggtccactccaccgcccgtcccccgtgccgttccgtgcgtcgcatgactgtcgccgcactccgcttgccgccgcccgccgcagctccctccggccgcgcgcgcctcgtgggggccgccgcgcaccgctgctcccccaggtgaggtgaggtgaggtgaggtcagtggtggattgagaagggaggctatcggattcgggaggcgtttgggtggtggtgctcccagctgctgctgacgcggagcggccggacgaggacgacggcggcggcggcgtacccgaagatggcgcggccgccgatcctatccgtcgcgctgccgtctgacaccggccgtgtgctcagcatccagtcccacaccgtccaggggtatgttggcaacaaatcggccgtctttcccctgcagctccttggctttgatgtggatccaataaactctgtacagttttctaatcatacaggatacccaacatttagaggtcaggttcttaatggcaaacagctctgggaccttattgaaggactggaggaaaatcagttgcttcattatacccatttattaacaggttatataggctcagtttcctttttagatactgtgctacaagttgttgagaaattgcgatcagttaatcctgatcttgtatatgtttgtgacccagttctaggtgatgaaggaaaactatatgttcctcaggagctaatatctgtttatcaacagaaggttgttccagttgcttcaatgcttacacctaaccaatttgaagttgaactacttactggattgaggatcacctccgaagaagatggtttgacagcttgtaataccctccacagtgccggaccacagaaggtggttataactagtgctcttattgaaggaacaacagccagaacaatttaagattgagataccaaagatacctgcatatttcacgggaactggagatttgacaactgctctcctactaggatggagtaataaatatcctgatagcctcgagaaagcagcagaactggcagtttccagtttgcaggcacttctgaaaagaactgtggaagactataaaatggccggcttcgacccatcgaccagcagcttagagatccggttgatccaaagccaggacgagatccgaaacccaactgttacatgcaaggctgtgaagtatggaagctgaatccatagtacccccactgacaaaggtgccaacaataatgagcagtgcctgcaccgccgataagcgggtgcacctacttccatgactcttggtcctcagttttgggatgctgattctgttacaccttagctccaaaatgagaaacaatcatatttctgaaaaaagggttatagacttatagggttatattcaggctgtgcgattgctgcagtctttgggaatgcgtggtggcctgagtgagattgtaaatggtccttatcattgttgtcttcctcgttgtgttgttgttgttgctgctcccgctgagttgtggtggttggttggaaactctaggtatgctttgtttgaggcacattacgaacatatggtgttgagatgtgctcataatgcttattatgataagtgattattgaaaagatagttataatttaatattgaccttagtgtgagtgtagtgttgtgcaacatgtcttttgagt

SEQ ID NO: 30302 - DNA, 749 bp, Zea Mays
cgcaacatctgcaatgaactgtttcagggaactggagatttgacaactgctctcctactaggatggagtaataaatatcctgatagcctcgagaaagcagcagaactggcagtttccagtttgcaggcacttctgaaaagaactgtggaagactataaaatggccggcttcgacccatcgaccagcagcttagagatccggttgatccaaagccaggacgagatccgaaacccaactgttacatgcaaggctgtgaagtatggaagctgaatccatagtacccccactgacaaaggtgccaacaataatgagcagtgcctgcaccgccgataagcgggtgcacctacttccatgactcttggtcctcagttttgggatgctgattctgttacaccttagctccaaaatgagaaacaatcatatttctgaaaaaagggttatagacttatagggttatattcaggctgtgcgattgctgcagtctttgggaatgcgtggtggcctgagtgagattgtaaatggtccttatcattgttgtcttcctcgttgtgttgttgttgttgctgctcccgctgagttgtggtggttggttggaaactctaggtatgctttgtttgaggcacattacgaacatatggtgttgagatgtgctcataatgcttattatgataagtgattattgaaaagatagttataatttaatattgaccttagtgtgagtgtagtgttgtgcaacatgtcttttgagt

SEQ ID NO: 30303 - DNA, 2506 bp, Zea Mays
accgcggccccggccccgcccccggaaacaaaataggcagggccgcgcgcaggaggaaatggcgccaactgccaagctcgcgcgcgccaatctcgcgccttcttctccctccatctatttccctagtcaagccctcatccgaatccccatccccgatccatccctaccccagctcagctcagctgcccctcccctctttccactcaccagcgccagatctcccgccaccatcatggcctctgacgccaccgacgccccggcgcagcccgtgcccgccaagcgtcgcggaagctacaactgcggtcggtgcgggctgcccaagaagggccacgtctgctccgtcccgggtcccgcctcctccgccgccgctgggggcggcgacaaagcgggggagccgcagccacagaccaagccgcggcgcgcgctgcatttcgacgacccggcggcgtcggccgtggtgctggacgccgtgccactggcggtctcggcgccgccgctgcaggcggggtcgaagaaggcggtggacgtggaggaggacggcgacggcgacaacgacccgccggcggagcggtgggtcgaggttggcgcgggccggcgggcgcccggggttgtgttggtcgaggtgctacggcgcctgtccccacgctccgtggcggccgcggccggggtcagccgcggctggcacgagtgcgcgcgccgcgtctggagggccgccgaggaggttcgcctttgcgccgccggtgtcagttccgtcggtgcgctcatggcgcggtgccccgcgctcgcgaggctcgtgctccgcatggactgtgatgttgatgccacaacgctggcatgtattgcattttcctgtcccaatttacagtccctggatatcagcatggccaatagcgccgccaacaggatatctggggatgagctatctaggtttgtttcggagaagcgatctctgtcagttcttaaattagatggctgcagcagtcttggttttatcaatatcagctcttcaagcctttcaagactttggatgtcaggtctttcttcccttaccaaagcggtcatgaactgccccaatttgaatgagctctccctggactttcccaaacaaaataatgattctactgacctggttgctctaatggatagcctaggccgcacctgcccgaacttgaggaacatgcacatctcatcagaccgcttgtgcaacgaagctgtgtttgctctagagagtgctaacctcaggttcaaaaataacagatgcagctgtcgcatcgattgttcgttcttacgcgagcttggagctgctcgatttaagcgggtctggcatcactgacaatgggcttgggatgatcagcaacacgttccctaacaccctaacacgtctgctccttgctctgtgcccaaacatcaccccatgcgggattcaggtggctgcagcacagctgccgctccttcgcctcatggactgtggcaagagcatatgtgctaacccccagcctgaagctgggagatcatactctggcgatctaactgatgggatcaaattctgctccaaattacctgtccagagaaagcagcaggctacttgccagaagctgatcataaagcatagcgccctgaagaagctcagcctgtggggctgttcagggatcgatgccctgtacgtgagctgcccggagctggtcgagctgaacctcaactcctgcacgaaccttcatccagagcggctgctgatccagtgccccaagctggaagacgtgcacgtcaacgggtgccgtgacatgctggtcggagccatcaggaaccaggtccttaacgagttcgcggccgcggcgccccgggtgccctgcaagcggctggccgacgggtccaagcgcgtgcacgtgccccactacatggtagagcagctggaggaacatgagaaatggggcagcaggccgcggaagagccagtgcaccgttcatctcacctaggctaggcgcctgttaagtgagaggccctggtgatcgccggcgtcaggagcttgcggcgtcgatacagcgagactagatggaaatggtacggatatttttcgatatccgtcggttatgaaatggtcaaaactttatatggataatctatatctaaatccaaatatttgaaatctgactttctgaatccagctactcaaaatcgtcagatttgaagacaaatatagacatgtcacatatgttcccgcatcaaatttcacacatatgatgatttatttagtgtacagaaagtaatgtcaatctttattatgtaatgaagcatctatacaaaataactaaataaaaacaaagttctgttttttgcattataatccgtacaaccattatatgtcaattattgaaacattcaacaattactggtagtactgaaattaactcgatgaaacataaaaacatagatttgatcaccatccatgatttacaaagattttcatcgccaccacctctaaaacttggcacacattgaggatttgttg

SEQ ID NO: 30304 - DNA, 1511 bp, Zea Mays
aattataccagaaacagaccctaaaaaaacactcgtattccgtccctgctcgagctcccgatttctgaatttgttcctcgtttcgttgccagcccaatcggttcagtttcggcggtaacaagatcaactgcggtcgccagtcgattctgtgagcctgccagccatggagttgtccagttccgtctcgtccacggcggcggcggcggcgcaggcgcggctgctccggccgccgtcgtttcgccagccggggccggcgggattcgtgtcctgtaggagttacgctataaggagcaaactggtgagggcgatgcctccgatccttgctagcttccagcctgcatctcctcggtacccaagctttcaagacgcaaatggcaaaagacgaaatgttccttgttatcagagacaacaaaccccgcaggtagaagccaggtcgatggaggaggtatatgacactttggctgaacaccttctttcggtcttgaagaatattgaacatcttgattcaaaatacattgttggtctagctggcccacctggtgctggcaagtccacagttgcctctgaagttgttcgacgtgttaatacattttggtcccagaagcacacaaagggtagtggagcaccgcttcctaccaaggaaattgctgcaatgcttccaatggatggtttccacctttatcgtgcccagcttgatgcaatggaggatccaaaagaagcacatgcaagaagaggagcaccctggacattcaatccatcactgtttctgaaatgtctacatacactaagaacagagggttcagtttatgctccatcatttgatcatggtgttggcgacccagttgagaatgacatatttgtaaagccacagcacaaaatagtgatagttgaagggaactatctgttactggaagaagatgtttggaccgaaattagagacttgtttgatgagaaatggttcattgacattgacattgatatctccatgcaaagagtgctcaagagacatattgcaaccgagccagatgtagcagcatggaggatctcctacaacgaccgaccgaatgcagagcttatcctggaatcaaggaagaatgctgaccttgtgatcagatcagtagacttctcaagctagtgttcaattctttcaataggaaatagcattgtggttctagagttggaggttgttgtgggctgtttccgtggagattcctgtacatataataagctgaatgcctgtttcaaattttcatggtgattgtgttgcatgtaataagatattccttcactatgtaccgtggaggattgttaagtaatttattgacattttttaatagaaacacccttcagatttgtgtccaatgtcatatttttgttcctgtagaagatattaggagctttattgttgtatcgaaggagcaaaatgtctaggatcacaggccagagcagctccaagaggcgaccaaaacatatcccaaaactcgttttaggcttcaaaacataaaaatata

SEQ ID NO: 30305 - DNA, 1377 bp, Zea Mays
agcaaaccttcagccttgcctgctagtgctaactggatgattcgtgtcctgtaggagttacgctataaggagcaaactggtgagggcgatgcctccgatccttgctagcttccagcctgcatctcctcggtacccaagctttcaagacgcaaatggcaaaagacgaaatgttccttgttatcagagacaacaaaccccgcaggtagaagccaggtcgatggaggaggtatatgacactttggctgaacaccttctttcggtcttgaagaatattgaacatcttgattcaaaatacattgttggtctagctggcccacctggtgctggcaagtccacagttgcctctgaagttgttcgacgtgttaatacattttggtcccagaagcacacaaagggtagtggagcaccgcttcctaccaaggaaattgctgcaatgcttccaatggatggtttccacctttatcgtgcccagcttgatgcaatggaggatccaaaagaagcacatgcaagaagaggagcaccctggacattcaatccatcactgtttctgaaatgtctacatacactaagaacagagggttcagtttatgctccatcatttgatcatggtgttggcgacccagttgagaatgacatatttgtaaagccacagcacaaaatagtgatagttgaagggaactatctgttactggaagaagatgtttggaccgaaattagagacttgtttgatgagaaatggttcattgacattgacattgatatctccatgcaaagagtgctcaagagacatattgcaaccggtctgctctaatccattcacattccagcactatattatttatgtcacatattcattgtttgttttgtttctcttgtcaggaaaagagccagatgtagcagcatggaggatctcctacaacgaccgaccgaatgcagagcttatcctggaatcaaggaagaatgctgaccttgtgatcagatcagtagacttctcaagctagtgttcaattctttcaataggaaatagcattgtggttctagagttggaggttgttgtgggctgtttccgtggagattcctgtacatataataagctgaatgcctgtttcaaattttcatggtgattgtgttgcatgtaataagatattccttcactatgtaccgtggaggattgttaagtaatttattgacattttttaatagaaacacccttcagatttgtgtccaatgtcatatttttgttcctgtagaagatattaggagctttattgttgtatcgaaggagcaaaatgtctaggatcacaggccagagcagctccaagaggcgaccaaaacatatcccaaaactcgttttaggcttcaaaacataaaaatata

SEQ ID NO: 30306 - DNA, 1178 bp, Zea Mays
gtttacaagaaaaggtcgatggaggaggtatatgacactttggctgaacaccttctttcggtcttgaagaatattgaacatcttgattcaaaatacattgttggtctagctggcccacctggtgctggcaagtccacagttgcctctgaagttgttcgacgtgttaatacattttggtcccagaagcacacaaagggtagtggagcaccgcttcctaccaaggaaattgctgcaatgcttccaatggatggtttccacctttatcgtgcccagcttgatgcaatggaggatccaaaagaagcacatgcaagaagaggagcaccctggacattcaatccatcactgtttctgaaatgtctacatacactaagaacagagggttcagtttatgctccatcatttgatcatggtgttggcgacccagttgagaatgacatatttgtaaagccacagcacaaaatagtgatagttgaagggaactatctgttactggaagaagatgtttggaccgaaattagagacttgtttgatgagaaatggttcattgacattgacattgatatctccatgcaaagagtgctcaagagacatattgcaaccggtctgctctaatccattcacattccagcactatattatttatgtcacatattcattgtttgttttgtttctcttgtcaggaaaagagccagatgtagcagcatggaggatctcctacaacgaccgaccgaatgcagagcttatcctggaatcaaggaagaatgctgaccttgtgatcagatcagtagacttctcaagctagtgttcaattctttcaataggaaatagcattgtggttctagagttggaggttgttgtgggctgtttccgtggagattcctgtacatataataagctgaatgcctgtttcaaattttcatggtgattgtgttgcatgtaataagatattccttcactatgtaccgtggaggattgttaagtaatttattgacattttttaatagaaacacccttcagatttgtgtccaatgtcatatttttgttcctgtagaagatattaggagctttattgttgtatcgaaggagcaaaatgtctaggatcacaggccagagcagctccaagaggcgaccaaaacatatcccaaaactcgttttaggcttcaaaacataaaaatata

SEQ ID NO: 30307 - DNA, 1106 bp, Zea Mays
ttcgctgctagccccaaccgagtcgatggaggaggtatatgacactttggctgaacaccttctttcggtcttgaagaatattgaacatcttgattcaaaatacattgttggtctagctggcccacctggtgctggcaagtccacagttgcctctgaagttgttcgacgtgttaatacattttggtcccagaagcacacaaagggtagtggagcaccgcttcctaccaaggaaattgctgcaatgcttccaatggatggtttccacctttatcgtgcccagcttgatgcaatggaggatccaaaagaagcacatgcaagaagaggagcaccctggacattcaatccatcactgtttctgaaatgtctacatacactaagaacagagggttcagtttatgctccatcatttgatcatggtgttggcgacccagttgagaatgacatatttgtaaagccacagcacaaaatagtgatagttgaagggaactatctgttactggaagaagatgtttggaccgaaattagagacttgtttgatgagaaatggttcattgacattgacattgatatctccatgcaaagagtgctcaagagacatattgcaaccggaaaagagccagatgtagcagcatggaggatctcctacaacgaccgaccgaatgcagagcttatcctggaatcaaggaagaatgctgaccttgtgatcagatcagtagacttctcaagctagtgttcaattctttcaataggaaatagcattgtggttctagagttggaggttgttgtgggctgtttccgtggagattcctgtacatataataagctgaatgcctgtttcaaattttcatggtgattgtgttgcatgtaataagatattccttcactatgtaccgtggaggattgttaagtaatttattgacattttttaatagaaacacccttcagatttgtgtccaatgtcatatttttgttcctgtagaagatattaggagctttattgttgtatcgaaggagcaaaatgtctaggatcacaggccagagcagctccaagaggcgaccaaaacatatcccaaaactcgttttaggcttcaaaacataaaaatata

SEQ ID NO: 30308 - DNA, 324 bp, Zea Mays
cgaccaccccaaaccgtaggctttcctccctgtcgcctgctttccgcgatgcttctgtcgcccacttcggcgcgcatgcgctttccgcgacgcgatggagttccagacccgtccagtcacgcatctcgtcattgtgttcgtgtgcggcgccgaggtggacagcctcagccgctacgagctgtggcacaaggccttgggggcagctacaccctcgccaccgtgctcgccgtccgtcccggcctcagcccgtctacctcatgcatcgacttcgcatgctacaatctgtccgacgagctcaaggcatcgccgcgcctttaacaccgc

SEQ ID NO: 30309 - DNA, 1077 bp, Zea Mays
cgattcacaacaagtagataaagtcatttcacgtcaacatcaacaattgcccattacaacagtactctttaaataataaaaggcataaagccatagttattgatctaaatgaaaacaacgatacaaggcacaaagccattgttattgaattacatgaaaatgttgaaagaaggcacgcagccataattggaactttggtaaatagatgaaaatgatgaaagaaggcacacaaccataattagaactttggtaaataggagtagccatccgatttgcatcaaccagcagtcactcgataaaaggaaacagaaccaaggttaaataactaatatgtagccaaggataatcatgagataagttataataaaatatagtggctttcagaagaggttcaaattaaataattcatacctggaaggatggaagtagaacagcagcatcaccacatcaaaagcattatattgttcatgcttgtacatcagtgtcagcaacattctcagccaaagaacgaggaactgcagagcctccattgctgcctgatggtacagaagagctcaccatggactgcggtggacgtggggcaaaccaagtgccgggtccaaccatggacgggaagccaggcgggaggatgggctgagcccttggtggttgaacgggcggagccccttgcggcgggatctccagaggcgttggtgcagaggtcctcttggattgacgcctcaacgcgttttgcttctagggtttgggatttgggggcgatttaggatggtggcttggatttggcgcgcagcgaatggatttggagactaaatggcgcgatttggcgggagggacggaaggatttagcgggagggacggaagaagcgcgggtgtgcgggggcagcgacgagcgaggtcgtgagggccgaggaagacgcacgggatcaggatggagtcgaaagagcgagaaagagccggcacatcttctcgttgtgggctgcaagcggtcttttttccctcgaggacgacgctgcggacgggctgcgaaacaagagcccgtttctttctctttcttggtttctcacccctccacgtaag

SEQ ID NO: 30310 - DNA, 2162 bp, Zea Mays
ggcaaagctaaggtcctgcaaggggagagttcaaatatatcgcttcatcttgcctttttttcttttccttgtcccatctttcttcttggtcttgtgtgttaatttgctgttcttcttccagctcgatatatctcacttctaccacattgcaagaatctttgttttttttgcactggtgtctttaatttccagtagatgctaggattttgaaatcaagtgaaggctacctgaggttaattttcttgagaggagtatggagaagacgaagggatggacagatagagagagagagagagagagatgttagctagtttgattcatcctggatgaaaacacaaatgctcttgcgaatgagtgaagctgccagcatgatctagctctgatttggttggcaccatattagcaggcgtccacgcacagctagactagagtggcctcgcgcgctctcgtctggtctgtgtctcgctttgtgcctgcaaatcgttgttagatcatgcatgacagcctcattccttcacaattctggggcatgtattgctgatgacgctgcgccttcttgtttttttgctgcaactttgagaaagatagatccatctgcatgcttttttccgctgctatggtgtatggttgtgtgctgcagattttggatctgacttgtgagaaccgtcgacggacccctgcacacagtacgtgagacgatcgaggaggatggaggcacgcagtacgttttgttctcgatctctgctacagcatgtcatcttaattaagcctactggttgcatgcatgggtagtaaacctcaagtactgatagccattaattcttggttggagttcgacagagaagatcgaaaagacatgtatagaatactgatcgtctgatcatatcgtccctacctatctgtctgtctctaccaaagtgggctacagtacgttagctagctgtctcttcgaagacactgataggatgtttgattacaagtccaacggaaccacttgactgcatacggttaccacttactcatgcaagaaaaaaaattgcattttcaaattcgaaccccaagtcgtctagtgtagggtcttatgttcataaccagttgggataacaaacatattaatcgatctgcatatatatatatatacacaaaagggctacacagataacagatgcagtgcatagaacctaattgcaggtgggggacccggccctcccccggtggacaataaaaaaaatccagtttccaagcccaagctataggtaggcagtccagagcggtggtcttgtcactttcttacttccaaaaccaggccactgttgatgtaggctggctggctggctcatgtgccacagttgctgttcgttattaactgtagtaaacatcagtgtggacgggcgccagaatttcagatctcggtacgtatgctgtgtggattcagcgttatttgaacaccgtaataatgctctccagcagattgtgaattgtgaatacagttcgtagagaacactatttataatgcagacgttatgtttacatagtttagtttaaaatgggagataagatagaagagatagaatgagtaattggctggagatcaaatcgtgcatattattgtgcaaaacactgtttttccatatagtggagttttaaagtatgggacgagagagcagatagcaaatcgtgtatatggtcgtgcaaatattatatatgtggttgtgcaaaactccgaaatttgaaataggagacacagttgataattctacgctctacgcacgggcggcggactgcactactagttcatcggatgcgttagcgtgccactcctcatcttgtttccttgtacgtactagtgcaatccgtcagccgcacggctccagtccactccagtccagcaacagcgtcacctccagctccgaaaggcttatccttgcaacaaacatcgtacgaaaaaggcgcaggacaaaagaaaatggatcgaaatgcaacaaataaaaaagggcatcaaaatacgctgcgagtgagcgagacgttggcctccccatcccatatatatatagctatagctatccctcggttcttcaattcattcctcgctctctccatctctctaccctctccctctctctcggatagctagctcttcttcctccttcctccgtttggat

SEQ ID NO: 30311 - DNA, 2146 bp, Zea Mays
caaggggagagttcaaatatatcgcttcatcttgcctttttttcttttccttgtcccatctttcttcttggtcttgtgtgttaatttgctgttcttcttccagctcgatatatctcacttctaccacattgcaagaatctttgttttttttgcactggtgtctttaatttccagtagatgctaggattttgaaatcaagtgaaggctacctgaggttaattttcttgagaggagtatggagaagacgaagggatggacagatagagagagagagagagagagatgttagctagtttgattcatcctggatgaaaacacaaatgctcttgcgaatgagtgaagctgccagcatgatctagctctgatttggttggcaccatattagcaggcgtccacgcacagctagactagagtggcctcgcgcgctctcgtctggtctgtgtctcgctttgtgcctgcaaatcgttgttagatcatgcatgacagcctcattccttcacaattctggggcatgtattgctgatgacgctgcgccttcttgtttttttgctgcaactttgagaaagatagatccatctgcatgcttttttccgctgctatggtgtatggttgtgtgctgcagattttggatctgacttgtgagaaccgtcgacggacccctgcacacagtacgtgagacgatcgaggaggatggaggcacgcagtacgttttgttctcgatctctgctacagcatgtcatcttaattaagcctactggttgcatgcatggaggtagtaaacctcaagtactgatagccattaattcttggttggagttcgacagagaagatcgaaaagacatgtatagaatactgatcgtctgatcatatcgtccctacctatctgtctgtctctaccaaagtgggctacagtacgttagctagctgtctcttcgaagacactgataggatgtttgattacaagtccaacggaaccacttgactgcatacggttaccacttactcatgcaagaaaaaaaattgcattttcaaattcgaaccccaagtcgtctagtgtagggtcttatgttcataaccagttgggataacaaacatattaatcgatctgcatatatatatatatacacaaaagggctacacagataacagatgcagtgcatagaacctaattgcaggtgggggacccggccctcccccggtggacaataaaaaaaatccagtttccaagcccaagctataggtaggcagtccagagcggtggtcttgtcactttcttacttccaaaaccaggccactgttgatgtaggctggctggctggctcatgtgccacagttgctgttcgttattaactgtagtaaacatcagtgtggacgggcgccagaatttcagatctcggtacgtatgctgtgtggattcagcgttatttgaacaccgtaataatgctctccagcagattgtgaattgtgaatacagttcgtagagaacactatttataatgcagacgttatgtttacatagtttagtttaaaatgggagataagatagaagagatagaatgagtaattggctggagatcaaatcgtgcatattattgtgcaaaacactgtttttccatatagtggagttttaaagtatgggacgagagagcagatagcaaatcgtgtatatggtcgtgcaaatattatatatgtggttgtgcaaaactccgaaatttgaaataggagacacagttgataattctacgctctacgcacgggcggcggactgcactactagttcatcggatgcgttagcgtgccactcctcatcttgtttccttgtacgtactagtgcaatccgtcagccgcacggctccagtccactccagtccagcaacagcgtcacctccagctccgaaaggcttatccttgcaacaaacatcgtacgaaaaaggcgcaggacaaaagaaaatggatcgaaatgcaacaaataaaaaagggcatcaaaatacgctgcgagtgagcgagacgttggcctccccatcccatatatatatagctatagctatccctcggttcttcaattcattcctcgctctctccatctctctaccctctccctctctctcggatagctagctcttcttcctccttcctccgtttggat

SEQ ID NO: 30312 - DNA, 762 bp, Zea Mays
caaggggagagttcaaatatatcgcttcatcttgcctttttttcttttccttgtcccatctttcttcttggtcttgtgtgttaatttgctgttcttcttccagctcgatatatctcacttctaccacattgcaagaatctttgttttttttgcactggtgtctttaatttccagtagatgctaggattttgaaatcaagtgaaggctacctgaggttaattttcttgagaggagtatggagaagacgaagggatggacagatagagagagagagagagagagatgttagctagtttgattcatcctggatgaaaacacaaatgctcttgcgaatgagtgaagctgccagcatgatctagctctgatttggttggcaccatattagcaggcgtccacgcacagctagactagagtggcctcgcgcgctctcgtctggtctgtgtctcgctttgtgcctgcaaatcgttgttagatcatgcatgacagcctcattccttcacaattctggggcatgtattgctgatgacgctgcgccttcttgtttttttgctgcaactttgagaaagatagatccatctgcatgcttttttccgctgctatggtgtatggttgtgtgctgcagattttggatctgacttgtgagaaccgtcgacggacccctgcacacagtacgtgagacgatcgaggaggatggaggcacgcaatgggaagttgtgcattgccggaagtcttcttttcgaaggtaaaaaaaaaactaactcg

SEQ ID NO: 30313 - DNA, 2697 bp, Zea Mays
gtgcgcatggacatggtgctccgcgaaagccgagcggccggacaagttaagcgcggccacgatcgaccggccccggccccatcgtcgcaccccaccccatccatcccattcccccacgagccctaggcgcgcccacgacggcacgggcccggagatggaggagagcgacgcggcggagggggtggcggtgcagctgatcgatggcgagggcgagttcgcggccgcggcggcggagcgattcatggcagccgcgggagtcgccggatgcgggctctcctacgccgtcgtctccatcatggggccacagagcagcggaaagagtaccttattgaaccaactatttggaaccaattttagggagatggatgcattcaggggaaggagccaaactactaaaggtatctggatagcacgttgtgttggtgttgaaccttgtactgttgtattggatctggagggtactgatggaagagagagaggagaggatgacactgcatttgagaagcaaagttcgttatttgcacttgcaatttcagacatagttctaattaacatgtggtgccatgatattggccgtgaacaagctgccaataaaccacttctaaagactgtatttcaggtcatgatgcgtttgtttagtcctcggaagacaacactactatttgttatacgtgataaaaccaggactccacttgaacatctagaaccagttctaagggaggatattcaaaagatatggaattctgttgccaagccagaggcacacaaagacacccctatcagtgaatttttcaatgtacaagttactgcattgtccagttttgaagaaaaagaggagcagtttagagaacaggttcaacaacttaggcagagattttcaaattcaattgcaccaggaggtcttgcaggtgatagaagaggagtagttcctgcttcaggttttctgtttagttcacaacagatttggaaagttatccgagagaacaaggatcttgatcttcctgctcacaaggtaatggttgctacggttaggtgtgatgaaattgcaaacgagaagtttggatgcataacctcggacacagaatggttagatgtggagagtgctgtccaatctggtccagtacctggttttgggaaaaaacttagcaatatcgtggaagttcacttgcaagagtatgacaaagaagctttctattttgatgaagctgttaggaaaggaaaacgacaacatttggagtccagaatactgaatcttgtccaacctgcattccagaaaatgttgactcatctgcgcatgaaggctttagaaaaatttaaagctggtcttaattcatctttggagagtggaaaagaattcgcgatatctgcaagagacaatactgaatgctctctcaaagactttgaacaaggatgtgctgatgctataatcaagcaggcgaactgggactgctctaaaatactagagaaagtacggcgtgatattgaagatcatgcactttcaattcgtgaaagaaagctatcagaattgacaacccatgctaaggagaaactaagaaaagcactagctgaacctgtggagtctctatttgatgctgcagaccaaacaacctggacatcaataagaaacatttacaaacgcgagacagaggccatcctaccggagtttctgaaaaccatttgtggctttgaaatggaatatgctcaagcagaagaaatggtatccaaattaagggattatgcccggagtgttgtgcaaagtaaagctaaagaggaatctagcaaagtattgatccatatgaaagagaggttcacaacagtgtttagccatgacaaggattcaattccaagggtctggacaggaaaggaagatgttcatgcgatagcaaaggaagctcgagctgcggctctcaaacttctgtctgtaatggcggccattcgctgggatgatgagccagataggattgaaagcatcatcacttcaacacttctggaaggctctgttgtatcaaagattgcaagtgctgcttctgctgacccacttgcttctaccacttgggaacagattcctccagagcatacaatgattactccttctcagtgcaagttactgtggaagcaattcaaatcagaaactgagttcaccattacacaagcagtatccacacagctcacaggcgtggtaatagtaagctgcctcctccttgggcaattgtggccattgctattcttggtttcaatgagatcatgacgcttcttaggaatcccatttatgtgtttttgctatttgtgggctacttgatggtcaaagctttggcagtacaactagatgtcagcagagaattccaaaatggagtggttcctgggataatctctgtgtcagcgaagctcctgccgacgatacagaacctggtgaacaaagtggcagccgagcagcaggatgagcaccggcaccctcaccagcagcaccctcaggtagcagaacccctacagccacagatgcagccgccgccgctgctcctgagcccgagaagccccatgagcgagctgcggaggctgcacatgccgtcaagcccgcgcaaggtagcgtcttcctcctcgtcgccgtcgtcgtcctcctcgtctgccgtatcgtcccctaggcacgttggcgaggatcagaagccaagaccaggggcagctgcgcctgagaaccagtcc

SEQ ID NO: 30314 - DNA, 2529 bp, Zea Mays
atggaggagagcgacgcggcggagggggtggcggtgcagctgatcgatggcgagggcgagttcgcggccgcggcggcggagcgattcatggcagccgcgggagtcgccggatgcgggctctcctacgccgtcgtctccatcatggggccacagagcagcggaaagagtaccttattgaaccaactatttggaaccaattttagggagatggatgcattcaggggaaggagccaaactactaaaggtatctggatagcacgttgtgttggtgttgaaccttgtactgttgtattggatctggagggtactgatggaagagagagaggagaggatgacactgcatttgagaagcaaagttcgttatttgcacttgcaatttcagacatagttctaattaacatgtggtgccatgatattggccgtgaacaagctgccaataaaccacttctaaagactgtatttcaggtcatgatgcgtttgtttagtcctcggaagacaacactactatttgttatacgtgataaaaccaggactccacttgaacatctagaaccagttctaagggaggatattcaaaagatatggaattctgttgccaagccagaggcacacaaagacacccctatcagtgaatttttcaatgtacaagttactgcattgtccagttttgaagaaaaagaggagcagtttagagaacaggcagagattttcaaattcaattgcaccaggaggtcttgcaggtgatagaagaggagtagttcctgcttcaggttttctgtttagttcacaacagatttggaaagttatccgagagaacaaggatcttgatcttcctgctcacaaggtaatggttgctacggttaggtgtgatgaaattgcaaacgagaagtttggatgcataacctcggacacagaatggttagatgtggagagtgctgtccaatctggtccagtacctggttttgggaaaaaacttagcaatatcgtggaagttcacttgcaagagtatgacaaagaagctttctattttgatgaagctgttaggaaaggaaaacgacaacatttggagtccagaatactgaatcttgtccaacctgcattccagaaaatgttgactcatctgcgcatgaaggctttagaaaaatttaaagctggtcttaattcatctttggagagtggaaaagaattcgcgatatctgcaagagacaatactgaatgctctctcaaagactttgaacaaggatgtgctgatgctataatcaagcaggcgaactgggactgctctaaaatactagagaaagtacggcgtgatattgaagatcatgcactttcaattcgtgaaagaaagctatcagaattgacaacccatgctaaggagaaactaagaaaagcactagctgaacctgtggagtctctatttgatgctgcagaccaaacaacctggacatcaataagaaacatttacaaacgcgagacagaggccatcctaccggagtttctgaaaaccatttgtggctttgaaatggaatatgctcaagcagaagaaatggtatccaaattaagggattatgcccggagtgttgtgcaaagtaaagctaaagaggaatctagcaaagtattgatccatatgaaagagaggttcacaacagtgtttagccatgacaaggattcaattccaagggtctggacaggaaaggaagatgttcatgcgatagcaaaggaagctcgagctgcggctctcaaacttctgtctgtaatggcggccattcgctgggatgatgagccagataggattgaaagcatcatcacttcaacacttctggaaggctctgttgtatcaaagattgcaagtgctgcttctgctgacccacttgcttctaccacttgggaacagattcctccagagcatacaatgattactccttctcagtgcaagttactgtggaagcaattcaaatcagaaactgagttcaccattacacaagcagtatccacacagctcacaggcgtggtaatagtaagctgcctcctccttgggcaattgtggccattgctattcttggtttcaatgagatcatgacgcttcttaggaatcccatttatgtgtttttgctatttgtgggctacttgatggtcaaagctttggcagtacaactagatgtcagcagagaattccaaaatggagtggttcctgggataatctctgtgtcagcgaagctcctgccgacgatacagaacctggtgaacaaagtggcagccgagcagcaggatgagcaccggcaccctcaccagcagcaccctcaggtagcagaacccctacagccacagatgcagccgccgccgctgctcctgagcccgagaagccccatgagcgagctgcggaggctgcacatgccgtcaagcccgcgcaaggtagcgtcttcctcctcgtcgccgtcgtcgtcctcctcgtctgccgtatcgtcccctaggcacgttggcgaggatcagaagccaagaccaggggcagctgcgcctgagaaccagtcc

SEQ ID NO: 30315 - DNA, 1593 bp, Zea Mays
gtcattgacagcctgatggtttgttcaatgtgattaccagtgcttccaactttgcaagctatcaagtatgacaaagaagctttctattttgatgaagctgttaggaaaggaaaacgacaacatttggagtccagaatactgaatcttgtccaacctgcattccagaaaatgttgactcatctgcgcatgaaggctttagaaaaatttaaagctggtcttaattcatctttggagagtggaaaagaattcgcgatatctgcaagagacaatactgaatgctctctcaaagactttgaacaaggatgtgctgatgctataatcaagcaggcgaactgggactgctctaaaatactagagaaagtacggcgtgatattgaagatcatgcactttcaattcgtgaaagaaagctatcagaattgacaacccatgctaaggagaaactaagaaaagcactagctgaacctgtggagtctctatttgatgctgcagaccaaacaacctggacatcaataagaaacatttacaaacgcgagacagaggccatcctaccggagtttctgaaaaccatttgtggctttgaaatggaatatgctcaagcagaagaaatggtatccaaattaagggattatgcccggagtgttgtgcaaagtaaagctaaagaggaatctagcaaagtattgatccatatgaaagagaggttcacaacagtgtttagccatgacaaggattcaattccaagggtctggacaggaaaggaagatgttcatgcgatagcaaaggaagctcgagctgcggctctcaaacttctgtctgtaatggcggccattcgctgggatgatgagccagataggattgaaagcatcatcacttcaacacttctggaaggctctgttgtatcaaagattgcaagtgctgcttctgctgacccacttgcttctaccacttgggaacagattcctccagagcatacaatgattactccttctcagtgcaagttactgtggaagcaattcaaatcagaaactgagttcaccattacacaagcagtatccacacagcaagctcacaggcgtggtaatagtaagctgcctcctccttgggcaattgtggccattgctattcttggtttcaatgagatcatgacgcttcttaggaatcccatttatgtgtttttgctatttgtgggctacttgatggtcaaagctttggcagtacaactagatgtcagcagagaattccaaaatggagtggttcctgggataatctctgtgtcagcgaagctcctgccgacgatacagaacctggtgaacaaagtggcagccgagcagcaggatgagcaccggcaccctcaccagcagcaccctcaggtagcagaacccctacagccacagatgcagccgccgccgctgctcctgagcccgagaagccccatgagcgagctgcggaggctgcacatgccgtcaagcccgcgcaaggtagcgtcttcctcctcgtcgccgtcgtcgtcctcctcgtctgccgtatcgtcccctaggcacgttggcgaggatcagaagccaagaccaggggcagctgcgcctgagaaccagtcc

SEQ ID NO: 30316 - DNA, 422 bp, Zea Mays
ctggtggatctccattccaaaccctccaatttagtactacatgcatcagcatcattgcaggtgacacaggattatgttacagcaaggtttcagtatcctaggctcagctttctagtcctaatgctaccatcgattgctcagtttcctactggtaaaccggagaatggctaaacaacatgggaacttcttttaagttagggcaacactgagctggtgttgccttccttccagcacctacacctggggggtcctaacatagcttaaactacctgaactacattgcacgttacaaaactggcagctacgtctccctccctccgctatgactccctccctccctccctccgctatgactccctccctccctccctccgctatgacgccgtctccttgaagctcttggtgagccagatggcagtctc

SEQ ID NO: 30317 - DNA, 975 bp, Zea Mays
ggccgctgtagcaccttcttcctcgtttctatcacccaaccccgggtggctgccatctccttcctgtctcctctagcacctgatgcctctgcacccttccccatgaccgcagctcccatgggtgcccgagctccctcagctgttcatggaacttctactggccaaggctccaacgcgtcgtccaacgtctccggcgaccgtgccccctgctccctccctcctccaagcataaggtgttgtcggaccggccctccccatgcgagctctatgctccacgcgctcagacctacaacacgcaagccccgagcccctctctagccgctcctttgctcggtctccatcctcccagccgtggacagcaccttcctccacttctccatggttctgctcgccgaggacccccttcatggcaccgtcgtggcctcgtagggatccttctcaccgacgtgcctcggtgctcatggcgcctcccttgttgctgagctcagagtcgaccttcaacttgccatggtgctctgcctggtcgccgttctagccctcgaccatcccccacgccgaactcctctccatggtcgaggagctacaacaacaggccatgtgtcttgtctccaaggccatgcgtagcgagctccgctgtcgatttgcgcaaccccaacgtctccgcatctcgcttcactctatccgtgcatccctaatcatgatgttgatgtccccatgcctaacgaagatgtcacgccacgcacatcgatttcttgatgaaatgcctaagctgagtgaacatgcaagtgtgttccgagtcgatttggtcagattgttcgatttgtatttttgtggtttgttctattatgattcggtcgatgtcatgcatatatgtgtcgttgtggttgtagtggaagtgtgtaaattgttcaataaaacgcctccttgtatccagtgcacatgtatgtgcagcgccggccctgagggcgggcgaac

SEQ ID NO: 30318 - DNA, 342 bp, Zea Mays
ctctttctcaggatcgctgtccccctcgttacaattgaatgaggacatggtagcaacccctggtgtatcatcaccggtaccctccacctttctttgagatttgggaacagattgttctgcatccaaatcttcgttttcatatttgtcattcttcctattccttttataatatcttctatgctgaccatggcaggcattacggactttgtccttctcaatacaccctttttgaatatcatgctcaagatcaaggcgatcaacactggagtccgaatcagcagctgatggaagagctctctccctctggagatatagagaagataagaacatagcatcttgaaa

SEQ ID NO: 30319 - DNA, 3017 bp, Zea Mays
cccacgcggtttttgtgtttgctgccgccgcggtttccattgcttctcccgtcgctagggcgctcgtgaatacgtgatccatcgtctccatctccgtctggtgtggtgaggtttgagagactcgaggtgtgagcgtcgcttcgtctggaatcggctctctcatttgttagatagatccttctatctccccacgtttgggcgtcgcttcgtcggctgcgacttgcgagacgccggcgccgccggcgccggtggacgaaggcgatcaaggattaggcgatccgatccgatccgaaccaattctccattcttcgattccttccttgggtgggcggctgccctcagattccttccacatggctcgttccccgccgccgccacccccttccccggcgcaagggaacgggaacgggagtgggagcgggagcctcaccgccagagacgccctcgcctacatcaaggccgtcaaggacaacttccaggaaaagcggcacacgtacgaacagttcctccaggtcatgcgtgattttaagagcaacaggctcgacagcgccggcctgatcgcccgtgtcaagaccctcttccacggctacccggacctagtcctcggcatcaacgccttcctgcccaaggggcatgccatcaggcctcaggacctcagcgaggacaaggagcccgtcgattatcccagggccatcaaccttgtcaacaggattaagatacgattccagcaggaggaacatgtctacaagtcattcctgggaatcctcagtatgtaccgcatggataacaagcccattcaagatgtttacgacgaggtcaccttgctgttccacggccatccagatttactcgaggagttcactcatttcttgcctgatacgcccatacctcctccggaggcaggcactacctctaaagttaggaatgatgacaagaatgctataacgcattctgccatgagagctcagacagttcagagtgatttgttcctgcatttacctttaaacttcaagatgctatgttcttatcttctctatatctccagagtgagagagctcttccatcagctgctgattcggactccagtgttgatcgccttgatcttgagcatgatattcaaaaagagtgtattgaaaaggacaaagtccgtaatgcctgccacgatcagcatagaggagattataaaaggaacaggatgaatgacgaatatgaaaacgaagatttggatgcagaacaatctggtcccaaatctcaaagaaaggtggagggtactggtgatgatacaccaggggttgttaccatgtcctcattcaattgtaacgagggggacaacgatcctgaggaagagtctaaagttaggaatgataacaagaatgctataatgcattctgccatgagagctcagacagttcagagggagagagctcttctatcagctgctgattcggactccagtgttgatcgccttgatcttgagcatgatattcgaaaagggtgtattgagaaggacaaagtccgtaatgcctgccacggtcagcatagaagggattataaaagaaataggaagaatgacgaatatgaaaatgaagatttggatgcagaacgatctggtcccaaatctcaaagaaaggtggagggtactggtgatgattcaccagggattgctgccatgtcctcattcaattgtaacgagggggacagcgatcctgagaaagagagatataatgaaaggggaaaatctgaaagagtattgaccttcaattctaaggaaggagcagctcatgaagctagtacattccctagcaaagagaagtataacttatgcaaaccaatatcagagcttgatctgtcaaattgtcagtggtgcactccaagttaccgacttttgcctaaaaacgtttgagctggacgtgctgttggaatctgttagtgttacaattaagcgtgttgaggagttggtggaaagtatggaaggcaactcactgaaacctgatagctctatccacctcgatgaacatttgactagtttgaatatgaggtgcattgagtggctatatggtgaccatggacttgatgttgtggatgttcttcaaaaaaatgctggtgtgacattaccagttattttaaccaggctgaaacaaaagcaggaggagtggtcaatgtgccagtcagattttaataaagtttgggctgaagtatattcaaaaaattatcacaagtctcttgactacggcagtttctattccaaacaacaaaacacaagaatctgaacacaaaaggtggccactagtaggcaagaagcagaggactgctggaaagcgttgggctctgaagaagcacaggcacccgcccgcctgggcttctggtaccatgccgccgcccttgcttgcgtcgagggcctccaagaaccgcaccacctcgtccatgtcagggcgcttctccgggctcgcgtcccagcacttgtgcatgatgttcgccatcgggcttgggcagcagcgacaggccgcaggttctgcacacacagaatgtcaggccgcaggttctggcacatgcatgttcagttcagtatgtggacgattaccagcagtgaatccaggaactgagaacaaacctgatgaacaacggcggatgatacgtctgcaaagctgaggtctgcatgtcacagatttcccacaagcatatgccaaagctgtacacatggcacttcctgttgtacggcttgccttcaagaacctgcagacgccgacagaaaaagaccaaacagttgctcaaaacacttgtcctggtacagaacggaaacacagcaacagtgattgctttttttttgtacagatctaaaacagtagcggaagtatagattatagtgaccccatttttttaaaagaatttaaaagtccctttttcatatatgtcttgcttaatgcttaccctctagcaagatccattgctatctgaacaacgactttgtacgcgagcttccttcgcctgttctttatcaaatactgtttcagtgttcc

SEQ ID NO: 30320 - DNA, 3431 bp, Zea Mays
cccacgcggtttttgtgtttgctgccgccgcggtttccattgcttctcccgtcgctagggcgctcgtgaatacgtgatccatcgtctccatctccgtctggtgtggtgaggtttgagagactcgaggtgtgagcgtcgcttcgtctggaatcggctctctcatttgttagatagatccttctatctccccacgtttgggcgtcgcttcgtcggctgcgacttgcgagacgccggcgccgccggcgccggtggacgaaggcgatcaaggattaggcgatccgatccgatccgaaccaattctccattcttcgattccttccttgggtgggcggctgccctcagattccttccacatggctcgttccccgccgccgccacccccttccccggcgcaagggaacgggaacgggagtgggagcgggagcctcaccgccagagacgccctcgcctacatcaaggccgtcaaggacaacttccaggaaaagcggcacacgtacgaacagttcctccaggtcatgcgtgattttaagagcaacaggctcgacagcgccggcctgatcgcccgtgtcaagaccctcttccacggctacccggacctagtcctcggcatcaacgccttcctgcccaaggggcatgccatcaggcctcaggacctcagcgaggacaaggagcccgtcgattatcccagggccatcaaccttgtcaacaggattaagatacgattccagcaggaggaacatgtctacaagtcattcctgggaatcctcagtatgtaccgcatggataacaagcccattcaagatgtttacgacgaggtcaccttgctgttccacggccatccagatttactcgaggagttcactcatttcttgcctgatacgcccatacctcctccggaggcaggcactacctctaaagttaggaatgatgacaagaatgctataacgcattctgccatgagagctcagacagttcaggtgaatcaacaaattatagaattttcaattctagttgcttcttcaattgctatatttttactctcctccaacaatgtaggccatatcctttttaggacagtctccacaattgcgataacactaagataatcttaaatttcctttgtatgtgaatctattgatggcacttttgtacactgaactggtaaataggttggggagttgttgttcaaatgttacatactttgacttattcaaataaaatatttgttacttttttgaacagagtgatttgttcctgcatttacctttaaacttcaagatgctatgttcttatcttctctatatctccagagtgagagagctcttccatcagctgctgattcggactccagtgttgatcgccttgatcttgagcatgatattcaaaaagagtgtattgaaaaggacaaagtccgtaatgcctgccacgatcagcatagaggagattataaaaggaacaggatgaatgacgaatatgaaaacgaagatttggatgcagaacaatctggtcccaaatctcaaagaaaggtggagggtactggtgatgatacaccaggggttgttaccatgtcctcattcaattgtaacgagggggacaacgatcctgaggaagagtctaaagttaggaatgataacaagaatgctataatgcattctgccatgagagctcagacagttcagagggagagagctcttctatcagctgctgattcggactccagtgttgatcgccttgatcttgagcatgatattcgaaaagggtgtattgagaaggacaaagtccgtaatgcctgccacggtcagcatagaagggattataaaagaaataggaagaatgacgaatatgaaaatgaagatttggatgcagaacgatctggtcccaaatctcaaagaaaggtggagggtactggtgatgattcaccagggattgctgccatgtcctcattcaattgtaacgagggggacagcgatcctgagaaagagagatataatgaaaggggaaaatctgaaagagtattgaccttcaattctaaggaaggagcagctcatgaagctagtacattccctagcaaagagaagtataacttatgcaaaccaatatcagagcttgatctgtcaaattgtcagtggtgcactccaagttaccgacttttgcctaaaaactatccagtaccttctgcaagcaaaaggactgacattgaagcttcagtgctgaatgatttctgtgtattggtgacctcaggaagtggagcgtttaagcatatgcgcaaaaatcagtatgaagaaatcttgtttatatgtgaagatgacatgtttgagctggacgtgctgttggaatctgttagtgttacaattaagcgtgttgaggagttggtggaaagtatggaaggcaactcactgaaacctgatagctctatccacctcgatgaacatttgactagtttgaatatgaggtgcattgagtggctatatggtgaccatggacttgatgttgtggatgttcttcaaaaaaatgctggtgtgacattaccagttattttaaccaggctgaaacaaaagcaggaggagtggtcaatgtgccagtcagattttaataaagtttgggctgaagtatattcaaaaaattatcacaagtctcttgactacggcagtttctattccaaacaacaaaacacaagaatctgaacacaaaaggtggccactagtaggcaagaagcagaggactgctggaaagcgttgggctctgaagaagcacaggcacccgcccgcctgggcttctggtaccatgccgccgcccttgcttgcgtcgagggcctccaagaaccgcaccacctcgtccatgtcagggcgcttctccgggctcgcgtcccagcacttgtgcatgatgttcgccatcgggcttgggcagcagcgacaggccgcaggttctgcacacacagaatgtcaggccgcaggttctggcacatgcatgttcagttcagtatgtggacgattaccagcagtgaatccaggaactgagaacaaacctgatgaacaacggcggatgatacgtctgcaaagctgaggtctgcatgtcacagatttcccacaagcatatgccaaagctgtacacatggcacttcctgttgtacggcttgccttcaagaacctgcagacgccgacagaaaaagaccaaacagttgctcaaaacacttgtcctggtacagaacggaaacacagcaacagtgattgctttttttttgtacagatctaaaacagtagcggaagtatagattatagtgaccccatttttttaaaagaatttaaaagtccctttttcatatatgtcttgcttaatgcttaccctctagcaagatccattgctatctgaacaacgactttgtacgcgagcttccttcgcctgttctttatcaaatactgtttcagtgttcc

SEQ ID NO: 30321 - DNA, 2949 bp, Zea Mays
cccacgcggtttttgtgtttgctgccgccgcggtttccattgcttctcccgtcgctagggcgctcgtgaatacgtgatccatcgtctccatctccgtctggtgtggtgaggtttgagagactcgaggtgtgagcgtcgcttcgtctggaatcggctctctcatttgttagatagatccttctatctccccacgtttgggcgtcgcttcgtcggctgcgacttgcgagacgccggcgccgccggcgccggtggacgaaggcgatcaaggattaggcgatccgatccgatccgaaccaattctccattcttcgattccttccttgggtgggcggctgccctcagattccttccacatggctcgttccccgccgccgccacccccttccccggcgcaagggaacgggaacgggagtgggagcgggagcctcaccgccagagacgccctcgcctacatcaaggccgtcaaggacaacttccaggaaaagcggcacacgtacgaacagttcctccaggtcatgcgtgattttaagagcaacaggctcgacagcgccggcctgatcgcccgtgtcaagaccctcttccacggctacccggacctagtcctcggcatcaacgccttcctgcccaaggggcatgccatcaggcctcaggacctcagcgaggacaaggagcccgtcgattatcccagggccatcaaccttgtcaacaggattaagatacgattccagcaggaggaacatgtctacaagtcattcctgggaatcctcagtatgtaccgcatggataacaagcccattcaagatgtttacgacgaggtcaccttgctgttccacggccatccagatttactcgaggagttcactcatttcttgcctgatacgcccatacctcctccggaggcaggcactacctctaaagttaggaatgatgacaagaatgctataacgcattctgccatgagagctcagacagttcagagtgagagagctcttccatcagctgctgattcggactccagtgttgatcgccttgatcttgagcatgatattcaaaaagagtgtattgaaaaggacaaagtccgtaatgcctgccacgatcagcatagaggagattataaaaggaacaggatgaatgacgaatatgaaaacgaagatttggatgcagaacaatctggtcccaaatctcaaagaaaggtggagggtactggtgatgatacaccaggggttgttaccatgtcctcattcaattgtaacgagggggacaacgatcctgaggaagagtctaaagttaggaatgataacaagaatgctataatgcattctgccatgagagctcagacagttcagagggagagagctcttctatcagctgctgattcggactccagtgttgatcgccttgatcttgagcatgatattcgaaaagggtgtattgagaaggacaaagtccgtaatgcctgccacggtcagcatagaagggattataaaagaaataggaagaatgacgaatatgaaaatgaagatttggatgcagaacgatctggtcccaaatctcaaagaaaggtggagggtactggtgatgattcaccagggattgctgccatgtcctcattcaattgtaacgagggggacagcgatcctgagaaagagagatataatgaaaggggaaaatctgaaagagtattgaccttcaattctaaggaaggagcagctcatgaagctagtacattccctagcaaagagaagtataacttatgcaaaccaatatcagagcttgatctgtcaaattgtcagtggtgcactccaagttaccgacttttgcctaaaaacgtttgagctggacgtgctgttggaatctgttagtgttacaattaagcgtgttgaggagttggtggaaagtatggaaggcaactcactgaaacctgatagctctatccacctcgatgaacatttgactagtttgaatatgaggtgcattgagtggctatatggtgaccatggacttgatgttgtggatgttcttcaaaaaaatgctggtgtgacattaccagttattttaaccaggctgaaacaaaagcaggaggagtggtcaatgtgccagtcagattttaataaagtttgggctgaagtatattcaaaaaattatcacaagtctcttgactacggcagtttctattccaaacaacaaaacacaagaatctgaacacaaaaggtggccactagtaggcaagaagcagaggactgctggaaagcgttgggctctgaagaagcacaggcacccgcccgcctgggcttctggtaccatgccgccgcccttgcttgcgtcgagggcctccaagaaccgcaccacctcgtccatgtcagggcgcttctccgggctcgcgtcccagcacttgtgcatgatgttcgccatcgggcttgggcagcagcgacaggccgcaggttctgcacacacagaatgtcaggccgcaggttctggcacatgcatgttcagttcagtatgtggacgattaccagcagtgaatccaggaactgagaacaaacctgatgaacaacggcggatgatacgtctgcaaagctgaggtctgcatgtcacagatttcccacaagcatatgccaaagctgtacacatggcacttcctgttgtacggcttgccttcaagaacctgcagacgccgacagaaaaagaccaaacagttgctcaaaacacttgtcctggtacagaacggaaacacagcaacagtgattgctttttttttgtacagatctaaaacagtagcggaagtatagattatagtgaccccatttttttaaaagaatttaaaagtccctttttcatatatgtcttgcttaatgcttaccctctagcaagatccattgctatctgaacaacgactttgtacgcgagcttccttcgcctgttctttatcaaatactgtttcagtgttcc

SEQ ID NO: 30322 - DNA, 3019 bp, Zea Mays
cccacgcggtttttgtgtttgctgccgccgcggtttccattgcttctcccgtcgctagggcgctcgtgaatacgtgatccatcgtctccatctccgtctggtgtggtgaggtttgagagactcgaggtgtgagcgtcgcttcgtctggaatcggctctctcatttgttagatagatccttctatctccccacgtttgggcgtcgcttcgtcggctgcgacttgcgagacgccggcgccgccggcgccggtggacgaaggcgatcaaggattaggcgatccgatccgatccgaaccaattctccattcttcgattccttccttgggtgggcggctgccctcagattccttccacatggctcgttccccgccgccgccacccccttccccggcgcaagggaacgggaacgggagtgggagcgggagcctcaccgccagagacgccctcgcctacatcaaggccgtcaaggacaacttccaggaaaagcggcacacgtacgaacagttcctccaggtcatgcgtgattttaagagcaacaggctcgacagcgccggcctgatcgcccgtgtcaagaccctcttccacggctacccggacctagtcctcggcatcaacgccttcctgcccaaggggcatgccatcaggcctcaggacctcagcgaggacaaggagcccgtcgattatcccagggccatcaaccttgtcaacaggattaagatacgattccagcaggaggaacatgtctacaagtcattcctgggaatcctcagtatgtaccgcatggataacaagcccattcaagatgtttacgacgaggtcaccttgctgttccacggccatccagatttactcgaggagttcactcatttcttgcctgatacgcccatacctcctccggaggcaggcactacctctaaagttaggaatgatgacaagaatgctataacgcattctgccatgagagctcagacagttcagagtgagagagctcttccatcagctgctgattcggactccagtgttgatcgccttgatcttgagcatgatattcaaaaagagtgtattgaaaaggacaaagtccgtaatgcctgccacgatcagcatagaggagattataaaaggaacaggatgaatgacgaatatgaaaacgaagatttggatgcagaacaatctggtcccaaatctcaaagaaaggtggagggtactggtgatgatacaccaggggttgttaccatgtcctcattcaattgtaacgagggggacaacgatcctgaggaagagtctaaagttaggaatgataacaagaatgctataatgcattctgccatgagagctcagacagttcagagggagagagctcttctatcagctgctgattcggactccagtgttgatcgccttgatcttgagcatgatattcgaaaagggtgtattgagaaggacaaagtccgtaatgcctgccacggtcagcatagaagggattataaaagaaataggaagaatgacgaatatgaaaatgaagatttggatgcagaacgatctggtcccaaatctcaaagaaaggtggagggtactggtgatgattcaccagggattgctgccatgtcctcattcaattgtaacgagggggacagcgatcctgagaaagagagatataatgaaaggggaaaatctgaaagagtattgaccttcaattctaaggaaggagcagctcatgaagctagtacattccctagcaaagagaagtataacttatgcaaaccaatatcagagcttgatctgtcaaattgtcagtggtgcactccaagttaccgacttttgcctaaaaacgaagtggagcgtttaagcatatgcgcaaaaatcagtatgaagaaatcttgtttatatgtgaagatgacatgtttgagctggacgtgctgttggaatctgttagtgttacaattaagcgtgttgaggagttggtggaaagtatggaaggcaactcactgaaacctgatagctctatccacctcgatgaacatttgactagtttgaatatgaggtgcattgagtggctatatggtgaccatggacttgatgttgtggatgttcttcaaaaaaatgctggtgtgacattaccagttattttaaccaggctgaaacaaaagcaggaggagtggtcaatgtgccagtcagattttaataaagtttgggctgaagtatattcaaaaaattatcacaagtctcttgactacggcagtttctattccaaacaacaaaacacaagaatctgaacacaaaaggtggccactagtaggcaagaagcagaggactgctggaaagcgttgggctctgaagaagcacaggcacccgcccgcctgggcttctggtaccatgccgccgcccttgcttgcgtcgagggcctccaagaaccgcaccacctcgtccatgtcagggcgcttctccgggctcgcgtcccagcacttgtgcatgatgttcgccatcgggcttgggcagcagcgacaggccgcaggttctgcacacacagaatgtcaggccgcaggttctggcacatgcatgttcagttcagtatgtggacgattaccagcagtgaatccaggaactgagaacaaacctgatgaacaacggcggatgatacgtctgcaaagctgaggtctgcatgtcacagatttcccacaagcatatgccaaagctgtacacatggcacttcctgttgtacggcttgccttcaagaacctgcagacgccgacagaaaaagaccaaacagttgctcaaaacacttgtcctggtacagaacggaaacacagcaacagtgattgctttttttttgtacagatctaaaacagtagcggaagtatagattatagtgaccccatttttttaaaagaatttaaaagtccctttttcatatatgtcttgcttaatgcttaccctctagcaagatccattgctatctgaacaacgactttgtacgcgagcttccttcgcctgttctttatcaaatactgtttcagtgttcc

SEQ ID NO: 30323 - DNA, 2933 bp, Zea Mays
cccacgcggtttttgtgtttgctgccgccgcggtttccattgcttctcccgtcgctagggcgctcgtgaatacgtgatccatcgtctccatctccgtctggtgtggtgaggtttgagagactcgaggtgtgagcgtcgcttcgtctggaatcggctctctcatttgttagatagatccttctatctccccacgtttgggcgtcgcttcgtcggctgcgacttgcgagacgccggcgccgccggcgccggtggacgaaggcgatcaaggattaggcgatccgatccgatccgaaccaattctccattcttcgattccttccttgggtgggcggctgccctcagattccttccacatggctcgttccccgccgccgccacccccttccccggcgcaagggaacgggaacgggagtgggagcgggagcctcaccgccagagacgccctcgcctacatcaaggccgtcaaggacaacttccaggaaaagcggcacacgtacgaacagttcctccaggtcatgcgtgattttaagagcaacaggctcgacagcgccggcctgatcgcccgtgtcaagaccctcttccacggctacccggacctagtcctcggcatcaacgccttcctgcccaaggggcatgccatcaggcctcaggacctcagcgaggacaaggagcccgtcgattatcccagggccatcaaccttgtcaacaggattaagatacgattccagcaggaggaacatgtctacaagtcattcctgggaatcctcagtatgtaccgcatggataacaagcccattcaagatgtttacgacgaggtcaccttgctgttccacggccatccagatttactcgaggagttcactcatttcttgcctgatacgcccatacctcctccggaggcaggcactacctctaaagttaggaatgatgacaagaatgctataacgcattctgccatgagagctcagacagttcagagtgagagagctcttccatcagctgctgattcggactccagtgttgatcgccttgatcttgagcatgatattcaaaaagagtgtattgaaaaggacaaagtccgtaatgcctgccacgatcagcatagaggagattataaaaggaacaggatgaatgacgaatatgaaaacgaagatttggatgcagaacaatctggtcccaaatctcaaagaaaggtggagggtactggtgatgatacaccaggggttgttaccatgtcctcattcaattgtaacgagggggacaacgatcctgaggaagagtctaaagttaggaatgataacaagaatgctataatgcattctgccatgagagctcagacagttcagagggagagagctcttctatcagctgctgattcggactccagtgttgatcgccttgatcttgagcatgatattcgaaaagggtgtattgagaaggacaaagtccgtaatgcctgccacggtcagcatagaagggattataaaagaaataggaagaatgacgaatatgaaaatgaagatttggatgcagaacgatctggtcccaaatctcaaagaaaggtggagggtactggtgatgattcaccagggattgctgccatgtcctcattcaattgtaacgagggggacagcgatcctgagaaagagagatataatgaaaggggaaaatctgaaagagtattgaccttcaattctaaggaaggagcagctcatgaagctagtacattccctagcaaagagaagtataacttatgcaaaccaatatcagagcttgatctgtcaaattgtcagtggtgcactccaagttaccgacttttgcctaaaaacgtttgagctggacgtgctgttggaatctgttagtgttacaattaagcgtgttgaggagttggtggaaagtatggaaggcaactcactgaaacctgatagctctatccacctcgatgaacatttgactagtttgaatatgaggtgcattgagtggctatatggtgaccatggacttgatgttgtggatgttcttcaaaaaaatgctggtgtgacattaccagttattttaaccaggctgaaacaaaagcaggaggagtggtcaatgtgccagtcagattttaataaagtttgggctgaaattaacgaaatcagtgagaagaatagaaagggggatgatgtgttacttgctatttctgctgggaataggtggccactagtaggcaagaagcagaggactgctggaaagcgttgggctctgaagaagcacaggcacccgcccgcctgggcttctggtaccatgccgccgcccttgcttgcgtcgagggcctccaagaaccgcaccacctcgtccatgtcagggcgcttctccgggctcgcgtcccagcacttgtgcatgatgttcgccatcgggcttgggcagcagcgacaggccgcaggttctgcacacacagaatgtcaggccgcaggttctggcacatgcatgttcagttcagtatgtggacgattaccagcagtgaatccaggaactgagaacaaacctgatgaacaacggcggatgatacgtctgcaaagctgaggtctgcatgtcacagatttcccacaagcatatgccaaagctgtacacatggcacttcctgttgtacggcttgccttcaagaacctgcagacgccgacagaaaaagaccaaacagttgctcaaaacacttgtcctggtacagaacggaaacacagcaacagtgattgctttttttttgtacagatctaaaacagtagcggaagtatagattatagtgaccccatttttttaaaagaatttaaaagtccctttttcatatatgtcttgcttaatgcttaccctctagcaagatccattgctatctgaacaacgactttgtacgcgagcttccttcgcctgttctttatcaaatactgtttcagtgttcc

SEQ ID NO: 30324 - DNA, 3098 bp, Zea Mays
cccacgcggtttttgtgtttgctgccgccgcggtttccattgcttctcccgtcgctagggcgctcgtgaatacgtgatccatcgtctccatctccgtctggtgtggtgaggtttgagagactcgaggtgtgagcgtcgcttcgtctggaatcggctctctcatttgttagatagatccttctatctccccacgtttgggcgtcgcttcgtcggctgcgacttgcgagacgccggcgccgccggcgccggtggacgaaggcgatcaaggattaggcgatccgatccgatccgaaccaattctccattcttcgattccttccttgggtgggcggctgccctcagattccttccacatggctcgttccccgccgccgccacccccttccccggcgcaagggaacgggaacgggagtgggagcgggagcctcaccgccagagacgccctcgcctacatcaaggccgtcaaggacaacttccaggaaaagcggcacacgtacgaacagttcctccaggtcatgcgtgattttaagagcaacaggctcgacagcgccggcctgatcgcccgtgtcaagaccctcttccacggctacccggacctagtcctcggcatcaacgccttcctgcccaaggggcatgccatcaggcctcaggacctcagcgaggacaaggagcccgtcgattatcccagggccatcaaccttgtcaacaggattaagatacgattccagcaggaggaacatgtctacaagtcattcctgggaatcctcagtatgtaccgcatggataacaagcccattcaagatgtttacgacgaggtcaccttgctgttccacggccatccagatttactcgaggagttcactcatttcttgcctgatacgcccatacctcctccggaggcaggcactacctctaaagttaggaatgatgacaagaatgctataacgcattctgccatgagagctcagacagttcagagtgagagagctcttccatcagctgctgattcggactccagtgttgatcgccttgatcttgagcatgatattcaaaaagagtgtattgaaaaggacaaagtccgtaatgcctgccacgatcagcatagaggagattataaaaggaacaggatgaatgacgaatatgaaaacgaagatttggatgcagaacaatctggtcccaaatctcaaagaaaggtggagggtactggtgatgatacaccaggggttgttaccatgtcctcattcaattgtaacgagggggacaacgatcctgaggaagagtctaaagttaggaatgataacaagaatgctataatgcattctgccatgagagctcagacagttcagagggagagagctcttctatcagctgctgattcggactccagtgttgatcgccttgatcttgagcatgatattcgaaaagggtgtattgagaaggacaaagtccgtaatgcctgccacggtcagcatagaagggattataaaagaaataggaagaatgacgaatatgaaaatgaagatttggatgcagaacgatctggtcccaaatctcaaagaaaggtggagggtactggtgatgattcaccagggattgctgccatgtcctcattcaattgtaacgagggggacagcgatcctgagaaagagagatataatgaaaggggaaaatctgaaagagtattgaccttcaattctaaggaaggagcagctcatgaagctagtacattccctagcaaagagaagtataacttatgcaaaccaatatcagagcttgatctgtcaaattgtcagtggtgcactccaagttaccgacttttgcctaaaaactatccagtaccttctgcaagcaaaaggactgacattgaagcttcagtgctgaatgatttctgtgtattggtgacctcaggaagtggagcgtttaagcatatgcgcaaaaatcagtatgaagaaatcttgtttatatgtgaagatgacatgtttgagctggacgtgctgttggaatctgttagtgttacaattaagcgtgttgaggagttggtggaaagtatggaaggcaactcactgaaacctgatagctctatccacctcgatgaacatttgactagtttgaatatgaggtgcattgagtggctatatggtgaccatggacttgatgttgtggatgttcttcaaaaaaatgctggtgtgacattaccagttattttaaccaggctgaaacaaaagcaggaggagtggtcaatgtgccagtcagattttaataaagtttgggctgaagtatattcaaaaaattatcacaagtctcttgactacggcagtttctattccaaacaacaaaacacaagaatctgaacacaaaaggtggccactagtaggcaagaagcagaggactgctggaaagcgttgggctctgaagaagcacaggcacccgcccgcctgggcttctggtaccatgccgccgcccttgcttgcgtcgagggcctccaagaaccgcaccacctcgtccatgtcagggcgcttctccgggctcgcgtcccagcacttgtgcatgatgttcgccatcgggcttgggcagcagcgacaggccgcaggttctgcacacacagaatgtcaggccgcaggttctggcacatgcatgttcagttcagtatgtggacgattaccagcagtgaatccaggaactgagaacaaacctgatgaacaacggcggatgatacgtctgcaaagctgaggtctgcatgtcacagatttcccacaagcatatgccaaagctgtacacatggcacttcctgttgtacggcttgccttcaagaacctgcagacgccgacagaaaaagaccaaacagttgctcaaaacacttgtcctggtacagaacggaaacacagcaacagtgattgctttttttttgtacagatctaaaacagtagcggaagtatagattatagtgaccccatttttttaaaagaatttaaaagtccctttttcatatatgtcttgcttaatgcttaccctctagcaagatccattgctatctgaacaacgactttgtacgcgagcttccttcgcctgttctttatcaaatactgtttcagtgttcc

SEQ ID NO: 30325 - DNA, 3166 bp, Zea Mays
cccacgcggtttttgtgtttgctgccgccgcggtttccattgcttctcccgtcgctagggcgctcgtgaatacgtgatccatcgtctccatctccgtctggtgtggtgaggtttgagagactcgaggtgtgagcgtcgcttcgtctggaatcggctctctcatttgttagatagatccttctatctccccacgtttgggcgtcgcttcgtcggctgcgacttgcgagacgccggcgccgccggcgccggtggacgaaggcgatcaaggattaggcgatccgatccgatccgaaccaattctccattcttcgattccttccttgggtgggcggctgccctcagattccttccacatggctcgttccccgccgccgccacccccttccccggcgcaagggaacgggaacgggagtgggagcgggagcctcaccgccagagacgccctcgcctacatcaaggccgtcaaggacaacttccaggaaaagcggcacacgtacgaacagttcctccaggtcatgcgtgattttaagagcaacaggctcgacagcgccggcctgatcgcccgtgtcaagaccctcttccacggctacccggacctagtcctcggcatcaacgccttcctgcccaaggggcatgccatcaggcctcaggacctcagcgaggacaaggagcccgtcgattatcccagggccatcaaccttgtcaacaggattaagatacgattccagcaggaggaacatgtctacaagtcattcctgggaatcctcagtatgtaccgcatggataacaagcccattcaagatgtttacgacgaggtcaccttgctgttccacggccatccagatttactcgaggagttcactcatttcttgcctgatacgcccatacctcctccggaggcaggcactacctctaaagttaggaatgatgacaagaatgctataacgcattctgccatgagagctcagacagttcagagtgagagagctcttccatcagctgctgattcggactccagtgttgatcgccttgatcttgagcatgatattcaaaaagagtgtattgaaaaggacaaagtccgtaatgcctgccacgatcagcatagaggagattataaaaggaacaggatgaatgacgaatatgaaaacgaagatttggatgcagaacaatctggtcccaaatctcaaagaaaggtggagggtactggtgatgatacaccaggggttgttaccatgtcctcattcaattgtaacgagggggacaacgatcctgaggaagagtctaaagttaggaatgataacaagaatgctataatgcattctgccatgagagctcagacagttcagagggagagagctcttctatcagctgctgattcggactccagtgttgatcgccttgatcttgagcatgatattcgaaaagggtgtattgagaaggacaaagtccgtaatgcctgccacggtcagcatagaagggattataaaagaaataggaagaatgacgaatatgaaaatgaagatttggatgcagaacgatctggtcccaaatctcaaagaaaggtggagggtactggtgatgattcaccagggattgctgccatgtcctcattcaattgtaacgagggggacagcgatcctgagaaagagagatataatgaaaggggaaaatctgaaagagtattgaccttcaattctaaggaaggagcagctcatgaagctagtacattccctagcaaagagaagtataacttatgcaaaccaatatcagagcttgatctgtcaaattgtcagtggtgcactccaagttaccgacttttgcctaaaaactatccagtaccttctgcaagcaaaaggactgacattgaagcttcagtgctgaatgatttctgtgtattggtgacctcaggaagtggagcgtttaagcatatgcgcaaaaatcagtatgaagaaatcttgtttatatgtgaagatgacatgtttgagctggacgtgctgttggaatctgttagtgttacaattaagcgtgttgaggagttggtggaaagtatggaaggcaactcactgaaacctgatagctctatccacctcgatgaacatttgactagtttgaatatgaggtgcattgagtggctatatggtgaccatggacttgatgttgtggatgttcttcaaaaaaatgctggtgtgacattaccagttattttaaccaggctgaaacaaaagcaggaggagtggtcaatgtgccagtcagattttaataaagtttgggctgaagtatattcaaaaaattatcacaagtctcttgactacggcagtttctattccaaacaacaaaacacaagaatctgaacacaaaagattaacgaaatcagtgagaagaatagaaagggggatgatgtgttacttgctatttctgctgggaataggtggccactagtaggcaagaagcagaggactgctggaaagcgttgggctctgaagaagcacaggcacccgcccgcctgggcttctggtaccatgccgccgcccttgcttgcgtcgagggcctccaagaaccgcaccacctcgtccatgtcagggcgcttctccgggctcgcgtcccagcacttgtgcatgatgttcgccatcgggcttgggcagcagcgacaggccgcaggttctgcacacacagaatgtcaggccgcaggttctggcacatgcatgttcagttcagtatgtggacgattaccagcagtgaatccaggaactgagaacaaacctgatgaacaacggcggatgatacgtctgcaaagctgaggtctgcatgtcacagatttcccacaagcatatgccaaagctgtacacatggcacttcctgttgtacggcttgccttcaagaacctgcagacgccgacagaaaaagaccaaacagttgctcaaaacacttgtcctggtacagaacggaaacacagcaacagtgattgctttttttttgtacagatctaaaacagtagcggaagtatagattatagtgaccccatttttttaaaagaatttaaaagtccctttttcatatatgtcttgcttaatgcttaccctctagcaagatccattgctatctgaacaacgactttgtacgcgagcttccttcgcctgttctttatcaaatactgtttcagtgttcc

SEQ ID NO: 30326 - DNA, 3898 bp, Zea Mays
cgcccagagtcgtcaacctccctgcgattccagcgcggtcagggggcgaacccgcccgatttctacggtgcggccttggaccaaattcttctctggcgtataaatccccaatcgtgcccgcctcttgctcaaccacctcgcaccgccaccaggggaccctcgtcaccgagaaagagagagccacgagggagagagggagtcttcttcgccgatctgcgctcatcggcgacgacaagggaaggaagggcaccggctctgtgtcagtatcccttcatcagtcactggaggtcaggcagagcatgttcgaggagatgcagcagataatgaagctacaaggctcgcaggccaagcaccaaggtttataggccagaatgggctaaatagttgctaggccggcctgtgtgccggagtataatatataagccaaacttagggcagagaaggggatgaaatgaacctgactctgaattctactatctactatcgtctccctgttcttcacctctattcatcttctttgtgttgtctgtctgtatctctccactcctgctattctattagtgatctattaggatagctaacaattggtatcagatatccaccgatcctcgaattccatcgttcctcgaccggaaaacatccatggcgtcttcttcaccggtccatactcagctcattcaagcgttggagcttcagacgcgcgccctcctctcggagttagacaagcgtctcgactccaagtgggggaccaaatgggaatcccgtgttggagcgatcgaatcgcgttccgccgattcgactcgcgccatgtccgatttctcctctgctcttcactccgacgtggaagcgcacctcacagcagctgacgccgccaccgactccaaccttctccagatcgaagccgagctggacccccgcgtgtcggcgctcaaatcctcagtgcacgccctcgatctgtggtgtcctcgcgtggattcatcgatcgaggggctccacgcgtcggtggatttcatcagcaccgaagtgtccaagatggggattctatggaaccacgacgtgtgtgtcgacgacttagccaggccgggcttgttcggagcacacagatcggcggcgtgcttcgacgcgtccgccagcgcgccgtccatcccagcctcggtcatcgccgacaactggggagggttcttcgacgatggcgagcagtactgcgcggcgctggacgcgctgcccaacagcatccactcagacctcctcaacacattcgcgcgtcacagccacgaccatctcttcgtcctcaaccccgtggccgcccaggattcctctgccgaggaggccatggccacgatggaagcagccgcggacgcgggggatcccgcgaggctcgtccagtcctctccgtccccttccctactcatcgcggggaacctgctgccaccctccctcacgatgccgcagctgcaagctgaggtggtggacaagcagtaccgcgtcgcgatgagtccaccgcctcctcttcccgtcgtcgacgagctgtaccgcgaagaggcaagtcctccgcctcccatccacgacgacgctgcaggggtgatgtccttggactcgagcgcgttcaaggtgctcgaccaaatgtccaagagcgcaagagccgacggtctagtggtgaacccgttcgaggagctggaaagcggctcgatggcacttctcgcggaggcgacgggcgaaaaggtgatcgtcgttgggtctgtcttgctatgccgctcaccaagtctctaccctcaatccatgtcgtgtgacacgaggcgatgcatggcgtggctggatgccaaggcgcccaagtctgtggtgtacgtgagcttcggcagtgccaaatgcatgccacccattcagctcaggcagctcggcatggcgtttgcctcatgcccctcgcctgtgctctggctcatcaaggacgctgactccctgcccaacaacatcaaggatttgctacacgagcacactgttgcagacgatgtcgcaggaagcaagtgcctggtggtgcgcggttgggcgctacacgtggccatcctggcccatcctgccagtgacggcttcatggcgctctgtggatggggctccactctggaggttgttgcagccggtcttcccatggctgcctggccctttttcgccgaacaatttatcaacgagcagctcatcatggacgtgcttggtattggattgtctgtcgctgtgatgaagccaattgaaaatgttttgattgccagtaacatgggtggtgctgttgtgatgatatatgctcctgttttttggtcttgcctgacaagcttcacacttggaatccatggtcagatagttggggttctatgtttgccatttctgatgcaacaagctagtctgtcttttgtcacgaagacaggatggctggtgattatcctttccttgctgctactccaatgggacaagccaaaccttcggggtcttaacaaatccaagtgcattcagcgtggcttccgtcgatgctatgtacatgcttgtccaagcaggtggtctgactggcttccgtcggccgagttttggtataatagctcgttccattctgctaccggtcgatctccttttgaggacttatatggttatgcacctcgccatttctgtattacttcatgtgatggtccctcagctggcctaaatgcattcttgcaagacaaactggttatgaccaaactgttacagcaacatcttttgcgcgccaagcaatagatgaagtctatggatgataagcaccgcactgagtgtgaatttgctgttggagatctgaaggccgtgggtgtgctaacgtcctggtatctccgttgctgcctgccactgactctgcttggcacattcatgaacagatattggagcgacatctggtcgtcccaaccttcctcgttggcaacatgggaagacttggaagcactcaagcacacctttcctcaggctccagcttgggggcaagctggttctcatggaggagggaatgtcagtatcccttcatcagtcactggaggtcaggcagagcatgttcgaggagatgcagcagataatgaagctacaaggctcgcaggccaagcaccaaggtttataggccagaatgggctaaatagttgctaggccggcctgtgtgccggagtataatatataagccaaacttagggcagagaaggggatgaaatgaacctgactctgaattctactatctactatcgtctccctgttcttcacctctattcatcttctttgtgttgtctgtctgtatctctccactcctgctattctattagtgatctattaggatagctaacactctgaccgcgttttggcatggggatttcgctgtgattgcgactttgtgccggtcaatggagtccgccgcaacaccgggtgagcgcatcggtgtcggccgcaagggaagggaggaaacctcgtctgggcagttcctcgcagccgtggacactcgccgtcatccacctagcgatcgactccacccccgttccgaactctcgggatcgtatctactgaatcctcaggctccagggatggttctcgacatggacgactacgtagacccctatgaggaggtcgtggccgaggacgactctgacaaccctgacaaggacgactcagatgcggagagcaactacaaggataagtcgttcgacctcctcaagtccgacaagcaccggttgcgcaacctggatgacaccttccgtggccccttctgcccctgcaagaagagcaggggtacaagagcaaggacctcctccagcacgctccgacgacatcgatgtctccaacaagcattgacatcacgaccacaaatgtttaggttatgtaatatcaccagtcgatcaatgaggac

SEQ ID NO: 30327 - DNA, 1717 bp, Zea Mays
tgggcccgtggcgtcaggcacgatccaaaattcctcgccaggcatgacggaagtgcgccgtgaatgggggaaggctcgttgccccttttccagaccgtgcggcccctataagctgtgacggggtcccgggtctccactttccctatctccgcgaccataggagcacagacgcaactgagtggggggccaatcatgggtgtgcgggtcggcggcgtggaaagcttggagtcgtcggcctcaaccgtgcctgcggagtctggtggtggtcggggagcttcgcgagaccacgtggaacgtgtacagatcgtcctcgggagcgattacctgctggcgtggaaggaattgctcaccatcgaccacgggcggccgtggaatcgtcgagcaccgtgggcggaactcggtgtgccgccagtgttgaagagacagtggctgaggatcccggtgttcagcagatagaagttgctgagcatgagctcattgaaggcaagttatgcccttgaccactttttacccaataatgttctttattatcacttatcaatgcatatgttaattttgatgggacccaataggtcaccctagtatatgattatcttttaccttgtttacccctaaatcatttgggtagtttgctattgctttatatggttttgggttaatatttcattatatccatgttccaattattctgttattttatttatgttcatgtcaagatcattatctttaattggaacatggagcttaacttgagaaacacgtgcgaccacaagggtggaatgggacgcccttggctgactaattaggaaagctagtggaagactaccttacccgaaaggggcaagggcagtaggggagttgcatgcagggaggttctcgggttgattttgctgcgatggcggtcagaagaggtattcatgcaagtgctcttcccataaattgtagcgggttttcggaagctagtggaactttgtaaaggccccgtagtgttaccatgcctcgcttccttggtagaggtgtatgggattcatgaccccttggtagatgggtaacatgacttgtgggtccagggtacaacctctgcagagtgtaaaactggtatactagccgagctcacggtcaagagcagctcaggactctcacatgattaaattatggaactaaattcaatttgtcatttgcattgcatgggatttattattaattttgttctattattatggtttggtatttacttacatctagtaattgctaataaaagtttgaccaacattaaaagcaacgctcaactttaaccattctctttgataagccttacacttcatgagctcccacctttggtgagttcatgccacattattccccacaacttgttgagcaatgaacatgtgtgagctcaaccttgctgtctcacaccccccacaggagaagaacaggtggttcaagaggagccacacaacgaggagttcaatttgatctaggtggcgtctcctagttgacttattggcgccaaggatgaactttagtttgttttatatttatcttttattctgtaagacttccgctatgtaataagtactttgattatattgtgacatttatctctatacactctgttattatatgtgttatcttctttggcgcatatatgagatgcacccggctttgtcccttaaatccgggtgtgacacttgatagttgttattataagaaaatc

SEQ ID NO: 30328 - DNA, 745 bp, Zea Mays
ggcccgtggcgtcaggcacgatccaaaattcctcgccaggcatgacggaagtgcgccgtgaatgggggaaggctcgttgccccttttccagaccgtgcggcccctataagctgtgacggggtcccgggtctccactttccctatctccgcgaccataggagcacagacgcaactgagtggggggccaatcatgggtgtgcgggtcggcggcgtggaaagcttggagtcgtcggcctcaaccgtgcctgcggagtctggtggtggtcggggagcttcgcgagaccacgtggaacgtgtacagatcgtcctcgggagcgattacctgctggcgtggaaggaattgctcaccatcgaccacgggcggccgtggaatcgtcgagcaccgtgggcggaactcggtgtgccgccagtgttggtaagattttccccatcagattcgtgattgttccttctgtgttttagaatcattagataggtcggggaaggctggggcgccgctgcaaccagtcatcgacgagatgctgtcgtggctgtttttgcgcgggcgctgtcggcaagcgggaggtagaagatgaagtcgttgccgtagatggcggcgtcaacggtgcagatgagtgcagcgaggtagtgtagcctggtcgggtgcctcggccgttgatcgagcaagtgacggtcccgattagatcgagatgctaattcgaggaggctgatctcggacgagtgaggatgagttgagggattttaa

SEQ ID NO: 30329 - DNA, 4516 bp, Zea Mays
ctttttggaagtttggctctgttttctctcaccgcctgttctcccccgcgcgcgatggcggcggctccggcgagcgtcggctgcggcggcgcgtactcttgcgagacggcggagcgtacccgcgagtggatgcaggcccacgtcgtcaactttttcaaggacaggctgtgggagctagtggacgccgagtggatggagtgcctccggcgggagcccgtcgagagcttgctcaagctgccatctggatgcgtccaggagcactggcctgctacactgcgagagtttgtgcttactgctaggtcgcttgtgattccacgggagcagaaggctccgcaatcgcttgtatctgacattcatgtagccccagttggcactgttctcgctcagggcatgaactcaaagaagaagcacgaagtagattgaaaatctagctgctgtggttcatgcaattgcaaagaggtgtggagccaagacagtggttgatgtaggttctggccagggttatctcgcacaggccttatcttttgagtaccaactccgtgttgtagcaatagatgcttcatcacaccatgcatcagttacaattgctcgtgcagaaagaataaagaagcactatgctgctaaatgtgtggagaagcaactgctcatggtacctagggcagtcacctgtcatgttctttctagtgacacattggcagcagtcacattagatgcatgtaaggatgacaatggagaacatgtgagagatactaaaacatctactaagaaaatcactcaaatccaggaatcaactcagggcacccctccattaatcctggctggtcttcatgcatgtggtgatctttcagttaacatgctaagagtttttgtgtcctgtgaacaagtaaaagcattggtaagcattggctgctgttacaacttgctttctgaggatacttatgaggacacagatacctgccctggttttcctatgagcaaggctgccaaacattctgaattggtacttgggaaaagcatccgtgaccttgcatgtcagagcgcagagagatggagaaatctcaccatggacattgcattgcaaaattttgatgtacatgccttccgagctgcatttcaaatggtacttgagaaatattttccagaagtgtcaaggttgagtccatcaattggaaggcaaggaaaagctcttcgacgtcagaggcttcgaaaagttgtggaatcacaaatgactacaaagaaaaatgatgatttctcctgttcaactttaaaggaacaaaacaagaacacaaacgatgttcatccagtcatacatgaagttgacacagggccagatgacatccatcagaacgcacatcaaaagttcatcctgttcaaagatttcacattatctggattaggtcgccttggctgtggctcagtggaagacacgagtcttcttgaaatatggaaggacgtgcaacccttctctgtaggaatatataggtcccttttggtgccttcgagctgctttaggtccactggtggaaacatatattttacttgatcggttattgtatcttcaagagcgaagcaacctagttgaagcattgctgtttcctctgtttgatcctaccatttctccaaggaacatggccgtaattgcttggaagttatgtgcaaattcttcagaagcatgacatggtaaatcttctgatgataggatatgcagttgatgggatggtgtgttggtaccaaactataagccagactattgtcttatggcagaacttcttcgatttagatacagttattgtattgctgtcccttttagaagggcaggcctgatacagaggtgagagctgtctcactgaatcaccaggtcacggtttcgaagcagcctctccgcatttgcgtgggaggcttgcctcggtttatcccttatccaagcctctagcactgggtgtgctttattttaattgtattgctgtcctcccatataaaaaaaacctgaagatagtattgtctttgaaattgtgagggcaatgcatttccctttcaaatcacctggtacatgtcttgtcccccccccccacttcccccagagcctgtctatatgtacttgatccgctttttttgcatcctagcttctcccggagtgtattttgttgcttgtgtgatgttcagatctttgaagaatgtgacaggctatctagcctacttgagacgttcagtatttctacaggtaagaaaggaaaactcaagtagacaagatcttccaaatctagttgcaagatattgcccttgaatagtgtgcctttatccactaaatgctaggtcaacaatctatccatggtgcttgcttgtttcctgaagtgatcatgaaacaagttgctatggaacgatgatgtctctctctctctctatatatatatatcctgcaatgtgtataaatgttctatgcaagtatgcaactatgtgagaacttgtgtacatattatccctcattatttttactgcttccattggttcagttgagcaggggttggcagttgaaacaagttatgtctgatccaagaaccagtgatctggagtcaattgagcaggggttggcaggggtcaaggggaggagggacagatcatgcctaaaccaaatgaactatttacctgcaaacctactgtgacgtgtcataaaagaaataaaatctaaccacgttgactacttacatgcaaatctacaaaaaaaatcaaaccctgcaggatctctgatgtgatgccatgccatgccaccaatgtgggtaggctggctgaaagacggaccagcagaagaggttgacttggaatttattgagcatgtgccgccgcccacgtggtttcatttcatcagcatggtttgtggttccgggtttgtcatcgctttgcttatacaaattttttttagtgcttcggtggtctgacttacttactgttcttgtcatatgaatagtctgtagaccaacctagcaaacctgtgagatgtttctgctcttttgctgcaggcttggcaccgtaaagaagaaaaaaaaaggagtttggtgaaatcactgccccaggaaaaccttccaggcgcaaaaatcctccatgttgaccgaccagccgtttatttgggcttattcaccactcgtggtcaagactcaataggaaggagggcatatgtgtcttcagaataattcctggaccaccggtagaccgataaaggccctgtactgaccgtgctctcaccatggtggtagctcatgagcaccaatctgtcatttgttctatcaactctgggcaatgattgattgatttttggccagccgctgtcacgagcacgacggcgcctgtacttgcgacgacgatgacgacgacggatcagcgtccagtggacagagccgtcgcagcccttccgtcctcgaacccttatccagatatgcgcacgcggaggtgcgcagcgaagccgccggtcaattccagctgcttttcaccgatgctgccagccagcagcgtcggagcggggggagaggtaacggacggacggcacacagctcttgacctggaagctccccgccctcgtgttgatggtagcgcaatatctcatggtgagacgagatctggagcgtcgtttttatcccactgtgcgcggaaaaggccttgcgcgtgcctggcgcgagctgattggctggtccaggttaaaagttactgcaaatggggggtgttaatgttattaggccgtgcagaaacggggacgagggtcgcgctgtcgctgtcaggcctccattcacttccgggtcgctctcagattggttgcataaattcccctcccgccgttgctgctgctgctgctgctgctgttcgttttcatcgcgaggccaggccttgcaggaacagttgggtgtctctacttagggcttgttcggttattcccaatacacatggattggatgggattggaaaaaattgtgaagaagtttgagttgagagctaaccgaacaagcccttacttgttggattggattggatagatccgcggaatggcatctctccatttgcgtgccgccatctactctattcttcttatcgccgccgccacccttttgggttctctctcggcaggaattatgtgccggaaaaggagttttaccgctttttttgttttgttttgttggtgggggagctcgcttgacttgtccaagatggacgtgagcctggaggagctttcggaggagaggagccacggccgcgctcactcgctgctgctgggtgctatgggttaggtcggtagtggcttttgataatgatcatgtgtgttgtacaccctacccgttggtgaggtgacttgactggcagaggaatctccgaatctggcagtggagactgcacacgggagacgggactactccctcccatgtgttggtcaattccagaagaccggccggtcctgtctggacacgggacctctgttttttttttgctttttacagtgtggtttacttgtttgtgcaatatatttttttaaaac

SEQ ID NO: 30330 - DNA, 4361 bp, Zea Mays
ctttttggaagtttggctctgttttctctcaccgcctgttctcccccgcgcgcgatggcggcggctccggcgagcgtcggctgcggcggcgcgtactcttgcgagacggcggagcgtacccgcgagtggatgcaggcccacgtcgtcaactttttcaaggacaggctgtgggagctagtggacgccgagtggatggagtgcctccggcgggagcccgtcgagagcttgctcaagctgccatctggatgcgtccaggagcactggcctgctacactgcgagagtttgtgcttactgctaggtcgcttgtgattccacgggagcagaaggctccgcaatcgcttgtatctgacattcatgtagccccagttggcactgttctcgctcagggcatgaactcaaagaagaagcacgaaattgaaaatctagctgctgtggttcatgcaattgcaaagaggtgtggagccaagacagtggttgatgtaggttctggccagggttatctcgcacaggccttatcttttgagtaccaactccgtgttgtagcaatagatgcttcatcacaccatgcatcagttacaattgctcgtgcagaaagaataaagaagcactatgctgctaaatgtgtggagaagcaactgctcatggtacctagggcagtcacctgtcatgttctttctagtgacacattggcagcagtcacattagatgcatgtaaggatgacaatggagaacatgtgagagatactaaaacatctactaagaaaatcactcaaatccaggaatcaactcagggcacccctccattaatcctggctggtcttcatgcatgtggtgatctttcagttaacatgctaagagtttttgtgtcctgtgaacaagtaaaagcattggtaagcattggctgctgttacaacttgctttctgaggatacttatgaggacacagatacctgccctggttttcctatgagcaaggctgccaaacattctgaattggtacttgggaaaagcatccgtgaccttgcatgtcagagcgcagagagatggagaaatctcaccatggacattgcattgcaaaattttgatgtacatgccttccgagctgcatttcaaatggtacttgagaaatattttccagaagtgtcaaggttgagtccatcaattggaaggcaaggaaaagctcttcgacgtcagaggcttcgaaaagttgtggaatcacaaatgactacaaagaaaaatgatgatttctcctgttcaactttaaaggaacaaaacaagaacacaaacgatgttcatccagtcatacatgaagttgacacagggccagatgacatccatcagaacgcacatcaaaagttcatcctgttcaaagatttcacattatctggattaggtcgccttggctgtggctcagtggaagacacgagtcttcttgaaatatggaaggacgtgcaacccttctctgaatatataggtcccttttggtgccttcgagctgctttaggtccactggtggaaacatatattttacttgatcggttattgtatcttcaagagcgaagcaacctagttgaagcattgctgtttcctctgtttgatcctaccatttctccaaggaacatggccgtaattgcttggaagttatgtgcaaattcttcagaagcatgacatggtaaatcttctgatgataggatatgcagttgatgggatggtgtgttggtaccaaactataagccagactattgtcttatggcagaacttcttcgatttagatacagttattgtattgctgtcccttttagaagggcaggcctgatacagaggtgagagctgtctcactgaatcaccaggtcacggtttcgaagcagcctctccgcatttgcgtgggaggcttgcctcggtttatcccttatccaagcctctagcactgggtgtgctttattttaattgtattgctgtcctcccatataaaaaaaacctgaagatagtattgtctttgaaattgtgagggcaatgcatttccctttcaaatcacctggtacatgtcttgtcccccccccccacttcccccagagcctgtctatatgtacttgatccgctttttttgcatcctagcttctcccggagtgtattttgttgcttgtgtgatgttcagatctttgaagaatgtgacaggctatctagcctacttgagacgttcagtatttctacaggtaagaaaggaaaactcaagtagacaagatcttccaaatctagttgcaagatattgcccttgaatagtgtgcctttatccactaaatgctaggtcaacaatctatccatggtgcttgcttgtttcctgaagtgatcatgaaacaagttgctatggaacgatgatgtctctctctctctctatatatatatatcctgcaatgtgtataaatgttctatgcaagtatgcaactatgtgagaacttgtgtacatattatccctcattatttttactgcttccattggttcagttgagcaggggttggcagttgaaacaagttatgtctgatccaagaaccagtgatctggagtcaattgagcaggggttggcaggggtcaaggggaggagggacagatcatgcctaaaccaaatgaactatttacctgcaaacctactgtgacgtgtcataaaagaaataaaatctaaccacgttgactacttacatgcaaatctacaaaaaaaatcaaaccctgcaggatctctgatgtgatgccatgccatgccaccaatgtgggtaggctggctgaaagacggaccagcagaagaggttgacttggaatttattgagcatgtgccgccgcccacgtggtttcatttcatcagcatggcttggcaccgtaaagaagaaaaaaaaaggagtttggtgaaatcactgccccaggaaaaccttccaggcgcaaaaatcctccatgttgaccgaccagccgtttatttgggcttattcaccactcgtggtcaagactcaataggaaggagggcatatgtgtcttcagaataattcctggaccaccggtagaccgataaaggccctgtactgaccgtgctctcaccatggtggtagctcatgagcaccaatctgtcatttgttctatcaactctgggcaatgattgattgatttttggccagccgctgtcacgagcacgacggcgcctgtacttgcgacgacgatgacgacgacggatcagcgtccagtggacagagccgtcgcagcccttccgtcctcgaacccttatccagatatgcgcacgcggaggtgcgcagcgaagccgccggtcaattccagctgcttttcaccgatgctgccagccagcagcgtcggagcggggggagaggtaacggacggacggcacacagctcttgacctggaagctccccgccctcgtgttgatggtagcgcaatatctcatggtgagacgagatctggagcgtcgtttttatcccactgtgcgcggaaaaggccttgcgcgtgcctggcgcgagctgattggctggtccaggttaaaagttactgcaaatggggggtgttaatgttattaggccgtgcagaaacggggacgagggtcgcgctgtcgctgtcaggcctccattcacttccgggtcgctctcagattggttgcataaattcccctcccgccgttgctgctgctgctgctgctgctgttcgttttcatcgcgaggccaggccttgcaggaacagttgggtgtctctacttagggcttgttcggttattcccaatacacatggattggatgggattggaaaaaattgtgaagaagtttgagttgagagctaaccgaacaagcccttacttgttggattggattggatagatccgcggaatggcatctctccatttgcgtgccgccatctactctattcttcttatcgccgccgccacccttttgggttctctctcggcaggaattatgtgccggaaaaggagttttaccgctttttttgttttgttttgttggtgggggagctcgcttgacttgtccaagatggacgtgagcctggaggagctttcggaggagaggagccacggccgcgctcactcgctgctgctgggtgctatgggttaggtcggtagtggcttttgataatgatcatgtgtgttgtacaccctacccgttggtgaggtgacttgactggcagaggaatctccgaatctggcagtggagactgcacacgggagacgggactactccctcccatgtgttggtcaattccagaagaccggccggtcctgtctggacacgggacctctgttttttttttgctttttacagtgtggtttacttgtttgtgcaatatatttttttaaaac

SEQ ID NO: 30331 - DNA, 4368 bp, Zea Mays
ctttttggaagtttggctctgttttctctcaccgcctgttctcccccgcgcgcgatggcggcggctccggcgagcgtcggctgcggcggcgcgtactcttgcgagacggcggagcgtacccgcgagtggatgcaggcccacgtcgtcaactttttcaaggacaggctgtgggagctagtggacgccgagtggatggagtgcctccggcgggagcccgtcgagagcttgctcaagctgccatctggatgcgtccaggagcactggcctgctacactgcgagagtttgtgcttactgctaggtcgcttgtgattccacgggagcagaaggctccgcaatcgcttgtatctgacattcatgtagccccagttggcactgttctcgctcagggcatgaactcaaagaagaagcacgaaattgaaaatctagctgctgtggttcatgcaattgcaaagaggtgtggagccaagacagtggttgatgtaggttctggccagggttatctcgcacaggccttatcttttgagtaccaactccgtgttgtagcaatagatgcttcatcacaccatgcatcagttacaattgctcgtgcagaaagaataaagaagcactatgctgctaaatgtgtggagaagcaactgctcatggtacctagggcagtcacctgtcatgttctttctagtgacacattggcagcagtcacattagatgcatgtaaggatgacaatggagaacatgtgagagatactaaaacatctactaagaaaatcactcaaatccaggaatcaactcagggcacccctccattaatcctggctggtcttcatgcatgtggtgatctttcagttaacatgctaagagtttttgtgtcctgtgaacaagtaaaagcattggtaagcattggctgctgttacaacttgctttctgaggatacttatgaggacacagatacctgccctggttttcctatgagcaaggctgccaaacattctgaattggtacttgggaaaagcatccgtgaccttgcatgtcagagagatggagaaatctcaccatggacattgcattgcaaaattttgatgtacatgccttccgagctgcatttcaaatggtacttgagaaatattttccagaagtgtcaaggttgagtccatcaattggaaggcaaggaaaagctcttcgacgtcagaggcttcgaaaagttgtggaatcacaaatgactacaaagaaaaatgatgatttctcctgttcaactttaaaggaacaaaacaagaacacaaacgatgttcatccagtcatacatgaagttgacacagggccagatgacatccatcagaacgcacatcaaaagttcatcctgttcaaagatttcacattatctggattaggtcgccttggctgtggctcagtggaagacacgagtcttcttgaaatatggaaggacgtgcaacccttctctgaatatataggtcccttttggtgccttcgagctgctttaggtccactggtggaaacatatattttacttgatcggttattgtatcttcaagagcgaagcaacctagttgaagcattgctgtttcctctgtttgatcctaccatttctccaaggaacatggccgtaattgcttggaagttatgtgcaaattcttcagaagcatgacatggtaaatcttctgatgataggatatgcagttgatgggatggtgtgttggtaccaaactataagccagactattgtcttatggcagaacttcttcgatttagatacagttattgtattgctgtcccttttagaagggcaggcctgatacagaggtgagagctgtctcactgaatcaccaggtcacggtttcgaagcagcctctccgcatttgcgtgggaggcttgcctcggtttatcccttatccaagcctctagcactgggtgtgctttattttaattgtattgctgtcctcccatataaaaaaaacctgaagatagtattgtctttgaaattgtgagggcaatgcatttccctttcaaatcacctggtacatgtcttgtcccccccccccacttcccccagagcctgtctatatgtacttgatccgctttttttgcatcctagcttctcccggagtgtattttgttgcttgtgtgatgttcagatctttgaagaatgtgacaggctatctagcctacttgagacgttcagtatttctacaggtaagaaaggaaaactcaagtagacaagatcttccaaatctagttgcaagatattgcccttgaatagtgtgcctttatccactaaatgctaggtcaacaatctatccatggtgcttgcttgtttcctgaagtgatcatgaaacaagttgctatggaacgatgatgtctctctctctctctatatatatatatcctgcaatgtgtataaatgttctatgcaagtatgcaactatgtgagaacttgtgtacatattatccctcattatttttactgcttccattggttcagttgagcaggggttggcagttgaaacaagttatgtctgatccaagaaccagtgatctggagtcaattgagcaggggttggcaggggtcaaggggaggagggacagatcatgcctaaaccaaatgaactatttacctgcaaacctactgtgacgtgtcataaaagaaataaaatctaaccacgttgactacttacatgcaaatctacaaaaaaaatcaaaccctgcaggatctctgatgtgatgccatgccatgccaccaatgtgggtaggctggctgaaagacggaccagcagaagaggttgacttggaatttattgagcatgtgccgccgcccacgtggtttcatttcatcagcatggtttgtggttccgggcttggcaccgtaaagaagaaaaaaaaaggagtttggtgaaatcactgccccaggaaaaccttccaggcgcaaaaatcctccatgttgaccgaccagccgtttatttgggcttattcaccactcgtggtcaagactcaataggaaggagggcatatgtgtcttcagaataattcctggaccaccggtagaccgataaaggccctgtactgaccgtgctctcaccatggtggtagctcatgagcaccaatctgtcatttgttctatcaactctgggcaatgattgattgatttttggccagccgctgtcacgagcacgacggcgcctgtacttgcgacgacgatgacgacgacggatcagcgtccagtggacagagccgtcgcagcccttccgtcctcgaacccttatccagatatgcgcacgcggaggtgcgcagcgaagccgccggtcaattccagctgcttttcaccgatgctgccagccagcagcgtcggagcggggggagaggtaacggacggacggcacacagctcttgacctggaagctccccgccctcgtgttgatggtagcgcaatatctcatggtgagacgagatctggagcgtcgtttttatcccactgtgcgcggaaaaggccttgcgcgtgcctggcgcgagctgattggctggtccaggttaaaagttactgcaaatggggggtgttaatgttattaggccgtgcagaaacggggacgagggtcgcgctgtcgctgtcaggcctccattcacttccgggtcgctctcagattggttgcataaattcccctcccgccgttgctgctgctgctgctgctgctgttcgttttcatcgcgaggccaggccttgcaggaacagttgggtgtctctacttagggcttgttcggttattcccaatacacatggattggatgggattggaaaaaattgtgaagaagtttgagttgagagctaaccgaacaagcccttacttgttggattggattggatagatccgcggaatggcatctctccatttgcgtgccgccatctactctattcttcttatcgccgccgccacccttttgggttctctctcggcaggaattatgtgccggaaaaggagttttaccgctttttttgttttgttttgttggtgggggagctcgcttgacttgtccaagatggacgtgagcctggaggagctttcggaggagaggagccacggccgcgctcactcgctgctgctgggtgctatgggttaggtcggtagtggcttttgataatgatcatgtgtgttgtacaccctacccgttggtgaggtgacttgactggcagaggaatctccgaatctggcagtggagactgcacacgggagacgggactactccctcccatgtgttggtcaattccagaagaccggccggtcctgtctggacacgggacctctgttttttttttgctttttacagtgtggtttacttgtttgtgcaatatatttttttaaaac

SEQ ID NO: 30332 - DNA, 4526 bp, Zea Mays
ctttttggaagtttggctctgttttctctcaccgcctgttctcccccgcgcgcgatggcggcggctccggcgagcgtcggctgcggcggcgcgtactcttgcgagacggcggagcgtacccgcgagtggatgcaggcccacgtcgtcaactttttcaaggacaggctgtgggagctagtggacgccgagtggatggagtgcctccggcgggagcccgtcgagagcttgctcaagctgccatctggatgcgtccaggagcactggcctgctacactgcgagagtttgtgcttactgctaggtcgcttgtgattccacgggagcagaaggctccgcaatcgcttgtatctgacattcatgtagccccagttggcactgttctcgctcagggcatgaactcaaagaagaagcacgaagtagattgaaaatctagctgctgtggttcatgcaattgcaaagaggtgtggagccaagacagtggttgatgtaggttctggccagggttatctcgcacaggccttatcttttgagtaccaactccgtgttgtagcaatagatgcttcatcacaccatgcatcagttacaattgctcgtgcagaaagaataaagaagcactatgctgctaaatgtgtggagaagcaactgctcatggtacctagggcagtcacctgtcatgttctttctagtgacacattggcagcagtcacattagatgcatgtaaggatgacaatggagaacatgtgagagatactaaaacatctactaagaaaatcactcaaatccaggaatcaactcagggcacccctccattaatcctggctggtcttcatgcatgtggtgatctttcagttaacatgctaagagtttttgtgtcctgtgaacaagtaaaagcattggtaagcattggctgctgttacaacttgctttctgaggatacttatgaggacacagatacctgccctggttttcctatgagcaaggctgccaaacattctgaattggtacttgggaaaagcatccgtgaccttgcatgtcagagcgcagagagatggagaaatctcaccatggacattgcattgcaaaattttgatgtacatgccttccgagctgcatttcaaatggtacttgagaaatattttccagaagtgtcaaggttgagtccatcaattggaaggcaaggaaaagctcttcgacgtcagaggcttcgaaaagttgtggaatcacaaatgactacaaagaaaaatgatgatttctcctgttcaactttaaaggaacaaaacaagaacacaaacgatgttcatccagtcatacatgaagttgacacagggccagatgacatccatcagaacgcacatcaaaagttcatcctgttcaaagatttcacattatctggattaggtcgccttggctgtggctcagtggaagacacgagtcttcttgaaatatggaaggacgtgcaacccttctctgtcccttttggtgccttcgagctgctttaggtccactggtggaaacatatattttacttgatcggttattgtatcttcaagagcgaagcaacctagttgaagcattgctgtttcctctgtttgatcctaccatttctccaaggaacatggccgtaattgcttggaagttatgtgcaaattcttcagaagcatgacatggtaaatcttctgatgataggatatgcagttgatgggatggtgtgttggtaccaaactataagccagactattgtcttatggcagaacttcttcgatttagatacagttattgtattgctgtcccttttagaagggcaggcctgatacagaggtgagagctgtctcactgaatcaccaggtcacggtttcgaagcagcctctccgcatttgcgtgggaggcttgcctcggtttatcccttatccaagcctctagcactgggtgtgctttattttaattgtattgctgtcctcccatataaaaaaaacctgaagatagtattgtctttgaaattgtgagggcaatgcatttccctttcaaatcacctggtacatgtcttgtcccccccccccacttcccccagagcctgtctatatgtacttgatccgctttttttgcatcctagcttctcccggagtgtattttgttgcttgtgtgatgttcagatctttgaagaatgtgacaggctatctagcctacttgagacgttcagtatttctacaggtaagaaaggaaaactcaagtagacaagatcttccaaatctagttgcaagatattgcccttgaatagtgtgcctttatccactaaatgctaggtcaacaatctatccatggtgcttgcttgtttcctgaagtgatcatgaaacaagttgctatggaacgatgatgtctctctctctctctatatatatatatcctgcaatgtgtataaatgttctatgcaagtatgcaactatgtgagaacttgtgtacatattatccctcattatttttactgcttccattggttcagttgagcaggggttggcagttgaaacaagttatgtctgatccaagaaccagtgatctggagtcaattgagcaggggttggcaggggtcaaggggaggagggacagatcatgcctaaaccaaatgaactatttacctgcaaacctactgtgacgtgtcataaaagaaataaaatctaaccacgttgactacttacatgcaaatctacaaaaaaaatcaaaccctgcaggatctctgatgtgatgccatgccatgccaccaatgtgggtaggctggctgaaagacggaccagcagaagaggttgacttggaatttattgagcatgtgccgccgcccacgtggtttcatttcatcagcatggtttgtggttccgggtttgtcatcgctttgcttatacaaattttttttagtgcttcggtggtctgacttacttactgttcttgtcatatgaatagtctgtagaccaacctagcaaacctgtgagatgtttctgctcttttgctgcaggcttggcaccgtaaagaagaaaaaaaaaggagtttggtgaaatcactgccccaggaaaaccttccaggcgcaaaaatcctccatgttgaccgaccagccgtttatttgggcttattcaccactcgtggtcaagactcaataggaaggagggcatatgtgtcttcagaataattcctggaccaccggtagaccgataaaggccctgtactgaccgtgctctcaccatggtggtagctcatgagcaccaatctgtcatttgttctatcaactctgggcaatgattgattggttggttttacttccatgtgtcaaatttttggccagccgctgtcacgagcacgacggcgcctgtacttgcgacgacgatgacgacgacggatcagcgtccagtggacagagccgtcgcagcccttccgtcctcgaacccttatccagatatgcgcacgcggaggtgcgcagcgaagccgccggtcaattccagctgcttttcaccgatgctgccagccagcagcgtcggagcggggggagaggtaacggacggacggcacacagctcttgacctggaagctccccgccctcgtgttgatggtagcgcaatatctcatggtgagacgagatctggagcgtcgtttttatcccactgtgcgcggaaaaggccttgcgcgtgcctggcgcgagctgattggctggtccaggttaaaagttactgcaaatggggggtgttaatgttattaggccgtgcagaaacggggacgagggtcgcgctgtcgctgtcaggcctccattcacttccgggtcgctctcagattggttgcataaattcccctcccgccgttgctgctgctgctgctgctgctgttcgttttcatcgcgaggccaggccttgcaggaacagttgggtgtctctacttagggcttgttcggttattcccaatacacatggattggatgggattggaaaaaattgtgaagaagtttgagttgagagctaaccgaacaagcccttacttgttggattggattggatagatccgcggaatggcatctctccatttgcgtgccgccatctactctattcttcttatcgccgccgccacccttttgggttctctctcggcaggaattatgtgccggaaaaggagttttaccgctttttttgttttgttttgttggtgggggagctcgcttgacttgtccaagatggacgtgagcctggaggagctttcggaggagaggagccacggccgcgctcactcgctgctgctgggtgctatgggttaggtcggtagtggcttttgataatgatcatgtgtgttgtacaccctacccgttggtgaggtgacttgactggcagaggaatctccgaatctggcagtggagactgcacacgggagacgggactactccctcccatgtgttggtcaattccagaagaccggccggtcctgtctggacacgggacctctgttttttttttgctttttacagtgtggtttacttgtttgtgcaatatatttttttaaaac

SEQ ID NO: 30333 - DNA, 4402 bp, Zea Mays
ctttttggaagtttggctctgttttctctcaccgcctgttctcccccgcgcgcgatggcggcggctccggcgagcgtcggctgcggcggcgcgtactcttgcgagacggcggagcgtacccgcgagtggatgcaggccctggccactttcctcggccgccaccgtccgctcctcgaggcccacgtcgtcaactttttcaaggctgtgggagctagtggacgccgagtggatggagtgcctccggcgggagcccgtcgagagcttgctcaagctgccatctggatgcgtccaggagcactggcctgctacactgcgagagtttgtgcttactgctaggtcgcttgtgattccacgggagcagaaggctccgcaatcgcttgtatctgacattcatgtagccccagttggcactgttctcgctcagggcatgaactcaaagaagaagcacgaagtagattgaaaatctagctgctgtggttcatgcaattgcaaagaggtgtggagccaagacagtggttgatgtaggttctggccagggttatctcgcacaggccttatcttttgagtaccaactccgtgttgtagcaatagatgcttcatcacaccatgcatcagttacaattgctcgtgcagaaagaataaagaagcactatgctgctaaatgtgtggagaagcaactgctcatggtacctagggcagtcacctgtcatgttctttctagtgacacattggcagcagtcacattagatgcatgtaaggatgacaatggagaacatgtgagagatactaaaacatctactaagaaaatcactcaaatccaggaatcaactcagggcacccctccattaatcctggctggtcttcatgcatgtggtgatctttcagttaacatgctaagagtttttgtgtcctgtgaacaagtaaaagcattggtaagcattggctgctgttacaacttgctttctgaggatacttatgaggacacagatacctgccctggttttcctatgagcaaggctgccaaacattctgaattggtacttgggaaaagcatccgtgaccttgcatgtcagagcgcagagagatggagaaatctcaccatggacattgcattgcaaaattttgatgtacatgccttccgagctgcatttcaaatggtacttgagaaatattttccagaagtgtcaaggttgagtccatcaattggaaggcaaggaaaagctcttcgacgtcagaggcttcgaaaagttgtggaatcacaaatgactacaaagaaaaatgatgatttctcctgttcaactttaaaggaacaaaacaagaacacaaacgatgttcatccagtcatacatgaagttgacacagggccagatgacatccatcagaacgcacatcaaaagttcatcctgttcaaagatttcacattatctggattaggtcgccttggctgtggctcagtggaagacacgagtcttcttgaaatatggaaggacgtgcaacccttctctgaatatataggtcccttttggtgccttcgagctgctttaggtccactggtggaaacatatattttacttgatcggttattgtatcttcaagagcgaagcaacctagttgaagcattgctgtttcctctgtttgatcctaccatttctccaaggaacatggccgtaattgcttggaagttatgtgcaaattcttcagaagcatgacatggtaaatcttctgatgataggatatgcagttgatgggatggtgtgttggtaccaaactataagccagactattgtcttatggcagaacttcttcgatttagatacagttattgtattgctgtcccttttagaagggcaggcctgatacagaggtgagagctgtctcactgaatcaccaggtcacggtttcgaagcagcctctccgcatttgcgtgggaggcttgcctcggtttatcccttatccaagcctctagcactgggtgtgctttattttaattgtattgctgtcctcccatataaaaaaaacctgaagatagtattgtctttgaaattgtgagggcaatgcatttccctttcaaatcacctggtacatgtcttgtcccccccccccacttcccccagagcctgtctatatgtacttgatccgctttttttgcatcctagcttctcccggagtgtattttgttgcttgtgtgatgttcagatctttgaagaatgtgacaggctatctagcctacttgagacgttcagtatttctacaggtaagaaaggaaaactcaagtagacaagatcttccaaatctagttgcaagatattgcccttgaatagtgtgcctttatccactaaatgctaggtcaacaatctatccatggtgcttgcttgtttcctgaagtgatcatgaaacaagttgctatggaacgatgatgtctctctctctctctatatatatatatcctgcaatgtgtataaatgttctatgcaagtatgcaactatgtgagaacttgtgtacatattatccctcattatttttactgcttccattggttcagttgagcaggggttggcagttgaaacaagttatgtctgatccaagaaccagtgatctggagtcaattgagcaggggttggcaggggtcaaggggaggagggacagatcatgcctaaaccaaatgaactatttacctgcaaacctactgtgacgtgtcataaaagaaataaaatctaaccacgttgactacttacatgcaaatctacaaaaaaaatcaaaccctgcaggatctctgatgtgatgccatgccatgccaccaatgtgggtaggctggctgaaagacggaccagcagaagaggttgacttggaatttattgagcatgtgccgccgcccacgtggtttcatttcatcagcatggcttggcaccgtaaagaagaaaaaaaaaggagtttggtgaaatcactgccccaggaaaaccttccaggcgcaaaaatcctccatgttgaccgaccagccgtttatttgggcttattcaccactcgtggtcaagactcaataggaaggagggcatatgtgtcttcagaataattcctggaccaccggtagaccgataaaggccctgtactgaccgtgctctcaccatggtggtagctcatgagcaccaatctgtcatttgttctatcaactctgggcaatgattgattgatttttggccagccgctgtcacgagcacgacggcgcctgtacttgcgacgacgatgacgacgacggatcagcgtccagtggacagagccgtcgcagcccttccgtcctcgaacccttatccagatatgcgcacgcggaggtgcgcagcgaagccgccggtcaattccagctgcttttcaccgatgctgccagccagcagcgtcggagcggggggagaggtaacggacggacggcacacagctcttgacctggaagctccccgccctcgtgttgatggtagcgcaatatctcatggtgagacgagatctggagcgtcgtttttatcccactgtgcgcggaaaaggccttgcgcgtgcctggcgcgagctgattggctggtccaggttaaaagttactgcaaatggggggtgttaatgttattaggccgtgcagaaacggggacgagggtcgcgctgtcgctgtcaggcctccattcacttccgggtcgctctcagattggttgcataaattcccctcccgccgttgctgctgctgctgctgctgctgttcgttttcatcgcgaggccaggccttgcaggaacagttgggtgtctctacttagggcttgttcggttattcccaatacacatggattggatgggattggaaaaaattgtgaagaagtttgagttgagagctaaccgaacaagcccttacttgttggattggattggatagatccgcggaatggcatctctccatttgcgtgccgccatctactctattcttcttatcgccgccgccacccttttgggttctctctcggcaggaattatgtgccggaaaaggagttttaccgctttttttgttttgttttgttggtgggggagctcgcttgacttgtccaagatggacgtgagcctggaggagctttcggaggagaggagccacggccgcgctcactcgctgctgctgggtgctatgggttaggtcggtagtggcttttgataatgatcatgtgtgttgtacaccctacccgttggtgaggtgacttgactggcagaggaatctccgaatctggcagtggagactgcacacgggagacgggactactccctcccatgtgttggtcaattccagaagaccggccggtcctgtctggacacgggacctctgttttttttttgctttttacagtgtggtttacttgtttgtgcaatatatttttttaaaac

SEQ ID NO: 30334 - DNA, 4495 bp, Zea Mays
ctttttggaagtttggctctgttttctctcaccgcctgttctcccccgcgcgcgatggcggcggctccggcgagcgtcggctgcggcggcgcgtactcttgcgagacggcggagcgtacccgcgagtggatgcaggcccacgtcgtcaactttttcaaggacaggctgtgggagctagtggacgccgagtggatggagtgcctccggcgggagcccgtcgagagcttgctcaagctgccatctggatgcgtccaggagcactggcctgctacactgcgagagtttgtgcttactgctaggtcgcttgtgattccacgggagcagaaggctccgcaatcgcttgtatctgacattcatgtagccccagttggcactgttctcgctcagggcatgaactcaaagaagaagcacgaagtagattgaaaatctagctgctgtggttcatgcaattgcaaagaggtgtggagccaagacagtggttgatgtaggttctggccagggttatctcgcacaggccttatcttttgagtaccaactccgtgttgtagcaatagatgcttcatcacaccatgcatcagttacaattgctcgtgcagaaagaataaagaagcactatgctgctaaatgtgtggagaagcaactgctcatggtacctagggcagtcacctgtcatgttctttctagtgacacattggcagcagtcacattagatgcatgtaaggatgacaatggagaacatgtgagagatactaaaacatctactaagaaaatcactcaaatccaggaatcaactcagggcacccctccattaatcctggctggtcttcatgcatgtggtgatctttcagttaacatgctaagagtttttgtgtcctgtgaacaagtaaaagcattggtaagcattggctgctgttacaacttgctttctgaggatacttatgaggacacagatacctgccctggttttcctatgagcaaggctgccaaacattctgaattggtacttgggaaaagcatccgtgaccttgcatgtcagagagatggagaaatctcaccatggacattgcattgcaaaattttgatgtacatgccttccgagctgcatttcaaatggtacttgagaaatattttccagaagtgtcaaggttgagtccatcaattggaaggcaaggaaaagctcttcgacgtcagaggcttcgaaaagttgtggaatcacaaatgactacaaagaaaaatgatgatttctcctgttcaactttaaaggaacaaaacaagaacacaaacgatgttcatccagtcatacatgaagttgacacagggccagatgacatccatcagaacgcacatcaaaagttcatcctgttcaaagatttcacattatctggattaggtcgccttggctgtggctcagtggaagacacgagtcttcttgaaatatggaaggacgtgcaacccttctctgtcccttttggtgccttcgagctgctttaggtccactggtggaaacatatattttacttgatcggttattgtatcttcaagagcgaagcaacctagttgaagcattgctgtttcctctgtttgatcctaccatttctccaaggaacatggccgtaattgcttggaagttatgtgcaaattcttcagaagcatgacatggtaaatcttctgatgataggatatgcagttgatgggatggtgtgttggtaccaaactataagccagactattgtcttatggcagaacttcttcgatttagatacagttattgtattgctgtcccttttagaagggcaggcctgatacagaggtgagagctgtctcactgaatcaccaggtcacggtttcgaagcagcctctccgcatttgcgtgggaggcttgcctcggtttatcccttatccaagcctctagcactgggtgtgctttattttaattgtattgctgtcctcccatataaaaaaaacctgaagatagtattgtctttgaaattgtgagggcaatgcatttccctttcaaatcacctggtacatgtcttgtcccccccccccacttcccccagagcctgtctatatgtacttgatccgctttttttgcatcctagcttctcccggagtgtattttgttgcttgtgtgatgttcagatctttgaagaatgtgacaggctatctagcctacttgagacgttcagtatttctacaggtaagaaaggaaaactcaagtagacaagatcttccaaatctagttgcaagatattgcccttgaatagtgtgcctttatccactaaatgctaggtcaacaatctatccatggtgcttgcttgtttcctgaagtgatcatgaaacaagttgctatggaacgatgatgtctctctctctctctatatatatatatcctgcaatgtgtataaatgttctatgcaagtatgcaactatgtgagaacttgtgtacatattatccctcattatttttactgcttccattggttcagttgagcaggggttggcagttgaaacaagttatgtctgatccaagaaccagtgatctggagtcaattgagcaggggttggcaggggtcaaggggaggagggacagatcatgcctaaaccaaatgaactatttacctgcaaacctactgtgacgtgtcataaaagaaataaaatctaaccacgttgactacttacatgcaaatctacaaaaaaaatcaaaccctgcaggatctctgatgtgatgccatgccatgccaccaatgtgggtaggctggctgaaagacggaccagcagaagaggttgacttggaatttattgagcatgtgccgccgcccacgtggtttcatttcatcagcatggtttgtggttccgggtttgtcatcgctttgcttatacaaattttttttagtgcttcggtggtctgacttacttactgttcttgtcatatgaatagtctgtagaccaacctagcaaacctgtgagatgtttctgctcttttgctgcaggcttggcaccgtaaagaagaaaaaaaaaggagtttggtgaaatcactgccccaggaaaaccttccaggcgcaaaaatcctccatgttgaccgaccagccgtttatttgggcttattcaccactcgtggtcaagactcaataggaaggagggcatatgtgtcttcagaataattcctggaccaccggtagaccgataaaggccctgtactgaccgtgctctcaccatggtggtagctcatgagcaccaatctgtcatttgttctatcaactctgggcaatgattgattgatttttggccagccgctgtcacgagcacgacggcgcctgtacttgcgacgacgatgacgacgacggatcagcgtccagtggacagagccgtcgcagcccttccgtcctcgaacccttatccagatatgcgcacgcggaggtgcgcagcgaagccgccggtcaattccagctgcttttcaccgatgctgccagccagcagcgtcggagcggggggagaggtaacggacggacggcacacagctcttgacctggaagctccccgccctcgtgttgatggtagcgcaatatctcatggtgagacgagatctggagcgtcgtttttatcccactgtgcgcggaaaaggccttgcgcgtgcctggcgcgagctgattggctggtccaggttaaaagttactgcaaatggggggtgttaatgttattaggccgtgcagaaacggggacgagggtcgcgctgtcgctgtcaggcctccattcacttccgggtcgctctcagattggttgcataaattcccctcccgccgttgctgctgctgctgctgctgctgttcgttttcatcgcgaggccaggccttgcaggaacagttgggtgtctctacttagggcttgttcggttattcccaatacacatggattggatgggattggaaaaaattgtgaagaagtttgagttgagagctaaccgaacaagcccttacttgttggattggattggatagatccgcggaatggcatctctccatttgcgtgccgccatctactctattcttcttatcgccgccgccacccttttgggttctctctcggcaggaattatgtgccggaaaaggagttttaccgctttttttgttttgttttgttggtgggggagctcgcttgacttgtccaagatggacgtgagcctggaggagctttcggaggagaggagccacggccgcgctcactcgctgctgctgggtgctatgggttaggtcggtagtggcttttgataatgatcatgtgtgttgtacaccctacccgttggtgaggtgacttgactggcagaggaatctccgaatctggcagtggagactgcacacgggagacgggactactccctcccatgtgttggtcaattccagaagaccggccggtcctgtctggacacgggacctctgttttttttttgctttttacagtgtggtttacttgtttgtgcaatatatttttttaaaac

SEQ ID NO: 30335 - DNA, 3164 bp, Zea Mays
ctttttggaagtttggctctgttttctctcaccgcctgttctcccccgcgcgcgatggcggcggctccggcgagcgtcggctgcggcggcgcgtactcttgcgagacggcggagcgtacccgcgagtggatgcaggcccacgtcgtcaactttttcaaggacaggctgtgggagctagtggacgccgagtggatggagtgcctccggcgggagcccgtcgagagcttgctcaagctgccatctggatgcgtccaggagcactggcctgctacactgcgagagtttgtgcttactgctaggtcgcttgtgattccacgggagcagaaggctccgcaatcgcttgtatctgacattcatgtagccccagttggcactgttctcgctcagggcatgaactcaaagaagaagcacgaaattgaaaatctagctgctgtggttcatgcaattgcaaagaggtgtggagccaagacagtggttgatgtaggttctggccagggttatctcgcacaggccttatcttttgagtaccaactccgtgttgtagcaatagatgcttcatcacaccatgcatcagttacaattgctcgtgcagaaagaataaagaagcactatgctgctaaatgtgtggagaagcaactgctcatggtacctagggcagtcacctgtcatgttctttctagtgacacattggcagcagtcacattagatgcatgtaaggatgacaatggagaacatgtgagagatactaaaacatctactaagaaaatcactcaaatccaggaatcaactcagggcacccctccattaatcctggctggtcttcatgcatgtggtgatctttcagttaacatgctaagagtttttgtgtcctgtgaacaagtaaaagcattggtaagcattggctgctgttacaacttgctttctgaggatacttatgaggacacagatacctgccctggttttcctatgagcaaggctgccaaacattctgaattggtacttgggaaaagcatccgtgaccttgcatgtcagagcgcagagagatggagaaatctcaccatggacattgcattgcaaaattttgatgtacatgccttccgagctgcatttcaaatggtacttgagaaatattttccagaagtgtcaaggttgagtccatcaattggaaggcaaggaaaagctcttcgacgtcagaggcttcgaaaagttgtggaatcacaaatgactacaaagaaaaatgatgatttctcctgttcaactttaaaggaacaaaacaagaacacaaacgatgttcatccagtcatacatgaagttgacacagggccagatgacatccatcagaacgcacatcaaaagttcatcctgttcaaagatttcacattatctggattaggtcgccttggctgtggctcagtggaagacacgagtcttcttgaaatatggaaggacgtgcaacccttctctgtcccttttggtgccttcgagctgctttaggtccactggtggaaacatatattttacttgatcggttattgtatcttcaagagcgaagcaacctagttgaagcattgctgtttcctctgtttgatcctaccatttctccaaggaacatggccgtaattgcttggaagttatgtgcaaattcttcagaagcatgacatggcttggcaccgtaaagaagaaaaaaaaaggagtttggtgaaatcactgccccaggaaaaccttccaggcgcaaaaatcctccatgttgaccgaccagccgtttatttgggcttattcaccactcgtggtcaagactcaataggaaggagggcatatgtgtcttcagaataattcctggaccaccggtagaccgataaaggccctgtactgaccgtgctctcaccatggtggtagctcatgagcaccaatctgtcatttgttctatcaactctgggcaatgattgattgatttttggccagccgctgtcacgagcacgacggcgcctgtacttgcgacgacgatgacgacgacggatcagcgtccagtggacagagccgtcgcagcccttccgtcctcgaacccttatccagatatgcgcacgcggaggtgcgcagcgaagccgccggtcaattccagctgcttttcaccgatgctgccagccagcagcgtcggagcggggggagaggtaacggacggacggcacacagctcttgacctggaagctccccgccctcgtgttgatggtagcgcaatatctcatggtgagacgagatctggagcgtcgtttttatcccactgtgcgcggaaaaggccttgcgcgtgcctggcgcgagctgattggctggtccaggttaaaagttactgcaaatggggggtgttaatgttattaggccgtgcagaaacggggacgagggtcgcgctgtcgctgtcaggcctccattcacttccgggtcgctctcagattggttgcataaattcccctcccgccgttgctgctgctgctgctgctgctgttcgttttcatcgcgaggccaggccttgcaggaacagttgggtgtctctacttagggcttgttcggttattcccaatacacatggattggatgggattggaaaaaattgtgaagaagtttgagttgagagctaaccgaacaagcccttacttgttggattggattggatagatccgcggaatggcatctctccatttgcgtgccgccatctactctattcttcttatcgccgccgccacccttttgggttctctctcggcaggaattatgtgccggaaaaggagttttaccgctttttttgttttgttttgttggtgggggagctcgcttgacttgtccaagatggacgtgagcctggaggagctttcggaggagaggagccacggccgcgctcactcgctgctgctgggtgctatgggttaggtcggtagtggcttttgataatgatcatgtgtgttgtacaccctacccgttggtgaggtgacttgactggcagaggaatctccgaatctggcagtggagactgcacacgggagacgggactactccctcccatgtgttggtcaattccagaagaccggccggtcctgtctggacacgggacctctgttttttttttgctttttacagtgtggtttacttgtttgtgcaatatatttttttaaaac

SEQ ID NO: 30336 - DNA, 3276 bp, Zea Mays
caaggaattcagtgccaaacatttagatgtttttgctgtaggtacttgagaaatattttccagaagtgtcaaggttgagtccatcaattggaaggcaaggaaaagctcttcgacgtcagaggcttcgaaaagttgtggaatcacaaatgactacaaagaaaaatgatgatttctcctgttcaactttaaaggaacaaaacaagaacacaaacgatgttcatccagtcatacatgaagttgacacagggccagatgacatccatcagaacgcacatcaaaagttcatcctgttcaaagatttcacattatctggattaggtcgccttggctgtggctcagtggaagacacgagtcttcttgaaatatggaaggacgtgcaacccttctctgtcccttttggtgccttcgagctgctttaggtccactggtggaaacatatattttacttgatcggttattgtatcttcaagagcgaagcaacctagttgaagcattgctgtttcctctgtttgatcctaccatttctccaaggaacatggccgtaattgcttggaagttatgtgcaaattcttcagaagcatgacatggtaaatcttctgatgataggatatgcagttgatgggatggtgtgttggtaccaaactataagccagactattgtcttatggcagaacttcttcgatttagatacagttattgtattgctgtcccttttagaagggcaggcctgatacagaggtgagagctgtctcactgaatcaccaggtcacggtttcgaagcagcctctccgcatttgcgtgggaggcttgcctcggtttatcccttatccaagcctctagcactgggtgtgctttattttaattgtattgctgtcctcccatataaaaaaaacctgaagatagtattgtctttgaaattgtgagggcaatgcatttccctttcaaatcacctggtacatgtcttgtcccccccccccacttcccccagagcctgtctatatgtacttgatccgctttttttgcatcctagcttctcccggagtgtattttgttgcttgtgtgatgttcagatctttgaagaatgtgacaggctatctagcctacttgagacgttcagtatttctacaggtaagaaaggaaaactcaagtagacaagatcttccaaatctagttgcaagatattgcccttgaatagtgtgcctttatccactaaatgctaggtcaacaatctatccatggtgcttgcttgtttcctgaagtgatcatgaaacaagttgctatggaacgatgatgtctctctctctctctatatatatatatcctgcaatgtgtataaatgttctatgcaagtatgcaactatgtgagaacttgtgtacatattatccctcattatttttactgcttccattggttcagttgagcaggggttggcagttgaaacaagttatgtctgatccaagaaccagtgatctggagtcaattgagcaggggttggcaggggtcaaggggaggagggacagatcatgcctaaaccaaatgaactatttacctgcaaacctactgtgacgtgtcataaaagaaataaaatctaaccacgttgactacttacatgcaaatctacaaaaaaaatcaaaccctgcaggatctctgatgtgatgccatgccatgccaccaatgtgggtaggctggctgaaagacggaccagcagaagaggttgacttggaatttattgagcatgtgccgccgcccacgtggtttcatttcatcagcatggcttggcaccgtaaagaagaaaaaaaaaggagtttggtgaaatcactgccccaggaaaaccttccaggcgcaaaaatcctccatgttgaccgaccagccgtttatttgggcttattcaccactcgtggtcaagactcaataggaaggagggcatatgtgtcttcagaataattcctggaccaccggtagaccgataaaggccctgtactgaccgtgctctcaccatggtggtagctcatgagcaccaatctgtcatttgttctatcaactctgggcaatgattgattgatttttggccagccgctgtcacgagcacgacggcgcctgtacttgcgacgacgatgacgacgacggatcagcgtccagtggacagagccgtcgcagcccttccgtcctcgaacccttatccagatatgcgcacgcggaggtgcgcagcgaagccgccggtcaattccagctgcttttcaccgatgctgccagccagcagcgtcggagcggggggagaggtaacggacggacggcacacagctcttgacctggaagctccccgccctcgtgttgatggtagcgcaatatctcatggtgagacgagatctggagcgtcgtttttatcccactgtgcgcggaaaaggccttgcgcgtgcctggcgcgagctgattggctggtccaggttaaaagttactgcaaatggggggtgttaatgttattaggccgtgcagaaacggggacgagggtcgcgctgtcgctgtcaggcctccattcacttccgggtcgctctcagattggttgcataaattcccctcccgccgttgctgctgctgctgctgctgctgttcgttttcatcgcgaggccaggccttgcaggaacagttgggtgtctctacttagggcttgttcggttattcccaatacacatggattggatgggattggaaaaaattgtgaagaagtttgagttgagagctaaccgaacaagcccttacttgttggattggattggatagatccgcggaatggcatctctccatttgcgtgccgccatctactctattcttcttatcgccgccgccacccttttgggttctctctcggcaggaattatgtgccggaaaaggagttttaccgctttttttgttttgttttgttggtgggggagctcgcttgacttgtccaagatggacgtgagcctggaggagctttcggaggagaggagccacggccgcgctcactcgctgctgctgggtgctatgggttaggtcggtagtggcttttgataatgatcatgtgtgttgtacaccctacccgttggtgaggtgacttgactggcagaggaatctccgaatctggcagtggagactgcacacgggagacgggactactccctcccatgtgttggtcaattccagaagaccggccggtcctgtctggacacgggacctctgttttttttttgctttttacagtgtggtttacttgtttgtgcaatatatttttttaaaac

SEQ ID NO: 30337 - DNA, 2096 bp, Zea Mays
cacgaacacacccatttggtgccctaccgctaagccgctaaccctggctcacgaacacacccagtcagccgccaggccgccgctgtgccttccgccgtccgccgaggcaccgagccgctgtccctccccgtccgccgagccgttgcccctgtggctgtgctgtgcctccgttcgccggccgagccgctgtccgcctgtcactgtccctcagtccgccgagctgctgtgctttccggcttcgccgtccgccgaacaggttcgtccgcgagcgcgacgcgccgagcttccgccgtccgccgagcagggtcatctgcacaccaacagggtctacgacaatgtctggaccttcattctaacagatgcaaccttcaagagcgctgagattcaagaaacactgagcaaggtgaatttgttgtcccctctaagctttgtttgtgtgaatctaaacaatcggccatgcaattgactagagtaccatggctgccaacatgttatccgtattgaatatggaatatggtttgctcttttctgttgatagtttcacatgaatgactagatgaaccgatcatttgacatgaattcttggtgccttacatagttgtgctttgctttaggtgaacaggtcaaactagaagtaatatagaagatagatgtgtaaattccttgttccatcctctgctactttgatgcagatgggtctcaatgccgtggtggccgcctgctacgtctttccattacttgtctttgtgctcacagtccgcttcttctacgtactgtggcacagtggccaaccagagtcaaggttgtgcgccaccagattgcgttgtctcattgtccttggctccgaaaaggtccagattaccagctccgggtgatgctgatgagctatctgtcattgaagaccaaattgcatggatagttcacataattgcatccattgtcaagtaaggcaggtaacaggtgttaggaagagcccgtagagaggtcgaggagcagcactggctgtttctctggcattgatcaaggcgagcacatcaaggggtctcaggcacctccctctcattggtgtcgtcgttgaaccagttatggtacattggaatggctgcaaattgagggagaaagacctggaaacagtgatgcagcatgttcacacgaagatggcaacaatggtaacatttgcattggtcctgtaaataaggtattgaatatgcttgcttgatggattgaagatccaaattcgaatataacttcataagttcatatcccacgagtctaattacttgtggcttgctgaagatggcatgaagatgcaggatgaatcaatgctattatgatgcatctctatagattagacaactacagagttggtgctgttttaatgcagtccgggcacccaatagcttatttgagcaaggctttgggaactaaatctcaagggttgttcacctatgagaaagaatatctggcgattctggttgctgtagatcattggcgccattatttgcagttgaaggagtttcacatttacacggatcatcgcagcttcgttcaattggatgaacaatgtttgcacactccatggcaacagaaaatgtttactcgtttattgggattgcagtacaaaattatatacaaggggttgacaatagtgcggctgatgcattgtccaggcatccggaggttcagttctcctgttcggcattgtctacttgcactccacaatggataacaaatgtttctgattcttagcaccatgatgatatggcttcgactataatggccaagttagccattgatgctaaagcagtaccatcttattcatggcacaatggaattcttcgctataaaaaccgaatttgggtgggatagtcactgacactgcaccaaagattgttatcagcttttcatgagtctgcagtgggtggtcattccggcattccagttacttatgcgtagggatgaaaacggtcgggaacggtcggtaaacactaaaaccattaccgttttcatattttttatcggaaacaaaatcgaaaacggtaattccggaaacggaaacgatatcggtatttcggaaacatcggaaatgaaagttt

SEQ ID NO: 30338 - DNA, 899 bp, Zea Mays
cgaacacacccagtcagccgccaggccgccgctgtgccttccgccgtccgccgaggcaccgagccgctgtccctccccgtccgccgagccgttgcccctgtggctgtgctgtgcctccgttcgccggccgagccgctgtccgcctgtcactgtccctcagtccgccgagctgctgtgctttccggcttcgccgtccgccgaacaggttcgtccgcgagcgcgacgcgccgagcttccgccgtccgccgagcagggtcatctgcacaccaacagggtctacgacaatgtctggaccttcattctaacagatgcaaccttcaagagcgctgagattcaagaaacactgagcaagaaaaggtccagattaccagctccgggtgatgctgatgagctatctgtcattgaagaccaaattgcatggatagttcacataattgcatccattgtcaagtaaggcaggtaacaggtgttaggaagagcccgtagagaggtcgaggagcagcactggctgtttctctggcattgatcaaggcgagcacatcaaggggtctcaggcacctccctctcattggtgtcgtcgttgaaccagttatggtacattggaatggctgcaaattgagggagaaagacctggaaacagtgatgcagcatgttcacacgaagatggcaacaatggtaacatttgcattggtcctgtaaataaggtattgaatatgcttgcttgatggattgaagatccaaattcgaatataacttcataagttcatatcccacgagtctaattacttgtggcttgctgaagatggcatgaagatgcaggtgattattgcttgttctgtggcttatttccttttacttagttaacttcctattaggcagctactgcaccagcaaacctg

SEQ ID NO: 30339 - DNA, 4166 bp, Zea Mays
cgaacacacccagtcagccgccaggccgccgctgtgccttccgccgtccgccgaggcaccgagccgctgtccctccccgtccgccgagccgttgcccctgtggctgtgctgtgcctccgttcgccggccgagccgctgtccgcctgtcactgtccctcagtccgccgagctgctgtgctttccggcttcgccgtccgccgaacaggttcgtccgcgagcgcgacgcgccgagcttccgccgtccgccgagcaggtccgtccgccaagccatacctaaatttttttccgtcctccgccactgagggcaggggagcggagagccgccgccatggcggaggaggcggaggggatggaccggttcgatatggagggggacttcgagggcgggcggttcggccgcgacggggagttttactaccggagccggcgggagcgggcgccgcagacccgggatgacgccatctacggggtcttcgcggagggcgactccgactacgattcggaggacgacgaaggtacccgccgccgccgccggaagcgccgcaaggacggcggcggggaggccgacctcaccaagcccgtccagttcgtctccaccggtaagttcatgcccacccaggagcccgagcctgaggagaggccggggctcgggcgcgccgccgccgctgctgccgataaggaggaggaggaggaggaggaggatcaggacgatgagggggacaccgagatgctgccggcgatgttcggcaagatcagggacggcgcgcgcgcgaggcgggaggagaaggagcgggagcgggagatggcggcccgtcggcgacaggcagcgggtctcggggccggggagccatccgccgctcctgggagcctggagtccaactccaaggtggccaagatgatgcggatgatggggtacaagaaaggcatgggccttggcaagaatcagcaggggatcactgcgccggttgagtccactctgcgacccaagaacgctggcctggggagcgttgaggggttcagggagcccaagatcatgtctgctaaggagaatgtgccagccccaccacctccaccggcatcagcgaagaagaagcgttggtccaagaaggctaccacaaagaaggctccaatcttgacgaaaaatgagctcctggctatgcgtgctgagcaggaacaggaggaacagcccgctgttgtccagaaggtgattgacatgcgagggccacaggcgcgggtgctgacagacttgaagggtctcaatgaagaacaagagatggaggcgaatgacgtgcccatgccagagctgcagtacaatgtccgcatgcttgttgatgaggctagggctgatattgtgaggttggacgcccagctgcggcgggagcaggagaaggtggctagcttggtgcgggagaaggaaaaagtggctaagcaagaggcatcgcagaaacgccagttgcttgtgatggagagaattgcagagacactggagaaggtccaggacgatgatgcatccggcatgctcactctggatgggttgattcagacattccacggattgaaggtgcagtttgaggaggagttcaagatgtgtagcatcgcatggattgcttgcagatacgctcatccgctcctaatccgcgtcttccaggggtggcagcccctgcatgatccaaaatttgggttagaagtcatgaaaaaatggaaggacctgctgcagggggaccaaccatatgacttctcagatagtgccgcatcaatgacaccatatgtgcagcttgttagtgaagtcatcctaccggctgtgaggatatcaggaaccaattcgtgggaggctagggaaccggaaccaatgctccactttcttgagttatgggataataagaagttgctgccgcctgttttgcttcaatcattactagagcatgtgatcatgccaaagctctcagctgccgtggattcttgggatcctcgcagggaaagcataccgatccatgtctgggtgcatccatggctgccaatgctaagggaaaggatagagaccttgtgccattctattcgatacaagttgagcactgtcctccatgtatggcaagcacatgatgcttcagcatatgcagtgttgtctccgtggaaagacgtgtttgattcggcaagctgggaagacctgattgtgcggtatatcattcctaaactgagattggcgttgcaagactttcagatcaacccagcaaaccagaagctcgatcagttcaactgggtgatgttgtggacatctgcaatcccagtacagctcatggtccatatgttggaagtcgatttcttcagcaagtggcagcaggttctttaccactggttgtgctcaccaaatcctgatttcaatgagataatgaactggtataagggatggaagggccttttcccaccagagttacttgccaatgagcgcatacggatgcttctaactgctggtcttgacatgatgaaccaagctgctgaaggacttgaggtggtgcaacctggggctagggagaatgtgggctacttgagggcaacggagaagcgacaatttgatgcagcacagcaagcttaccatgctgtgccaggagcagccatggcggatttgagcttcaaggagtctatacaggcatatgcaatggaacaagggtcatctgcacaccaacagggtctacgacaatgtctggaccttcattctaacagatgcaaccttcaagagcgctgagattcaagaaacactgagcaagatgggtctcaatgccgtggtggccgcctgctacgtctttccattacttgtctttgtgctcacagtccgcttcttctacgtactgtggcacagtggccaaccagagtcaaggttgtgcgccaccagattgcgttgtctcattgtccttggctccgaaaaggtccagattaccagctccgggtgatgctgatgagctatctgtcattgaagaccaaattgcatggatagttcacataattgcatccattgtcaagtaaggcaggtaacaggtgttaggaagagcccgtagagaggtcgaggagcagcactggctgtttctctggcattgatcaaggcgagcacatcaaggggtctcaggcacctccctctcattggtgtcgtcgttgaaccagttatggtacattggaatggctgcaaattgagggagaaagacctggaaacagtgatgcagcatgttcacacgaagatggcaacaatggtaacatttgcattggtcctgtaaataaggtattgaatatgcttgcttgatggattgaagatccaaattcgaatataacttcataagttcatatcccacgagtctaattacttgtggcttgctgaagatggcatgaagatgcaggatgaatcaatgctattatgatgcatctctatagattagacaactacagagttggtgctgttttaatgcagtccgggcacccaatagcttatttgagcaaggctttgggaactaaatctcaagggttgttcacctatgagaaagaatatctggcgattctggttgctgtagatcattggcgccattatttgcagttgaaggagtttcacatttacacggatcatcgcagcttcgttcaattggatgaacaatgtttgcacactccatggcaacagaaaatgtttactcgtttattgggattgcagtacaaaattatatacaaggggttgacaatagtgcggctgatgcattgtccaggcatccggaggttcagttctcctgttcggcattgtctacttgcactccacaatggataacaaatgtttctgattcttagcaccatgatgatatggcttcgactataatggccaagttagccattgatgctaaagcagtaccatcttattcatggcacaatggaattcttcgctataaaaaccgaatttgggtgggatagtcactgacactgcaccaaagattgttatcagcttttcatgagtctgcagtgggtggtcattccggcattccagttacttatgcgtagggatgaaaacggtcgggaacggtcggtaaacactaaaaccattaccgttttcatattttttatcggaaacaaaatcgaaaacggtaattccggaaacggaaacgatatcggtatttcggaaacatcggaaatgaaagttt

SEQ ID NO: 30340 - DNA, 2004 bp, Zea Mays
cgaacacacccagtcagccgccaggccgccgctgtgccttccgccgtccgccgaggcaccgagccgctgtccctccccgtccgccgagccgttgcccctgtggctgtgctgtgcctccgttcgccggccgagccgctgtccgcctgtcactgtccctcagtccgccgagctgctgtgctttccggcttcgccgtccgccgaacaggttcgtccgcgagcgcgacgcgccgagcttccgccgtccgccgagcagggtcatctgcacaccaacagggtctacgacaatgtctggaccttcattctaacagatgcaaccttcaagagcgctgagattcaagaaacactgagcaagatgggtctcaatgccgtggtggccgcctgctacgtctttccattacttgtctttgtgctcacagtccgcttcttctacgtactgtggcacagtggccaaccagagtcaaggttgtgcgccaccagattgcgttgtctcattgtccttggctccggtgagtacgtattgcagtcttgcctgtcaaataccttatggacaagttttagatatggttgcctggtatataaaacggtactcatacgtgtaagctcatacggtaaataaaaacattctcaatctgggtagtaaaattgcctataaataaaaacattctaaatctactacagaaaaggtccagattaccagctccgggtgatgctgatgagctatctgtcattgaagaccaaattgcatggatagttcacataattgcatccattgtcaagtaaggcaggtaacaggtgttaggtgagcaatatatattttcttttatttgtaaactttgttcttttaaatgttgttcttgcttgcatatgcgattcaggaagagcccgtagagaggtcgaggagcagcactggctgtttctctggcattgatcaaggcgagcacatcaaggggtctcaggcacctccctctcattggtgtcgtcgttgaaccagttatggtacattggaatggctgcaaattgagggagaaagacctggaaacagtgatgcagcatgttcacacgaagatggcaacaatggtaacatttgcattggtcctgtaaataaggtattgaatatgcttgcttgatggattgaagatccaaattcgaatataacttcataagttcatatcccacgagtctaattacttgtggcttgctgaagatggcatgaagatgcaggatgaatcaatgctattatgatgcatctctatagattagacaactacagagttggtgctgttttaatgcagtccgggcacccaatagcttatttgagcaaggctttgggaactaaatctcaagggttgttcacctatgagaaagaatatctggcgattctggttgctgtagatcattggcgccattatttgcagttgaaggagtttcacatttacacggatcatcgcagcttcgttcaattggatgaacaatgtttgcacactccatggcaacagaaaatgtttactcgtttattgggattgcagtacaaaattatatacaaggggttgacaatagtgcggctgatgcattgtccaggcatccggaggttcagttctcctgttcggcattgtctacttgcactccacaatggataacaaatgtttctgattcttagcaccatgatgatatggcttcgactataatggccaagttagccattgatgctaaagcagtaccatcttattcatggcacaatggaattcttcgctataaaaaccgaatttgggtgggatagtcactgacactgcaccaaagattgttatcagcttttcatgagtctgcagtgggtggtcattccggcattccagttacttatgcgtagggatgaaaacggtcgggaacggtcggtaaacactaaaaccattaccgttttcatattttttatcggaaacaaaatcgaaaacggtaattccggaaacggaaacgatatcggtatttcggaaacatcggaaatgaaagttt

SEQ ID NO: 30341 - DNA, 4153 bp, Zea Mays
cgaacacacccagtcagccgccaggccgccgctgtgccttccgccgtccgccgaggcaccgagccgctgtccctccccgtccgccgagccgttgcccctgtggctgtgctgtgcctccgttcgccggccgagccgctgtccgcctgtcactgtccctcagtccgccgagctgctgtgctttccggcttcgccgtccgccgaacaggttcgtccgcgagcgcgacgcgccgagcttccgccgtccgccgagcaggtccgtccgccaagccatacctaaatttttttccgtcctccgccactgagggcaggggagcggagagccgccgccatggcggaggaggcggaggggatggaccggttcgatatggagggggacttcgagggcgggcggttcggccgcgacggggagttttactaccggagccggcgggagcgggcgccgcagacccgggatgacgccatctacggggtcttcgcggagggcgactccgactacgattcggaggacgacgaaggtacccgccgccgccgccggaagcgccgcaaggacggcggcggggaggccgacctcaccaagcccgtccagttcgtctccaccggtaagttcatgcccacccaggagcccgagcctgaggagaggccggggctcgggcgcgccgccgccgctgctgccgataaggaggaggaggaggaggaggaggatcaggacgatgagggggacaccgagatgctgccggcgatgttcggcaagatcagggacggcgcgcgcgcgaggcgggaggagaaggagcgggagcgggagatggcggcccgtcggcgacaggcagcgggtctcggggccggggagccatccgccgctcctgggagcctggagtccaactccaaggtggccaagatgatgcggatgatggggtacaagaaaggcatgggccttggcaagaatcagcaggggatcactgcgccggttgagtccactctgcgacccaagaacgctggcctggggagcgttgaggggttcagggagcccaagatcatgtctgctaaggagaatgtgccagccccaccacctccaccggcatcagcgaagaagaagcgttggtccaagaaggctaccacaaagaaggctccaatcttgacgaaaaatgagctcctggctatgcgtgctgagcaggaacaggaggaacagcccgctgttgtccagaaggtgattgacatgcgagggccacaggcgcgggtgctgacagacttgaagggtctcaatgaagaacaagagatggaggcgaatgacgtgcccatgccagagctgcagtacaatgtccgcatgcttgttgatgaggctagggctgatattgtgaggttggacgcccagctgcggcgggagcaggagaaggtggctagcttggtgcgggagaaggaaaaagtggctaagcaagaggcatcgcagaaacgccagttgcttgtgatggagagaattgcagagacactggagaaggtccaggacgatgatgcatccggcatgctcactctggatgggttgattcagacattccacggattgaaggtgcagtttgaggaggagttcaagatgtgtagcatcgcatggattgcttgcagatacgctcatccgctcctaatccgcgtcttccaggggtggcagcccctgcatgatccaaaatttgggttagaagtcatgaaaaaatggaaggacctgctgcagggggaccaaccatatgacttctcagatagtgccgcatcaatgacaccatatgtgcagcttgttagtgaagtcatcctaccggctgtgaggatatcaggaaccaattcgtgggaggctagggaaccggaaccaatgctccactttcttgagttatgggataataagaagttgctgccgcctgttttgcttcaatcattactagagcatgtgatcatgccaaagctctcagctgccgtggattcttgggatcctcgcagggaaagcataccgatccatgtctgggtgcatccatggctgccaatgctaagggaaaggatagagaccttgtgccattctattcgatacaagttgagcactgtcctccatgtatggcaagcacatgatgcttcagcatatgcagtgttgtctccgtggaaagacgtgtttgattcggcaagctgggaagacctgattgtgcggtatatcattcctaaactgagattggcgttgcaagactttcagatcaacccagcaaaccagaagctcgatcagttcaactgggtgatgttgtggacatctgcaatcccagtacagctcatggtccatatgttggaagtcgatttcttcagcaagtggcagcaggttctttaccactggttgtgctcaccaaatcctgatttcaatgagataatgaactggtataagggatggaagggccttttcccaccagagttacttgccaatgagcgcatacggatgcttctaactgctggtcttgacatgatgaaccaagctgctgaaggacttgaggtggtgcaacctggggctagggagaatgtgggctacttgagggcaacggagaagcgacaatttgatgcagcacagcaagcttaccatgctgtgccaggagcagccatggcggatttgagcttcaaggagtctatacaggcatatgcaatggaacaagggtcatctgcacaccaacagggtctacgacaatgtctggaccttcattctaacagatgcaaccttcaagagcgctgagattcaagaaacactgagcaagatgggtctcaatgccgtggtggccgcctgctacgtctttccattacttgtctttgtgctcacagtccgcttcttctacgtactgtggcacagtggccaaccagagtcaaggttgtgcgccaccagattgcgttgtctcattgtccttggctccgaaaaggtccagattaccagctccgggtgatgctgatgagctatctgtcattgaagaccaaattgcatggatagttcacataattgcatccattgtcaagtaaggcaggtaacaggtgttagagaggtcgaggagcagcactggctgtttctctggcattgatcaaggcgagcacatcaaggggtctcaggcacctccctctcattggtgtcgtcgttgaaccagttatggtacattggaatggctgcaaattgagggagaaagacctggaaacagtgatgcagcatgttcacacgaagatggcaacaatggtaacatttgcattggtcctgtaaataaggtattgaatatgcttgcttgatggattgaagatccaaattcgaatataacttcataagttcatatcccacgagtctaattacttgtggcttgctgaagatggcatgaagatgcaggatgaatcaatgctattatgatgcatctctatagattagacaactacagagttggtgctgttttaatgcagtccgggcacccaatagcttatttgagcaaggctttgggaactaaatctcaagggttgttcacctatgagaaagaatatctggcgattctggttgctgtagatcattggcgccattatttgcagttgaaggagtttcacatttacacggatcatcgcagcttcgttcaattggatgaacaatgtttgcacactccatggcaacagaaaatgtttactcgtttattgggattgcagtacaaaattatatacaaggggttgacaatagtgcggctgatgcattgtccaggcatccggaggttcagttctcctgttcggcattgtctacttgcactccacaatggataacaaatgtttctgattcttagcaccatgatgatatggcttcgactataatggccaagttagccattgatgctaaagcagtaccatcttattcatggcacaatggaattcttcgctataaaaaccgaatttgggtgggatagtcactgacactgcaccaaagattgttatcagcttttcatgagtctgcagtgggtggtcattccggcattccagttacttatgcgtagggatgaaaacggtcgggaacggtcggtaaacactaaaaccattaccgttttcatattttttatcggaaacaaaatcgaaaacggtaattccggaaacggaaacgatatcggtatttcggaaacatcggaaatgaaagttt

SEQ ID NO: 30342 - DNA, 4455 bp, Zea Mays
cgaacacacccagtcagccgccaggccgccgctgtgccttccgccgtccgccgaggcaccgagccgctgtccctccccgtccgccgagccgttgcccctgtggctgtgctgtgcctccgttcgccggccgagccgctgtccgcctgtcactgtccctcagtccgccgagctgctgtgctttccggcttcgccgtccgccgaacaggttcgtccgcgagcgcgacgcgccgagcttccgccgtccgccgagcaggtccgtccgccaagccatacctaaatttttttccgtcctccgccactgagggcaggggagcggagagccgccgccatggcggaggaggcggaggggatggaccggttcgatatggagggggacttcgagggcgggcggttcggccgcgacggggagttttactaccggagccggcgggagcgggcgccgcagacccgggatgacgccatctacggggtcttcgcggagggcgactccgactacgattcggaggacgacgaaggtacccgccgccgccgccggaagcgccgcaaggacggcggcggggaggccgacctcaccaagcccgtccagttcgtctccaccggtaagttcatgcccacccaggagcccgagcctgaggagaggccggggctcgggcgcgccgccgccgctgctgccgataaggaggaggaggaggaggaggaggatcaggacgatgagggggacaccgagatgctgccggcgatgttcggcaagatcagggacggcgcgcgcgcgaggcgggaggagaaggagcgggagcgggagatggcggcccgtcggcgacaggcagcgggtctcggggccggggagccatccgccgctcctgggagcctggagtccaactccaaggtggccaagatgatgcggatgatggggtacaagaaaggcatgggccttggcaagaatcagcaggggatcactgcgccggttgagtccactctgcgacccaagaacgctggcctggggagcgttgaggggttcagggagcccaagatcatgtctgctaaggagaatgtgccagccccaccacctccaccggcatcagcgaagaagaagcgttggtccaagaaggctaccacaaagaaggctccaatcttgacgaaaaatgagctcctggctatgcgtgctgagcaggaacaggaggaacagcccgctgttgtccagaaggtgattgacatgcgagggccacaggcgcgggtgctgacagacttgaagggtctcaatgaagaacaagagatggaggcgaatgacgtgcccatgccagagctgcagtacaatgtccgcatgcttgttgatgaggctagggctgatattgtgaggttggacgcccagctgcggcgggagcaggagaaggtggctagcttggtgcgggagaaggaaaaagtggctaagcaagaggcatcgcagaaacgccagttgcttgtgatggagagaattgcagagacactggagaaggtccaggacgatgatgcatccggcatgctcactctggatgggttgattcagacattccacggattgaaggtgcagtttgaggaggagttcaagatgtgtagcatcgcatggattgcttgcagatacgctcatccgctcctaatccgcgtcttccaggggtggcagcccctgcatgatccaaaatttgggttagaagtcatgaaaaaatggaaggacctgctgcagggggaccaaccatatgacttctcagatagtgccgcatcaatgacaccatatgtgcagcttgttagtgaagtcatcctaccggctgtgaggatatcaggaaccaattcgtgggaggctagggaaccggaaccaatgctccactttcttgagttatgggataataagaagttgctgccgcctgttttgcttcaatcattactagagcatgtgatcatgccaaagctctcagctgccgtggattcttgggatcctcgcagggaaagcataccgatccatgtctgggtgcatccatggctgccaatgctaagggaaaggatagagaccttgtgccattctattcgatacaagttgagcactgtcctccatgtatggcaagcacatgatgcttcagcatatgcagtgttgtctccgtggaaagacgtgtttgattcggcaagctgggaagacctgattgtgcggtatatcattcctaaactgagattggcgttgcaagactttcagatcaacccagcaaaccagaagctcgatcagttcaactgggtgatgttgtggacatctgcaatcccagtacagctcatggtccatatgttggaagtcgatttcttcagcaagtggcagcaggttctttaccactggttgtgctcaccaaatcctgatttcaatgagataatgaactggtataagggatggaagggccttttcccaccagagttacttgccaatgagcgcatacggatgcttctaactgctggtcttgacatgatgaaccaagctgctgaaggacttgaggtggtgcaacctggggctagggagaatgtgggctacttgagggcaacggagaagcgacaatttgatgcagcacagcaagcttaccatgctgtgccaggagcagccatggcggatttgagcttcaaggagtctatacaggcatatgcaatggaacaagggtcatctgcacaccaacagggtctacgacaatgtctggaccttcattctaacagatgcaaccttcaagagcgctgagattcaagaaacactgagcaaggtgaatttgttgtcccctctaagctttgtttgtgtgaatctaaacaatcggccatgcaattgactagagtaccatggctgccaacatgttatccgtattgaatatggaatatggtttgctcttttctgttgatagtttcacatgaatgactagatgaaccgatcatttgacatgaattcttggtgccttacatagttgtgctttgctttaggtgaacaggtcaaactagaagtaatatagaagatagatgtgtaaattccttgttccatcctctgctactttgatgcagatgggtctcaatgccgtggtggccgcctgctacgtctttccattacttgtctttgtgctcacagtccgcttcttctacgtactgtggcacagtggccaaccagagtcaaggttgtgcgccaccagattgcgttgtctcattgtccttggctccgaaaaggtccagattaccagctccgggtgatgctgatgagctatctgtcattgaagaccaaattgcatggatagttcacataattgcatccattgtcaagtaaggcaggtaacaggtgttaggaagagcccgtagagaggtcgaggagcagcactggctgtttctctggcattgatcaaggcgagcacatcaaggggtctcaggcacctccctctcattggtgtcgtcgttgaaccagttatggtacattggaatggctgcaaattgagggagaaagacctggaaacagtgatgcagcatgttcacacgaagatggcaacaatggtaacatttgcattggtcctgtaaataaggtattgaatatgcttgcttgatggattgaagatccaaattcgaatataacttcataagttcatatcccacgagtctaattacttgtggcttgctgaagatggcatgaagatgcaggatgaatcaatgctattatgatgcatctctatagattagacaactacagagttggtgctgttttaatgcagtccgggcacccaatagcttatttgagcaaggctttgggaactaaatctcaagggttgttcacctatgagaaagaatatctggcgattctggttgctgtagatcattggcgccattatttgcagttgaaggagtttcacatttacacggatcatcgcagcttcgttcaattggatgaacaatgtttgcacactccatggcaacagaaaatgtttactcgtttattgggattgcagtacaaaattatatacaaggggttgacaatagtgcggctgatgcattgtccaggcatccggaggttcagttctcctgttcggcattgtctacttgcactccacaatggataacaaatgtttctgattcttagcaccatgatgatatggcttcgactataatggccaagttagccattgatgctaaagcagtaccatcttattcatggcacaatggaattcttcgctataaaaaccgaatttgggtgggatagtcactgacactgcaccaaagattgttatcagcttttcatgagtctgcagtgggtggtcattccggcattccagttacttatgcgtagggatgaaaacggtcgggaacggtcggtaaacactaaaaccattaccgttttcatattttttatcggaaacaaaatcgaaaacggtaattccggaaacggaaacgatatcggtatttcggaaacatcggaaatgaaagttt

SEQ ID NO: 30343 - DNA, 4152 bp, Zea Mays
cgaacacacccagtcagccgccaggccgccgctgtgccttccgccgtccgccgaggcaccgagccgctgtccctccccgtccgccgagccgttgcccctgtggctgtgctgtgcctccgttcgccggccgagccgctgtccgcctgtcactgtccctcagtccgccgagctgctgtgctttccggcttcgccgtccgccgaacaggttcgtccgcgagcgcgacgcgccgagcttccgccgtccgccgagcaggtccgtccgccaagccatacctaaatttttttccgtcctccgccactgagggcaggggagcggagagccgccgccatggcggaggaggcggaggggatggaccggttcgatatggagggggacttcgagggcgggcggttcggccgcgacggggagttttactaccggagccggcgggagcgggcgccgcagacccgggatgacgccatctacggggtcttcgcggagggcgactccgactacgattcggaggacgacgaaggtacccgccgccgccgccggaagcgccgcaaggacggcggcggggaggccgacctcaccaagcccgtccagttcgtctccaccggtaagttcatgcccacccaggagcccgagcctgaggagaggccggggctcgggcgcgccgccgccgctgctgccgataaggaggaggaggaggaggaggaggatcaggacgatgagggggacaccgagatgctgccggcgatgttcggcaagatcagggacggcgcgcgcgcgaggcgggaggagaaggagcgggagcgggagatggcggcccgtcggcgacaggcagcgggtctcggggccggggagccatccgccgctcctgggagcctggagtccaactccaaggtggccaagatgatgcggatgatggggtacaagaaaggcatgggccttggcaagaatcagcaggggatcactgcgccggttgagtccactctgcgacccaagaacgctggcctggggagcgttgaggggttcagggagcccaagatcatgtctgctaaggagaatgtgccagccccaccacctccaccggcatcagcgaagaagaagcgttggtccaagaaggctaccacaaagaaggctccaatcttgacgaaaaatgagctcctggctatgcgtgctgagcaggaacaggaggaacagcccgctgttgtccagaaggtgattgacatgcgagggccacaggcgcgggtgctgacagacttgaagggtctcaatgaagaacaagagatggaggcgaatgacgtgcccatgccagagctgcagtacaatgtccgcatgcttgttgatgaggctagggctgatattgtgaggttggacgcccagctgcggcgggagcaggagaaggtggctagcttggtgcgggagaaggaaaaagtggctaagcaagaggcatcgcagaaacgccagttgcttgtgatggagagaattgcagagacactggagaaggtccaggacgatgatgcatccggcatgctcactctggatgggttgattcagacattccacggattgaaggtgcagtttgaggaggagttcaagatgtgtagcatcgcatggattgcttgcagatacgctcatccgctcctaatccgcgtcttccaggggtggcagcccctgcatgatccaaaatttgggttagaagtcatgaaaaaatggaaggacctgctgcagggggaccaaccatatgacttctcagatagtgccgcatcaatgacaccatatgtgcagcttgttagtgaagtcatcctaccggctgtgaggatatcaggaaccaattcgtgggaggctagggaaccggaaccaatgctccactttcttgagttatgggataataagaagttgctgccgcctgttttgcttcaatcattactagagcatgtgatcatgccaaagctctcagctgccgtggattcttgggatcctcgcagggaaagcataccgatccatgtctgggtgcatccatggctgccaatgctaagggaaaggatagagaccttgtgccattctattcgatacaagttgagcactgtcctccatgtatggcaagcacatgatgcttcagcatatgcagtgttgtctccgtggaaagacgtgtttgattcggcaagctgggaagacctgattgtgcggtatatcattcctaaactgagattggcgttgcaagactttcagatcaacccagcaaaccagaagctcgatcagttcaactgggtgatgttgtggacatctgcaatcccagtacagctcatggtccatatgttggaagtcgatttcttcagcaagtggcagcaggttctttaccactggttgtgctcaccaaatcctgatttcaatgagataatgaactggtataagggatggaagggccttttcccaccagagttacttgccaatgagcgcatacggatgcttctaactgctggtcttgacatgatgaaccaagctgctgaaggacttgaggtggtgcaacctggggctagggagaatgtgggctacttgagggcaacggagaagcgacaatttgatgcagcacagcaagcttaccatgctgtgccaggagcagccatggcggatttgagcttcaaggagtctatacaggcatatgcaatggaacaagggtcatctgcacaccaacagggtctacgacaatgtctggaccttcattctaacagatgcaaccttcaagagcgctgagattcaagaaacactgagcaagatgggtctcaatgccgtggtggccgcctgctacgtctttccattacttgtctttgtgctcacagtccgcttcttctacgtactgtggcacagtggccaaccagagtcaaggttgtgcgccaccagattgcgttgtctcattgtccttggctccgaaaaggtccagattaccagctccgggtgatgctgatgagctatctgtcattgaagaccaaattgcatggatagttcacataattgcatccattgtcaagtaaggcaggaagagcccgtagagaggtcgaggagcagcactggctgtttctctggcattgatcaaggcgagcacatcaaggggtctcaggcacctccctctcattggtgtcgtcgttgaaccagttatggtacattggaatggctgcaaattgagggagaaagacctggaaacagtgatgcagcatgttcacacgaagatggcaacaatggtaacatttgcattggtcctgtaaataaggtattgaatatgcttgcttgatggattgaagatccaaattcgaatataacttcataagttcatatcccacgagtctaattacttgtggcttgctgaagatggcatgaagatgcaggatgaatcaatgctattatgatgcatctctatagattagacaactacagagttggtgctgttttaatgcagtccgggcacccaatagcttatttgagcaaggctttgggaactaaatctcaagggttgttcacctatgagaaagaatatctggcgattctggttgctgtagatcattggcgccattatttgcagttgaaggagtttcacatttacacggatcatcgcagcttcgttcaattggatgaacaatgtttgcacactccatggcaacagaaaatgtttactcgtttattgggattgcagtacaaaattatatacaaggggttgacaatagtgcggctgatgcattgtccaggcatccggaggttcagttctcctgttcggcattgtctacttgcactccacaatggataacaaatgtttctgattcttagcaccatgatgatatggcttcgactataatggccaagttagccattgatgctaaagcagtaccatcttattcatggcacaatggaattcttcgctataaaaaccgaatttgggtgggatagtcactgacactgcaccaaagattgttatcagcttttcatgagtctgcagtgggtggtcattccggcattccagttacttatgcgtagggatgaaaacggtcgggaacggtcggtaaacactaaaaccattaccgttttcatattttttatcggaaacaaaatcgaaaacggtaattccggaaacggaaacgatatcggtatttcggaaacatcggaaatgaaagttt

SEQ ID NO: 30344 - DNA, 1163 bp, Zea Mays
aaaactccggttttcgatactctcaccagcaggggaacgggacatggctgcatgctgcgatggcaccgctactgctgctaccgggagaatgctgaactgcgtctgcatctccatcgaggtggatacacatatttatgatgcatcgccataggtgcagttcactgctgctacgccattcaatccaggagcttgcattgacatgcatgatgcacgacatgctctttttctcagacaccatgacaccctaaccaccggaaaggtcaaggtcaagcaggaattaacaccgcagagagatcagctagaaactaaccatgcattgcatactctatatatatatatatatatatatatataacatggccaccattctagctagatggagatggagagatatcgaccagcagatgatagattcttctatagatggagatggagagagtaacaaccagatgctagatcgctggtgtctgcattgcatccacggttgctcctctccccacctgcatgcataagtggtgcctcacacctcagtgtccattcacatgaatgcattcagtatccctttagctgtttgtaattattactttttctttctaaaaagaaagaaaagacaaactccatatcagacttggaggtccatcataatgattgtaatgcctagcgacatcctaccaaacaaggccttatcagacttgtggtttgtgagccatggctcatgtgacaagaagtggaggcatctgtgtgtttatacatgcacacatcgtggagatgcatgtcaggatcgcccttgctgaagatggggagaaaaatggcgtcagccgtcagcgaatagacactgcgacggggacggcacaggcagacatgcatgctgcacgacgtcgacagaaaacgaggtgtatgacccggaatcacctgaggattgaggggattaaatgggaaattagttcatttccccttcaatcctctccaatcctcccgtgatttccttgtcaccaaatcaactctcagcgtattaaattaattgtatagagaaactacagaaatcaagtcttctttatagttaattaatctaatataataagcttgtgttggacagaaaattatactgtcatatgtacagcaaggatcgtatatatattcgtatcgggaccggccgtctgaat

SEQ ID NO: 30345 - DNA, 2698 bp, Zea Mays
aaaggctcgccgaacgagtagacgagcactggtcaaaagcctaaacgagcagccgggtactgcagtgcagcagtggagtggcaaaagcccaaatccaatcgcatatcccaccaggccccaagatcaaatccacccagttcatcactttctctcccgtacgtaaaagcgaaaaaccctcccaaaaagcaaattccgcaggtgcccaggggcctaaatttagcagcagctgctcctcatgctcccccacggaggctattggatcggaggggagggcgggaggaggaggacgggacagaaataggcgggcggctggagagagattggcggaggagtccaggagggtgcgcgcacaagcaaggcaggaccggaggaaacgaggagcggaggtcagggttaaatgagacaggactgggggaggagcaggagggagcggaggcgcgtcaggttgtccagagatgggaggagctccccggcgtccccgccttctactcctctcggctcgttgagattacattcagattcggatttttgccacaccctcggcaagatagagaatctggagcactcttgaatgctaatcagacaccctgcccatttctttctctgtcttagacacaaggccttctcatggccagagacttgcctcatctgcccgtaactagacggaaaatcctgcaattcaagttcctgataccgtttgttcttgttctttctgtgtctgttattgctgtcacccagtacttccaaagtatctcctaccttctacgcccactgtgggacacgccgcctaaaccattcacccgcatcccacactactatgcacccaacatctccatggcccagctgtgccaactccatggctgggacatcctccccgcccctcgccgcgtcttcgacgctgtcctcttcagcaacgagcttgatattctagaaatccgctaccacgagctccttccacatgttgacaggtttgtcatccttgaggccaattccaccttcaccggcatccccaagtcactctccttttacgaaaacttcagccgttttgggtttgctggatcaaagattgtctacgacatgctttctattggagagctggataccggttctcgtcgccaaccattccatgtcgaggcctatcaccgtcgctcactcaatatgctgatacgaagatcgggtattgctgccggtgatatcctgatcatggctgatgctgacgagatccctacccccgagaccgtgcagttgctcaagtggtgcgacgggataccaccggtaatgcaccttgggatgaagaactatatgtactccttcgaatttcctgtggacgacaacagctggagggcgacggcacacgtgtacaacgagcacacatcgtaccgccattcccgccagagcaacttcatcctggccgacgccggctggcactgcagcttctgcttcagggagatcaaggagtttgttttcaagatgaaggcgtacagccatgcagaccgagtgaagcagaaaagcttcctgaacccagacagaatccagaagatcatatgcaacggggacgacctgttcgacatgctgcctgaagagtacacattcgccgacctcttcaagaagatggggccgatacccaagtcagggtccgccgtgcatctgccttcccatctgatcaagaatgcagacaagttcaggttcttgcttcccggtgggtgcttgagatcggagtagatcagagattagctttttttttgttagccgacagtatttcttttagctgcaatactgttgttcctggagaaacgatttcttttgggagtttcgtatgatatggtattgttactttttagatagggtgctaggagctgttttggtgtgggcttgaggaagttttcatgttgtatctgtagcggtgggcttatcagcccctgaatttacagcaagtaacgtacaggtcaaattgctatagtaaattggtaccttttgggtgcatcctgatcttctccaggcaactggaggttgtttgtcacctgtcgtcactgcttaaacttcatctgaaatatttgtttctctacatgcctgtctgctgctactcctggttccaaggctaatccaggggtcaacggatgcaaggcaaagctcacttccagatcttttgcaagcctatccaaagctgtcagttctctgccttatgttcctgctgatgagaattgcatgcatgattcaagacggaggaaccttgcaaatgacccatcaaagttgagatttgatagggctgatgcctccaaaagaattcggcattatcgtggagcagaatatagaccttacatgattgcatggcctacaattgatgttactttaatcaatgcaaggtaatgttgtgcatggttgaacttttgagaaatgtttctgccaccaaaaaaacataaagtcaaccaatcaaataaaaaactgaagctgtcttttttagaagcagctacttttgtgtagtactattttaaagaggtggcataagaagttttaaatgatgtccctgcgaggacgattttctagctccaagttagtgttccaaactaatgttcatctggatgaagtaaaatgatttttcttctatacaattttgagaaaaaatgttacaatgtaatgttcaattgaatgctttgctagtgttggaacttagtgaaaacgagatttagtagatagagag

SEQ ID NO: 30346 - DNA, 2607 bp, Zea Mays
cggtcggaaagctggggcctattctttaggattaggaggagccgtatgaagcaagcttggttcctctagattcagtttggtggcaatccgtgccggcggcagagcgcggcagctggttttttcgttagattcctcccaccttgtttgcattgcccctgacgcgtgcagtaatgcttacctagccttccgatcgttcagctcaagagaagaatgagagatccgttcttcagtggggagatatccaatcatcgatatgcgctccaaaatgtggcagattggtgaagacaaatgccgtgtttggatttagcctaggcgatgatttggttcgggtagcacagggttgcctgcttgctttgtgctgctggaacggaaatgcgtttttcgtagtggtccgttgatctttcaccagtgtacatattacattcagattcggatttttgccacaccctcggcaagatagagaatctggagcactcttgaatgctaatcagacaccctgcccatttctttctctgtcttagacacaaggccttctcatggccagagacttgcctcatctgcccgtaactagacggaaaatcctgcaattcaagttcctgataccgtttgttcttgttctttctgtgtctgttattgctgtcacccagtacttccaaagtatctcctaccttctacgcccactgtgggacacgccgcctaaaccattcacccgcatcccacactactatgcacccaacatctccatggcccagctgtgccaactccatggctgggacatcctccccgcccctcgccgcgtcttcgacgctgtcctcttcagcaacgagcttgatattctagaaatccgctaccacgagctccttccacatgttgacaggtttgtcatccttgaggccaattccaccttcaccggcatccccaagtcactctccttttacgaaaacttcagccgttttgggtttgctggatcaaagattgtctacgacatgctttctattggagagctggataccggttctcgtcgccaaccattccatgtcgaggcctatcaccgtcgctcactcaatatgctgatacgaagatcgggtattgctgccggtgatatcctgatcatggctgatgctgacgagatccctacccccgagaccgtgcagttgctcaagtggtgcgacgggataccaccggtaatgcaccttgggatgaagaactatatgtactccttcgaatttcctgtggacgacaacagctggagggcgacggcacacgtgtacaacgagcacacatcgtaccgccattcccgccagagcaacttcatcctggccgacgccggctggcactgcagcttctgcttcagggagatcaaggagtttgttttcaagatgaaggcgtacagccatgcagaccgagtgaagcagaaaagcttcctgaacccagacagaatccagaagatcatatgcaacggggacgacctgttcgacatgctgcctgaagagtacacattcgccgacctcttcaagaagatggggccgatacccaagtcagggtccgccgtgcatctgccttcccatctgatcaagaatgcagacaagttcaggttcttgcttcccggtgggtgcttgagatcggagtagatcagagattagctttttttttgttagccgacagtatttcttttagctgcaatactgttgttcctggagaaacgatttcttttgggagtttcgtatgatatggtattgttactttttagatagggtgctaggagctgttttggtgtgggcttgaggaagttttcatgttgtatctgtagcggtgggcttatcagcccctgaatttacagcaagtaacgtacaggtcaaattgctatagtaaattggtaccttttgggtgcatcctgatcttctccaggcaactggaggttgtttgtcacctgtcgtcactgcttaaacttcatctgaaatatttgtttctctacatgcctgtctgctgctactcctggttccaaggctaatccaggggtcaacggatgcaaggcaaagctcacttccagatcttttgcaagcctatccaaagctgtcagttctctgccttatgttcctgctgatgagaattgcatgcatgattcaagacggaggaaccttgcaaatgacccatcaaagttgagatttgatagggctgatgcctccaaaagaattcggcattatcgtggagcagaatatagaccttacatgattgcatggcctacaattgatgttactttaatcaatgcaaggtaatgttgtgcatggttgaacttttgagaaatgtttctgccaccaaaaaaacataaagtcaaccaatcaaataaaaaactgaagctgtcttttttagaagcagctacttttgtgtagtactattttaaagaggtggcataagaagttttaaatgatgtccctgcgaggacgattttctagctccaagttagtgttccaaactaatgttcatctggatgaagtaaaatgatttttcttctatacaattttgagaaaaaatgttacaatgtaatgttcaattgaatgctttgctagtgttggaacttagtgaaaacgagatttagtagatagagag

SEQ ID NO: 30347 - DNA, 1911 bp, Zea Mays
gtggtccctccaccgccgccgccgccgccgccccggtccctggcgcgagggccgcggtggtcgcctccgtcgccgccttcctcgagtccgctgggctctcgcgcacgctcgtcgccctccaatccgaggccggcctcgaggccggtgcgtgggggtcgtcacaggtgaacttggaggagctggttgccagattcttagagtcgagcaattcaactcgggcggctgccattctgggaagcgatgagcaagacaaggaaaatgatgatatagcaggagaagttggcaaggaaaaaaagaggagcggcacagaagccggtgagcctgagagcaaggcgatcgagcctttagctgaggaaaagccgactgaaaatatggacggtgaggctaaagagaagaaacaaaagaagaagaaagacaagggtgacccttcagctgcgaatgctgctagcgagggaacaactgaaattgtgaagaacgccgaccagaaggacgatgaggccaaggagaagaaacagaagaagaagaaggacaagggtgacccctcagctgcgggcgctggcagcggcgaaacaactgaaacagtgaaggaggatgatcataagcttgatggcaagaagaagaagaaaaacaagaagcagggaaaggatgatgatgtcgaagctaggctggaaaaggcagaattagcaatacttaacaagtttgaggcagcagaaaagctcaatggaagagaggtagaaccaaaaggtcagaatgacagtgctgatgactgcagtggtgctgtggaaaggaaaaagaagaagaaagagaaatcatctgccgggacttcagagaagactgatgcaggaagtgcacctgctgaggctgatggtgccaagggaaagaatggtgctgtagaaacagtcaaggatgataatgagaaaaaggccaaaaaaaagcggaagaagtctaaccctgaagaaactgttcaggtggaaggtaaagaggctgcagggaaagattcagtcccaaaacaagatgatgcgaacaagagtgtaatggagattgaagaaggtaaccaagggaagtcgtcaaatgaaaatgcagttgctggcaaaaaacggaagctagaagaagttgaaggaagcattccccctgtgactgggaaagaagattgcacagccaacgaaagtctaagcaatggttttgcagaggataaaaaagaagaaagcaacacaaaaccaagcaaaaggcagaaacattcatctgagcccaagactgtgaccccatttcaacgtattaaggtggacgacgtcagatttgcagatgacaggcttcaggataactcgtattgggctaagggtggcgcagacaccggttacggcgcaaaggcacaggagatccttggccaagtcaagggaagggggtttaggcacgagaaaaccaagaagaagcgtggcacctacaggggcgggcaaatcgacctgcaaacccactcgatcaagttcgagaattcagacgacgagtgaaatggtgagacctgggcttccccataagatggaagcctatacagtgttttagcagttgacccatttctaccgccgttattgcctgatcaggcctggtgctggtgggaagaagcgatgcgatggatggtgcatgcaatacaacacggtaccagctggattaaatcagttgcggtgtgccattatttgttagattgagcgacgtgagaaatcgtcgaaattttgtttgcttgttgggctcactgatttgctgattttgctacagcttatgcgacgttaacgttgctactctgcgtgttatgagtttgcccgtgctcttgattcctttcgaaatgactaccttggagccgctgatggaagtgcagtgagctaggcccagcgtagaactgggctctttctatcgacccac

SEQ ID NO: 30348 - DNA, 1958 bp, Zea Mays
tcactgtaccatgccactccaccgttccgacatccaaggctccaagtataaaccccgcggctgcaaaccctagccgcccgatgctcttcgtcccgcgccaagtcgtactcgccgcctcatcacagccccgcgccgccgcctcttccgccatggccaaggaggaatccaagaaggagaagaagaaggccaaggccaaggtggccaatggagccgccgccgccgccgccgccccggtccctggcgcgagggccgcggtggtcgcctccgtcgccgccttcctcgagtccgctgggctctcgcgcacgctcgtcgccctccaatccgaggccggcctcgagcaattcaactcgggcggctgccattctgggaagcgatgagcaagacaaggaaaatgatgatatagcaggagaagttggcaaggaaaaaaagaggagcggcacagaagccggtgagcctgagagcaaggcgatcgagcctttagctgaggaaaagccgactgaaaatatggacggtgaggctaaagagaagaaacaaaagaagaagaaagacaagggtgacccttcagctgcgaatgctgctagcgagggaacaactgaaattgtgaagaacgccgaccagaaggacgatgaggccaaggagaagaaacagaagaagaagaaggacaagggtgacccctcagctgcgggcgctggcagcggcgaaacaactgaaacagtgaaggaggatgatcataagcttgatggcaagaagaagaagaaaaacaagaagcagggaaaggatgatgatgtcgaagctaggctggaaaaggcagaattagcaatacttaacaagtttgaggcagcagaaaagctcaatggaagagaggtagaaccaaaaggtcagaatgacagtgctgatgactgcagtggtgctgtggaaaggaaaaagaagaagaaagagaaatcatctgccgggacttcagagaagactgatgcaggaagtgcacctgctgaggctgatggtgccaagggaaagaatggtgctgtagaaacagtcaaggatgataatgagaaaaaggccaaaaaaaagcggaagaagtctaaccctgaagaaactgttcaggtggaaggtaaagaggctgcagggaaagattcagtcccaaaacaagatgatgcgaacaagagtgtaatggagattgaagaaggtaaccaagggaagtcgtcaaatgaaaatgcagttgctggcaaaaaacggaagctagaagaagttgaaggaagcattccccctgtgactgggaaagaagattgcacagccaacgaaagtctaagcaatggttttgcagaggataaaaaagaagaaagcaacacaaaaccaagcaaaaggcagaaacattcatctgagcccaagactgtgaccccatttcaacgtattaaggtggacgacgtcagatttgcagatgacaggcttcaggataactcgtattgggctaagggtggcgcagacaccggttacggcgcaaaggcacaggagatccttggccaagtcaagggaagggggtttaggcacgagaaaaccaagaagaagcgtggcacctacaggggcgggcaaatcgacctgcaaacccactcgatcaagttcgagaattcagacgacgagtgaaatggcctggtgctggtgggaagaagcgatgcgatggatggtgcatgcaatacaacacggtaccagctggattaaatcagttgcggtgtgccattatttgttagattgagcgacgtgagaaatcgtcgaaattttgtttgcttgttgggctcactgatttgctgattttgctacagcttatgcgacgttaacgttgctactctgcgtgttatgagtttgcccgtgctcttgattcctttcgaaatgactaccttggagccgctgatggaagtgcagtgagctaggcccagcgtagaactgggctctttctatcgacccac

SEQ ID NO: 30349 - DNA, 1906 bp, Zea Mays
tcactgtaccatgccactccaccgttccgacatccaaggctccaagtataaaccccgcggctgcaaaccctagccgcccgatgctcttcgtcccgcgccaagtcgtactcgccgcctcatcacagccccgcgccgccgcctcttccgccatggccaaggaggaatccaagaaggagaagaagaaggccaaggccaaggtggccaatggagccgccgccgccgccgccgccccggtccctggcgcgagggccgcggtggtcgcctccgtcgccgccttcctcgagtccgctgggctctcgcgcacgctcgtcgccctccaatccgaggccggcctcgaggccggtgcgtgggggtcgtcacaggtgaacttggaggagctggttgccagattcttagagtcgagcaattcaactcgggcggctgccattctgggaagcgatgagcaagacaaggaaaatgatgatatagcaggagaagttggcaaggaaaaaaagaggagcggcacagaagccggtgagcctgagagcaaggcgatcgagcctttagctgaggaaaagccgactgaaaatatggacggtgaggctaaagagaagaaacaaaagaagaagaaagacaagggtgacccttcagctgcgaatgctgctagcgagggaacaactgaaattgtgaagaacgccgaccagaaggacgatgaggccaaggagaagaaacagaagaagaagaaggacaagggtgacccctcagctgcgggcgctggcagcggcgaaacaactgaaacagtgaaggaggatgatcataagcttgatggcaagaagaagaagaaaaacaagaagcagggaaaggatgatgatgtcgaagctaggctggaaaaggcagaattagcaatacttaacaagtttgaggcagcagaaaagctcaatggaagagaggtagaaccaaaaggtcagaatgacagtgctgatgactgcagtggtgctgtggaaaggaaaaagaagaagaaagagaaatcatctgccgggacttcagagaagactgatgcaggaagtgcacctgctgaggctgatggtgccaagggaaagaatggtgctgtagaaacagtcaaggatgataatgagaaaaaggccaaaaaaaagcggaagaagtctaaccctgaagaaactgttcaggtggaaggtaaagaggctgcagggaaagattcagtcccaaaacaagatgatgcgaacaagagtgtaatggagattgaagaaggtaaccaagggaagtcgtcaaatgaaaatgcagttgctggcaaaaaacggaagctagaagaagttgaaggaagcattccccctgtgactgggaaagaagattgcacagccaacgaaagtctaagcaatggttttgcagaggataaaaaagaagaaagcaacacaaaaccaagcaaaaggcagaaacattcatctgagcccaagactgtgaccccatttcaacgtattaaggtggacgacgtcagatttgcagatgacaggcttcaggataactcgtattgggctaagggtggcgcagacaccggttacggcgcaaaggcacaggagatccttggccaagtcaagggaagggggtttaggcacgagaaaaccaagaagaagcgtggcacctacaggggcgggcaaatcgacctgcaaacccactcgatcaagttcgagaattcagacgacgagtgaaatggcctggtgctggtgggaagaagcgatgcgatggatggtgcatgcaatacaacacgcttatgcgacgttaacgttgctactctgcgtgttatgagtttgcccgtgctcttgattcctttcgaaatgactaccttggagccgctgatggaagtgcagtgagctaggcccagcgtagaactgggctctttctatcgacccac

SEQ ID NO: 30350 - DNA, 3933 bp, Zea Mays
cactggcaaagtggcaatggttattgctaaccatcaacccaacccgtcactttcccttctgtctggctccgcatcccagtcccagacccggcaagcgccggccatcgccatttcggatccgggcccgctcagcgcgcgggttcccgaacccggccggccggccgcgctcctcgccaccgccgccgccggccatgaagcgcgcgcgcagctccgaggtattcatcggcgtaggccggctgcgcgcacgcaggggcctggcgccgcttctcgcagcggcggctttcgcctacctactgttcgtgtccgtcaagctcacttacctcggcagcgctgggcccgcgcctgccgtcggccgcctggccaccaccggcgcgggcgagccagctgcgcgcgcgcgctcgagcggcggcggggccgtgtccgggtacggccgcatcaccggcgagatcctccggcggcacgaagccttcgaggagcggcggaagcggtgggggcagctggggaacttcacggagctcgagcgcgtggcggccgaagcgtgggcgctcggggccgccgcgtgggaggaggcctctgcgttcgacggcgacgtcgactacatcgcctcccgcgacgtcgccggggagggcacggccaagtgcccaggctcgctcgcgctcggcgccggggagaccacggcgttcctgccgtgcgggctggccgccgggtcggcagttaccgtggttgggacagcgcggacggcgcggccggagtacgtcgaggcgctggagcggagcggcacgggcaacgggacggtgctggtggcgcagttcgcggtggagctgcgcggcctgcgcgctaccgacggcgaggagccgcctaggatactgcacctcaacccgcgcctgcgcggcgactggagcagccgccccgtgctagagatgaacacctgcttccgaatgcagtggggcagggcacagcgctgcgacagtaccccttccggagacgatgacctggtcgatggactaagaaaatgtgagaaatgggactggcaggacgtagttgaatcgaaagaaacaaagacaagctcatggttcaacagattcatcgggcgagcaaagaaaccagaaatgagatggccattcccattttcagaggggaagatgtttgttctcactatccaagctggagtcgaaggataccatatcaatgtgggaggccgccacgttgcctcatttcctcataggatgggattcgccctcgaagacgcaacaggtttagccgtgacagggggcatagatgttcactctgtgtacgcaacagcgcttccaaaggcacatcctagcttttctctccagcaagtcttggaaatgtctgaaaggtggaaggctcgccctgtgccagaggaaccaatccatcttttcatcggcatcctctccgccacaaaccatttcgccgagcgcatggctattaggaaaacttggatgcagtttccggctatccaatcggggaatgcggttgctcggttctttgttgcgctgagccacagaaaggagataaatgcagcactgaagaaggaagcagagtattttggagacatagtcattctgccgttcatcgaccggtatgagctagtggttctgaaaacggttgcgatatgtcaatacggggtgcacaatgtcactgcagattacatcatgaagtgcgacgatgacacctttgtgcggctggatatagtactgcaccaaatcagtacctacaacaaaacctcacctctgtatctgggcaacctgaatctcttgcacaggcctctaagaaggggcaaatgggccgtcacctacgaggaatggccagaagcggtgtatcccccgtacgccaatggacctgggtacgttatctcggccggcattgcgagagacgtagcatcccggcatacaaaccactccctacggctgttcaagatggaggacgtgagcatgggcatgtgggtggaggactacaacgccagcgcccccgtgcagtatgtccacagctggaggttctgccagttcggctgcgtggacaactacttcacggcgcactaccagtcccccaggcagatgctgtgcctctgggagaagctgtcagcggggagagcgcactgcttcggcgcacagcgcacagctgctggaccagtggaccggcgggacaaggaaacccgcgcggtatccggtggttttgccaagaccctcccccgtttacaagccagaaggcaagctataggcgaaacttcgggggtcgtcgagggttctcgaccctcccttcccctctctcgcccgctcgctccctcaccgccggcgttctcgccgccagctacggacggggcacactgcgcagggtcccagccccgcctctcacccgaacgtcttcgctcccctcaccgggtaggcgtcgcgctctactggcaccaccccggccctcgcgctctactggcaccggaccggcgcggggtggcgcggagacctgtcccggccaggagaccgttccgtgctataccggtgaagatgctctttgcatagctcaagctccaaactgatggattctgatgacaagaagtttggaaatgggccaagggagcttactggtgctgttgatttgattaaccactacaaactgctgccacaccatgatttcttttgcaagaaacctttgccactggcaatatcagatacacattatcttcacaatattgtgggagacactgaaattcgaaaaggagaaggaatggagttagatcaacttgttcagaatgcatatatgagggataaacctgcttatattcagcccttcgatatggaaacactggggcaagcgttccaacttcgagaaacagctcctgtggttttgccctctactgaaaagggtataccgactatttcgggtaaaccaaaaagcgagtccaaggacaaagagaagaagcataaaaagcacaaagacagagagagggacaaagacaaggaacataagaagcacaaacatcggcataaggatcggagtaaggacaaagataaagacaaagacaaggataagaaaaaagataagagtggtcatcatgattctgattcaaagaaacatcatgaaaagaagaggaagcacgagggaactgaagattcagcagatgtgcataagcacaagaagagtaagcacaagagttccaaaaccgatgagatggggaatggacttattagttaacacttcctagttctagcttcaatccttgtaatttgctgttaaaaggagactgatggtctctgccatcaaaaccctgtgcagaatagtgatgacaacataagttggagatcttgataagaacgcgataaagaagtatttttgcagagtccattccgaggaaaattaaattacttaatacaggactaatccttcgaactgtgcaaccttctgttcctccctgacgaattggttgtaggagcggttgaaaggatatgccatgagattgtttcgattgcagggccagcgcacttattgatactaggcttcttatttaactcctaatttcggatgtagcgtgcatgagtatcctgttgagtagctgtggatggttttacagttggtctagagatgtagttgagggcagggaattggaaagaatttcgtgttcccgtcgtactgaccttggttgatagagagtttaaccagtagctaaaattaaatgttgctagtcagttccaagttttattctgcgtggaatgaattggagtcaaattagcacactgcttatttaaccatgataaagatcttgttattacaaagtataattattggttcgtggtcggaccttttgcgtgatttgtgccacatgtttaatcattttagctgcttgttgctgctaaggtcttgtttgaatgcactgaagctaatagttagctgtttggagctaatagttagctgcttgtt

SEQ ID NO: 30351 - DNA, 2376 bp, Zea Mays
cactttcccttctgtctggctccgcatcccagtcccagacccggcaagcgccggccatcgccatttcggatccgggcccgctcagcgcgcgggttcccgaacccggccggccggccgcgctcctcgccaccgccgccgccggccatgaagcgcgcgcgcagctccgaggtattcatcggcgtaggccggctgcgcgcacgcaggggcctggcgccgcttctcgcagcggcggctttcgcctacctactgttcgtgtccgtcaagctcacttacctcggcagcgctgggcccgcgcctgccgtcggccgcctggccaccaccggcgcgggcgagccagctgcgcgcgcgcgctcgagcggcggcggggccgtgtccgggtacggccgcatcaccggcgagatcctccggcggcacgaagccttcgaggagcggcggaagcggtgggggcagctggggaacttcacggagctcgagcgcgtggcggccgaagcgtgggcgctcggggccgccgcgtgggaggaggcctctgcgttcgacggcgacgtcgactacatcgcctcccgcgacgtcgccggggagggcacggccaagtgcccaggctcgctcgcgctcggcgccggggagaccacggcgttcctgccgtgcgggctggccgccgggtcggcagttaccgtggttgggacagcgcggacggcgcggccggagtacgtcgaggcgctggagcggagcggcacgggcaacgggacggtgctggtggcgcagttcgcggtggagctgcgcggcctgcgcgctaccgacggcgaggagccgcctaggatactgcacctcaacccgcgcctgcgcggcgactggagcagccgccccgtgctagagatgaacacctgcttccgaatgcagtggggcagggcacagcgctgcgacagtaccccttccggagacgatgacctggatatttgtatttgttcttgtgcatccagtattgtttgtggcggttggttgaagtataagggattcgccctcgaagacgcaacaggtttagccgtgacagggggcatagatgttcactctgtgtacgcaacagcgcttccaaaggcacatcctagcttttctctccagcaagtcttggaaatgtctgaaaggtggaaggctcgccctgtgccagaggaaccaatccatcttttcatcggcatcctctccgccacaaaccatttcgccgagcgcatggctattaggaaaacttggatgcagtttccggctatccaatcggggaatgcggttgctcggttctttgttgcgctgagccacagaaaggagataaatgcagcactgaagaaggaagcagagtattttggagacatagtcattctgccgttcatcgaccggtatgagctagtggttctgaaaacggttgcgatatgtcaatacggggtgcacaatgtcactgcagattacatcatgaagtgcgacgatgacacctttgtgcggctggatatagtactgcaccaaatcagtacctacaacaaaacctcacctctgtatctgggcaacctgaatctcttgcacaggcctctaagaaggggcaaatgggccgtcacctacgaggaatggccagaagcggtgtatcccccgtacgccaatggacctgggtacgttatctcggccggcattgcgagagacgtagcatcccggcatacaaaccactccctacggctgttcaagatggaggacgtgagcatgggcatgtgggtggaggactacaacgccagcgcccccgtgcagtatgtccacagctggaggttctgccagttcggctgcgtggacaactacttcacggcgcactaccagtcccccaggcagatgctgtgcctctgggagaagctgtcagcggggagagcgcactgctgtaactacagataacacgaggcccccagcccccaggggggaaatggtgacctagccgcctaggtgcatcaaggctcatgaccttcgttccattcgcctggcttcggtggttcggttccatacgaccatctgctcagatgactaatgccagaaaccatgatctcgacaccgcatgttctttggttcttagattgaaggtatacgggataagggtgttaccaactgctgcttcatcttcaattcttcactgaggtgaatgctggcatgaggatagaaggggagggggcgtgaattcacattggctgtttgtacaggccgccggcctatttgtagaactgcaaatccgtacccactggaacgggaaattgtctcccctgtgtggctgtgtatgcagatctgtgtgtactattcgtgcgaatcggtggtgtatgtgtatttgacatccaacaaagttaacttagacggcacggattc

SEQ ID NO: 30352 - DNA, 4369 bp, Zea Mays
cactttcccttctgtctggctccgcatcccagtcccagacccggcaagcgccggccatcgccatttcggatccgggcccgctcagcgcgcgggttcccgaacccggccggccggccgcgctcctcgccaccgccgccgccggccatgaagcgcgcgcgcagctccgaggtattcatcggcgtaggccggctgcgcgcacgcaggggcctggcgccgcttctcgcagcggcggctttcgcctacctactgttcgtgtccgtcaagctcacttacctcggcagcgctgggcccgcgcctgccgtcggccgcctggccaccaccggcgcgggcgagccagctgcgcgcgcgcgctcgagcggcggcggggccgtgtccgggtacggccgcatcaccggcgagatcctccggcggcacgaagccttcgaggagcggcggaagcggtgggggcagctggggaacttcacggagctcgagcgcgtggcggccgaagcgtgggcgctcggggccgccgcgtgggaggaggcctctgcgttcgacggcgacgtcgactacatcgcctcccgcgacgtcgccggggagggcacggccaagtgcccaggctcgctcgcgctcggcgccggggagaccacggcgttcctgccgtgcgggctggccgccgggtcggcagttaccgtggttgggacagcgcggacggcgcggccggagtacgtcgaggcgctggagcggagcggcacgggcaacgggacggtgctggtggcgcagttcgcggtggagctgcgcggcctgcgcgctaccgacggcgaggagccgcctaggatactgcacctcaacccgcgcctgcgcggcgactggagcagccgccccgtgctagagatgaacacctgcttccgaatgcagtggggcagggcacagcgctgcgacagtaccccttccggagacgatgacctggtcgatggactaagaaaatgtgagaaatgggactggcaggacgtagttgaatcgaaagaaacaaagacaagctcatggttcaacagattcatcgggcgagcaaagaaaccagaaatgagatggccattcccattttcagaggggaagatgtttgttctcactatccaagctggagtcgaaggataccatatcaatgtgggaggccgccacgttgcctcatttcctcataggatgggattcgccctcgaagacgcaacaggtttagccgtgacagggggcatagatgttcactctgtgtacgcaacagcgcttccaaaggcacatcctagcttttctctccagcaagtcttggaaatgtctgaaaggtggaaggctcgccctgtgccagaggaaccaatccatcttttcatcggcatcctctccgccacaaaccatttcgccgagcgcatggctattaggaaaacttggatgcagtttccggctatccaatcggggaatgcggttgctcggttctttgttgcgctgagccacagaaaggagataaatgcagcactgaagaaggaagcagagtattttggagacatagtcattctgccgttcatcgaccggtatgagctagtggttctgaaaacggttgcgatatgtcaatacggggtgcacaatgtcactgcagattacatcatgaagtgcgacgatgacacctttgtgcggctggatatagtactgcaccaaatcagtacctacaacaaaacctcacctctgtatctgggcaacctgaatctcttgcacaggcctctaagaaggggcaaatgggccgtcacctacgaggaatggccagaagcggtgtatcccccgtacgccaatggacctgggtacgttatctcggccggcattgcgagagacgtagcatcccggcatacaaaccactccctacggctgttcaagatggaggacgtgagcatgggcatgtgggtggaggactacaacgccagcgcccccgtgcagtatgtccacagctggaggttctgccagttcggctgcgtggacaactacttcacggcgcactaccagtcccccaggcagatgctgtgcctctgggagaagctgtcagcggggagagcgcactgctgtaactacagataacacgaggcccccagcccccaggggggaaatggtgacctagccgcctaggtgcatcaaggctcatgaccttcgttccattcgcctggcttcggtggttcggttccatacgaccatctgctcagatgactaatgccagaaaccatgatctcgacaccgcatgttctttggttcttagattgaaggtatacgggataagggtgttaccaactgctgcttcatcttcaattcttcactgaggtgaatgctggcatgaggatagaaggggagggggcgtgaattcacattggctgtttgtacaggccgccggcctatttgtagaactgcaaatccgtacccactggaacgggaaattgtctcccctgtgtggctgtgtatgcagatctgtgtgtactattcgtgcgaatcggtggtgtatgtgtatttgacatccaacaaagttaacttagacggcacggattccttgttggagtcggcgcacagcgcacagctgctggaccagtggaccggcgggacaaggaaacccgcgcggtatccggtggttttgccaagaccctcccccgtttacaagccagaaggcaagctataggcgaaacttcgggggtcgtcgagggttctcgaccctcccttcccctctctcgcccgctcgctccctcaccgccggcgttctcgccgccagctacggacggggcacactgcgcagggtcccagccccgcctctcacccgaacgtcttcgctcccctcaccgggtaggcgtcgcgctctactggcaccaccccggccctcgcgctctactggcaccggaccggcgcggggtggcgcggagacctgtcccggccaggagaccgttccgtgctataccggtgaagatgctctttgcatagctcaagctccaaactgatggattctgatgacaagaagtttggaaatgggccaagggagcttactggtgctgttgatttgattaaccactacaaactgctgccacaccatgatttcttttgcaagaaacctttgccactggcaatatcagatacacattatcttcacaatattgtgggagacactgaaattcgaaaaggagaaggaatggagttagatcaacttgttcagaatgcatatatgagggataaacctgcttatattcagcccttcgatatggaaacactggggcaagcgttccaacttcgagaaacagctcctgtggttttgccctctactgaaaagggtataccgactatttcgggtaaaccaaaaagcgagtccaaggacaaagagaagaagcataaaaagcacaaagacagagagagggacaaagacaaggaacataagaagcacaaacatcggcataaggatcggagtaaggacaaagataaagacaaagacaaggataagaaaaaagataagagtggtcatcatgattctgattcaaagaaacatcatgaaaagaagaggaagcacgagggaactgaagattcagcagatgtgcataagcacaagaagagtaagcacaagagttccaaaaccgatgagatggggaatggacttattagttaacacttcctagttctagcttcaatccttgtaatttgctgttaaaaggagactgatggtctctgccatcaaaaccctgtgcagaatagtgatgacaacataagttggagatcttgataagaacgcgataaagaagtatttttgcagagtccattccgaggaaaattaaattacttaatacaggactaatccttcgaactgtgcaaccttctgttcctccctgacgaattggttgtaggagcggttgaaaggatatgccatgagattgtttcgattgcagggccagcgcacttattgatactaggcttcttatttaactcctaatttcggatgtagcgtgcatgagtatcctgttgagtagctgtggatggttttacagttggtctagagatgtagttgagggcagggaattggaaagaatttcgtgttcccgtcgtactgaccttggttgatagagagtttaaccagtagctaaaattaaatgttgctagtcagttccaagttttattctgcgtggaatgaattggagtcaaattagcacactgcttatttaaccatgataaagatcttgttattacaaagtataattattggttcgtggtcggaccttttgcgtgatttgtgccacatgtttaatcattttagctgcttgttgctgctaaggtcttgtttgaatgcactgaagctaatagttagctgtttggagctaatagttagctgcttgtt

SEQ ID NO: 30353 - DNA, 3897 bp, Zea Mays
cactttcccttctgtctggctccgcatcccagtcccagacccggcaagcgccggccatcgccatttcggatccgggcccgctcagcgcgcgggttcccgaacccggccggccggccgcgctcctcgccaccgccgccgccggccatgaagcgcgcgcgcagctccgaggtattcatcggcgtaggccggctgcgcgcacgcaggggcctggcgccgcttctcgcagcggcggctttcgcctacctactgttcgtgtccgtcaagctcacttacctcggcagcgctgggcccgcgcctgccgtcggccgcctggccaccaccggcgcgggcgagccagctgcgcgcgcgcgctcgagcggcggcggggccgtgtccgggtacggccgcatcaccggcgagatcctccggcggcacgaagccttcgaggagcggcggaagcggtgggggcagctggggaacttcacggagctcgagcgcgtggcggccgaagcgtgggcgctcggggccgccgcgtgggaggaggcctctgcgttcgacggcgacgtcgactacatcgcctcccgcgacgtcgccggggagggcacggccaagtgcccaggctcgctcgcgctcggcgccggggagaccacggcgttcctgccgtgcgggctggccgccgggtcggcagttaccgtggttgggacagcgcggacggcgcggccggagtacgtcgaggcgctggagcggagcggcacgggcaacgggacggtgctggtggcgcagttcgcggtggagctgcgcggcctgcgcgctaccgacggcgaggagccgcctaggatactgcacctcaacccgcgcctgcgcggcgactggagcagccgccccgtgctagagatgaacacctgcttccgaatgcagtggggcagggcacagcgctgcgacagtaccccttccggagacgatgacctggtcgatggactaagaaaatgtgagaaatgggactggcaggacgtagttgaatcgaaagaaacaaagacaagctcatggttcaacagattcatcgggcgagcaaagaaaccagaaatgagatggccattcccattttcagaggggaagatgtttgttctcactatccaagctggagtcgaaggataccatatcaatgtgggaggccgccacgttgcctcatttcctcataggatgggattcgccctcgaagacgcaacaggtttagccgtgacagggggcatagatgttcactctgtgtacgcaacagcgcttccaaaggcacatcctagcttttctctccagcaagtcttggaaatgtctgaaaggtggaaggctcgccctgtgccagaggaaccaatccatcttttcatcggcatcctctccgccacaaaccatttcgccgagcgcatggctattaggaaaacttggatgcagtttccggctatccaatcggggaatgcggttgctcggttctttgttgcgctgagccacagaaaggagataaatgcagcactgaagaaggaagcagagtattttggagacatagtcattctgccgttcatcgaccggtatgagctagtggttctgaaaacggttgcgatatgtcaatacggggtgcacaatgtcactgcagattacatcatgaagtgcgacgatgacacctttgtgcggctggatatagtactgcaccaaatcagtacctacaacaaaacctcacctctgtatctgggcaacctgaatctcttgcacaggcctctaagaaggggcaaatgggccgtcacctacgagcgtgcctgcaggaatggccagaagcggtgtatcccccgtacgccaatggacctgggtacgttatctcggccggcattgcgagagacgtagcatcccggcatacaaaccactccctacggctgttcaagatggaggacgtgagcatgggcatgtgggtggaggactacaacgccagcgcccccgtgcagtatgtccacagctggaggttctgccagttcggctgcgtggacaactacttcacggcgcactaccagtcccccaggcagatgctgtgcctctgggagaagctgtcagcggggagagcgcactgcttcggcgcacagcgcacagctgctggaccagtggaccggcgggacaaggaaacccgcgcggtatccggtggttttgccaagaccctcccccgtttacaagccagaaggcaagctataggcgaaacttcgggggtcgtcgagggttctcgaccctcccttcccctctctcgcccgctcgctccctcaccgccggcgttctcgccgccagctacggacggggcacactgcgcagggtcccagccccgcctctcacccgaacgtcttcgctcccctcaccgggtaggcgtcgcgctctactggcaccaccccggccctcgcgctctactggcaccggaccggcgcggggtggcgcggagacctgtcccggccaggagaccgttccgtgctataccggtgaagatgctctttgcatagctcaagctccaaactgatggattctgatgacaagaagtttggaaatgggccaagggagcttactggtgctgttgatttgattaaccactacaaactgctgccacaccatgatttcttttgcaagaaacctttgccactggcaatatcagatacacattatcttcacaatattgtgggagacactgaaattcgaaaaggagaaggaatggagttagatcaacttgttcagaatgcatatatgagggataaacctgcttatattcagcccttcgatatggaaacactggggcaagcgttccaacttcgagaaacagctcctgtggttttgccctctactgaaaagggtataccgactatttcgggtaaaccaaaaagcgagtccaaggacaaagagaagaagcataaaaagcacaaagacagagagagggacaaagacaaggaacataagaagcacaaacatcggcataaggatcggagtaaggacaaagataaagacaaagacaaggataagaaaaaagataagagtggtcatcatgattctgattcaaagaaacatcatgaaaagaagaggaagcacgagggaactgaagattcagcagatgtgcataagcacaagaagagtaagcacaagagttccaaaaccgatgagatggggaatggacttattagttaacacttcctagttctagcttcaatccttgtaatttgctgttaaaaggagactgatggtctctgccatcaaaaccctgtgcagaatagtgatgacaacataagttggagatcttgataagaacgcgataaagaagtatttttgcagagtccattccgaggaaaattaaattacttaatacaggactaatccttcgaactgtgcaaccttctgttcctccctgacgaattggttgtaggagcggttgaaaggatatgccatgagattgtttcgattgcagggccagcgcacttattgatactaggcttcttatttaactcctaatttcggatgtagcgtgcatgagtatcctgttgagtagctgtggatggttttacagttggtctagagatgtagttgagggcagggaattggaaagaatttcgtgttcccgtcgtactgaccttggttgatagagagtttaaccagtagctaaaattaaatgttgctagtcagttccaagttttattctgcgtggaatgaattggagtcaaattagcacactgcttatttaaccatgataaagatcttgttattacaaagtataattattggttcgtggtcggaccttttgcgtgatttgtgccacatgtttaatcattttagctgcttgttgctgctaaggtcttgtttgaatgcactgaagctaatagttagctgtttggagctaatagttagctgcttgtt

SEQ ID NO: 30354 - DNA, 3690 bp, Zea Mays
cactttcccttctgtctggctccgcatcccagtcccagacccggcaagcgccggccatcgccatttcggatccgggcccgctcagcgcgcgggttcccgaacccggccggccggccgcgctcctcgccaccgccgccgccggccatgaagcgcgcgcgcagctccgaggtattcatcggcgtaggccggctgcgcgcacgcaggggcctggcgccgcttctcgcagcggcggctttcgcctacctactgttcgtgtccgtcaagctcacttacctcggcagcgctgggcccgcgcctgccgtcggccgcctggccaccaccggcgcgggcgagccagctgcgcgcgcgcgctcgagcggcggcggggccgtgtccgggtacggccgcatcaccggcgagatcctccggcggcacgaagccttcgaggagcggcggaagcggtgggggcagctggggaacttcacggagctcgagcgcgtggcggccgaagcgtgggcgctcggggccgccgcgtgggaggaggcctctgcgttcgacggcgacgtcgactacatcgcctcccgcgacgtcgccggggagggcacggccaagtgcccaggctcgctcgcgctcggcgccggggagaccacggcgttcctgccgtgcgggctggccgccgggtcggcagttaccgtggttgggacagcgcggacggcgcggccggagtacgtcgaggcgctggagcggagcggcacgggcaacgggacggtgctggtggcgcagttcgcggtggagctgcgcggcctgcgcgctaccgacggcgaggagccgcctaggatactgcacctcaacccgcgcctgcgcggcgactggagcagccgccccgtgctagagatgaacacctgcttccgaatgcagtggggcagggcacagcgctgcgacagtaccccttccggagacgatgacctggtcgatggactaagaaaatgtgagaaatgggactggcaggacgtagttgaatcgaaagaaacaaagacaagctcatggttcaacagattcatcgggcgagcaaagaaaccagaaatgagatggccattcccattttcagaggggaagatgtttgttctcactatccaagctggagtcgaaggataccatatcaatgtgggaggccgccacgttgcctcatttcctcataggatgggattcgccctcgaagacgcaacaggtttagccgtgacagggggcatagatgttcactctgtgtacgcaacagcgcttccaaaggcacatcctagcttttctctccagcaagtcttggaaatgtctgaaaggtggaaggctcgccctgtgccagaggaaccaatccatcttttcatcggcatcctctccgccacaaaccatttcgccgagcgcatggctattaggaaaacttggatgcagtttccggctatccaatcggggaatgcggttgctcggttctttgttgcgctgagccacagaaaggagataaatgcagcactgaagaaggaagcagagtattttggagacatagtcattctgccgttcatcgaccggtatgagctagtggttctgaaaacggttgcgatatgtcaatacggggtgcacaatgtcactgcagattacatcatgaagtgcgacgatgacacctttgtgcggctggatatagtactgcaccaaatcagtacctacaacaaaacctcacctctgtatctgggcaacctgaatctcttgcacaggcctctaagaaggggcaaatgggccgtcacctacgaggaatggccagaagcggtgtatcccccgtacgccaatggacctgggtacgttatctcggccggcattgcgagagacgtagcatcccggcatacaaaccactccctacggctgttcaagatggaggacgtgagcatgggcatgtgggtggaggactacaacgccagcgcccccgtgcagtatgtccacagctggaggttctgccagttcggctgcgtggacaactacttcacggcgcactaccagtcccccaggcagatgctgtgcctctgggagaagctgtcagcggggagagcgcactgctgtaactacagataacacgaggcccccagcccccaggggggaaatggtgacctagccgcctaggtgcatcaaggctcatgaccttcgttccattcgcctggcttcggtggttcggttccatacgaccatctgctcagatgactaatgccagaaaccatgatctcgacaccgcatgttctttggttcttagattgaaggtgaagatgctctttgcatagctcaagctccaaactgatggattctgatgacaagaagtttggaaatgggccaagggagcttactggtgctgttgatttgattaaccactacaaactgctgccacaccatgatttcttttgcaagaaacctttgccactggcaatatcagatacacattatcttcacaatattgtgggagacactgaaattcgaaaaggagaaggaatggagttagatcaacttgttcagaatgcatatatgagggataaacctgcttatattcagcccttcgatatggaaacactggggcaagcgttccaacttcgagaaacagctcctgtggttttgccctctactgaaaagggtataccgactatttcgggtaaaccaaaaagcgagtccaaggacaaagagaagaagcataaaaagcacaaagacagagagagggacaaagacaaggaacataagaagcacaaacatcggcataaggatcggagtaaggacaaagataaagacaaagacaaggataagaaaaaagataagagtggtcatcatgattctgattcaaagaaacatcatgaaaagaagaggaagcacgagggaactgaagattcagcagatgtgcataagcacaagaagagtaagcacaagagttccaaaaccgatgagatggggaatggacttattagttaacacttcctagttctagcttcaatccttgtaatttgctgttaaaaggagactgatggtctctgccatcaaaaccctgtgcagaatagtgatgacaacataagttggagatcttgataagaacgcgataaagaagtatttttgcagagtccattccgaggaaaattaaattacttaatacaggactaatccttcgaactgtgcaaccttctgttcctccctgacgaattggttgtaggagcggttgaaaggatatgccatgagattgtttcgattgcagggccagcgcacttattgatactaggcttcttatttaactcctaatttcggatgtagcgtgcatgagtatcctgttgagtagctgtggatggttttacagttggtctagagatgtagttgagggcagggaattggaaagaatttcgtgttcccgtcgtactgaccttggttgatagagagtttaaccagtagctaaaattaaatgttgctagtcagttccaagttttattctgcgtggaatgaattggagtcaaattagcacactgcttatttaaccatgataaagatcttgttattacaaagtataattattggttcgtggtcggaccttttgcgtgatttgtgccacatgtttaatcattttagctgcttgttgctgctaaggtcttgtttgaatgcactgaagctaatagttagctgtttggagctaatagttagctgcttgtt

SEQ ID NO: 30355 - DNA, 2587 bp, Zea Mays
cgaacagtcaaggctggcatcgtgctgcggtgtccgagtcacatcgtcttcccggaaccaacaagtcgttgggtctgaccgtctgccgtggccgtaccgggccgccctgttcatcgggtcaaatccttcgtcttcttcctcgtcgcatcctctccacctaatccacaatccggaacctcaccgtggagaaccccagatcaaaccctttccccgcccattccccttcgcacttccactctcccagtcctccggtgcgattcgtttcttccttacttccctgcccgcccgagggagaagacgaaatcgggcgaggaatccggccgccagggtttcttgatccgggcgcgtgattcgtcgtgcccaggcaccagtgagaaatcaaatcaagaacacgccagcggaagtgagacgagggcgcggggaggaatcaagatcgcttctttgagctgccagttcccccgcgccaatgccggatccggccggcggcgccgggctggcatgttccctctaactgcccctgtccgccgccgcggctcccgatgctcgtgtggtcttcgggagcaggagagggagcagcggccgtcgtgggcggcggctaggagcgaagatgcagatccggctgtcgccgagcatgaggagcatcaccatctccactagccatggcctgctagacttgatgaggctcaaggtcgccgcgcgacacttttcctaccgcaccgtcttccacaccgtcctcatcctcgccttcctcctgcccttcgtcttcatactcaccgccatcatgacgctagagggcttcaacaagtgctcctcactagattgtctaggaagacgtttaggtccgcgccttcttggtaggggaaacgatggttccatgaggcttgtgagggatttatatgtgatgcttgataaagtaaattctgaggaagcacctcttgacttgaaggttccagaaacttttgatgaatttatctgggacatgaagaataatgattatgatttaagatggagagcatggataaggaattgaggtcatcaaggctatcagagcagttgaacaagcactatgctgcaattgctattcctaaaggcctttattgcctttcattgcgtttaactgatgaatactcctcaaatgcccttgcaaggaaacaattaccgcccccagagttggtgccttgtctttcagacaactcctatttccattttgtgttagcatcagataacatccttgcagcctcagttgtggtcagatcaacaattagatcatcactgaagcctgagaggattgttttccatgttattactgataaaaagacctatcctgccatgcattcatggtttgctttaaattctctcagtcctgctattgttgaggtgaaaggtgttcatcaatttgattggttaacacaagaaaatgttcctgtacttgaatcaatagaaactcagcgcgctgccagagatcgttaccatggaagtcgccgcccaataaccagtgctaatgatagcccaagggtttttgctgccaagcttcaggcaggaagtccaacatatactaatgtgctcaatcatattcgaatatacatgcctgagttgttcccaagcctcaacaaagtcgtatttcttgatgatgatgttgttgtccagcatgacctatcaccactttgggatattgatctatctgggaaggttaatggcgctgttgagacttgcagaggtggagatagttgggtgatgtctaagaggttcaggaattatttaaacttttctcatcccctcattgcaaaaaactttgatccttcagagtgtgcttgggcatatggtatgaatatttttgacctgaatgcatggaggaagacaacaatcaaagacaaataccatcattgggtcaaggagaacctgaagtcaaacttcacactttggaggctgggaacattaccaccaggccttatagcatttaaaggccatgttcacccaattgatccatcatggcatctgttaggtttggggtatcaggaaaagacagatatcagtagtgttgaacaagcagcagttatacattataacgggcaaagtaaaccatggctggagattggttttaaacatcttcagccattttggacaaaatatgtgaactactcaaatgaattcttaagaaactgccatataatggagccacagttgtagattgtcgtgacaaaataaataaaaagcatatatcaagtgaaattaaattcgttattttggaagtcaacatcagagagtttatgaagggtaactggggagctcagtaacccccctccatggtcatatgcgttgatggtgaatatccaatgaacagagcatctttcccctcataggaccccttcccttttaatttattccatttgtatcatagctcatgaaattatgatattgtttaggatggttcttttgtattcgatggagcaatatatgagttgaattgatggtagtcccatcattattgtaattgattaagagtatacacagttcatgtgaaaagcatggattttgattatgcaaagcaaaccttgtatacttgttacttatttttagattctctcaa

SEQ ID NO: 30356 - DNA, 2545 bp, Zea Mays
ggctggcatcgtgctgcggtgtccgagtcacatcgtcttcccggaaccaacaagtcgttgggtctgaccgtctgccgtggccgtaccgggccgccctgttcatcgggtcaaatccttcgtcttcttcctcgtcgcatcctctccacctaatccacaatccggaacctcaccgtggagaaccccagatcaaaccctttccccgcccattccccttcgcacttccactctcccagtcctccggtgcgattcgtttcttccttacttccctgcccgcccgagggagaagacgaaatcgggcgaggaatccggccgccagggtttcttgatccgggcgcgtgattcgtcgtgcccaggcaccagtgagaaatcaaatcaagaacacgccagcggaagtgagacgagggcgcggggaggaatcaagatcgcttctttgagctgccagttcccccgcgccaatgccggatccggccggcggcgccgggctggcatgttccctctaactgcccctgtccgccgccgcggctcccgatgctcgtgtggtcttcgggagcaggagagggagcagcggccgtcgtgggcggcggctaggagcgaagatgcagatccggctgtcgccgagcatgaggagcatcaccatctccactagccatggcctgctagacttgatgaggctcaaggtcgccgcgcgacacttttcctaccgcaccgtcttccacaccgtcctcatcctcgccttcctcctgcccttcgtcttcatactcaccgccatcatgacgctagagggcttcaacaagtgctcctcactagaggcttgtgagggatttatatgtgatgcttgataaagtaaattctgaggaagcacctcttgacttgaaggttccagaaacttttgatgaatttatctgggacatgaagaataatgattatgatttaaggtcatttgcttttaagctgaaggctacgatggagagcatggataaggaattgaggtcatcaaggctatcagagcagttgaacaagcactatgctgcaattgctattcctaaaggcctttattgcctttcattgcgtttaactgatgaatactcctcaaatgcccttgcaaggaaacaattaccgcccccagagttggtgccttgtctttcagacaactcctatttccattttgtgttagcatcagataacatccttgcagcctcagttgtggtcagatcaacaattagatcatcactgaagcctgagaggattgttttccatgttattactgataaaaagacctatcctgccatgcattcatggtttgctttaaattctctcagtcctgctattgttgaggtgaaaggtgttcatcaatttgattggttaacacaagaaaatgttcctgtacttgaatcaatagaaactcagcgcgctgccagagatcgttaccatggaagtcgccgcccaataaccagtgctaatgatagcccaagggtttttgctgccaagcttcaggcaggaagtccaacatatactaatgtgctcaatcatattcgaatatacatgcctgagttgttcccaagcctcaacaaagtcgtatttcttgatgatgatgttgttgtccagcatgacctatcaccactttgggatattgatctatctgggaaggttaatggcgctgttgagacttgcagaggtggagatagttgggtgatgtctaagaggttcaggaattatttaaacttttctcatcccctcattgcaaaaaactttgatccttcagagtgtgcttgggcatatggtatgaatatttttgacctgaatgcatggaggaagacaacaatcaaagacaaataccatcattgggtcaaggagaacctgaagtcaaacttcacactttggaggctgggaacattaccaccaggccttatagcatttaaaggccatgttcacccaattgatccatcatggcatctgttaggtttggggtatcaggaaaagacagatatcagtagtgttgaacaagcagcagttatacattataacgggcaaagtaaaccatggctggagattggttttaaacatcttcagccattttggacaaaatatgtgaactactcaaatgaattcttaagaaactgccatataatggagccacagttgtagattgtcgtgacaaaataaataaaaagcatatatcaagtgaaattaaattcgttattttggaagtcaacatcagagagtttatgaagggtaactggggagctcagtaacccccctccatggtcatatgcgttgatggtgaatatccaatgaacagagcatctttcccctcataggaccccttcccttttaatttattccatttgtatcatagctcatgaaattatgatattgtttaggatggttcttttgtattcgatggagcaatatatgagttgaattgatggtagtcccatcattattgtaattgattaagagtatacacagttcatgtgaaaagcatggattttgattatgcaaagcaaaccttgtatacttgttacttatttttagattctctcaa

SEQ ID NO: 30357 - DNA, 2609 bp, Zea Mays
catcgtgctgcggtgtccgagtcacatcgtcttcccggaaccaacaagtcgttgggtctgaccgtctgccgtggccgtaccgggccgccctgttcatcgggtcaaatccttcgtcttcttcctcgtcgcatcctctccacctaatccacaatccggaacctcaccgtggagaaccccagatcaaaccctttccccgcccattccccttcgcacttccactctcccagtcctccggtgcgattcgtttcttccttacttccctgcccgcccgagggagaagacgaaatcgggcgaggaatccggccgccagggtttcttgatccgggcgcgtgattcgtcgtgcccaggcaccagtgagaaatcaaatcaagaacacgccagcggaagtgagacgagggcgcggggaggaatcaagatcgcttctttgagctgccagttcccccgcgccaatgccggatccggccggcggcgccgggctggcatgttccctctaactgcccctgtccgccgccgcggctcccgatgctcgtgtggtcttcgggagcaggagagggagcagcggccgtcgtgggcggcggctaggagcgaagatgcagatccggctgtcgccgagcatgaggagcatcaccatctccactagccatggcctgctagacttgatgaggctcaaggtcgccgcgcgacacttttcctaccgcaccgtcttccacaccgtcctcatcctcgccttcctcctgcccttcgtcttcatactcaccgccatcatgacgctagagggcttcaacaagtgctcctcactagctatttttcagattgtctaggaagacgtttaggtccgcgccttcttggtaggggaaacgatggttccatgaggcttgtgagggatttatatgtgatgcttgataaagtaaattctgaggaagcacctcttgacttgaaggttccagaaacttttgatgaatttatctgggacatgaagaataatgattatgatttaaggtcatttgcttttaagctgaaggctacgatggagagcatggataaggaattgaggtcatcaaggctatcagagcagttgaacaagcactatgctgcaattgctattcctaaaggcctttattgcctttcattgcgtttaactgatgaatactcctcaaatgcccttgcaaggaaacaattaccgcccccagagttggtgccttgtctttcagacaactcctatttccattttgtgttagcatcagataacatccttgcagcctcagttgtggtcagatcaacaattagatcatcactgaagcctgagaggattgttttccatgttattactgataaaaagacctatcctgccatgcattcatggtttgctttaaattctctcagtcctgctattgttgaggtgaaaggtgttcatcaatttgattggttaacacaagaaaatgttcctgtacttgaatcaatagaaactcagcgcgctgccagagatcgttaccatggaagtcgccgcccaataaccagtgctaatgatagcccaagggtttttgctgccaagcttcaggcaggaagtccaacatatactaatgtgctcaatcatattcgaatatacatgcctgagttgttcccaagcctcaacaaagtcgtatttcttgatgatgatgttgttgtccagcatgacctatcaccactttgggatattgatctatctgggaaggttaatggcgctgttgagacttgcagaggtggagatagttgggtgatgtctaagaggttcaggaattatttaaacttttctcatcccctcattgcaaaaaactttgatccttcagagtgtgcttgggcatatggtatgaatatttttgacctgaatgcatggaggaagacaacaatcaaagacaaataccatcattgggtcaaggagaacctgaagtcaaacttcacactttggaggctgggaacattaccaccaggccttatagcatttaaaggccatgttcacccaattgatccatcatggcatctgttaggtttggggtatcaggaaaagacagatatcagtagtgttgaacaagcagcagttatacattataacgggcaaagtaaaccatggctggagattggttttaaacatcttcagccattttggacaaaatatgtgaactactcaaatgaattcttaagaaactgccatataatggagccacagttgtagattgtcgtgacaaaataaataaaaagcatatatcaagtgaaattaaattcgttattttggaagtcaacatcagagagtttatgaagggtaactggggagctcagtaacccccctccatggtcatatgcgttgatggtgaatatccaatgaacagagcatctttcccctcataggaccccttcccttttaatttattccatttgtatcatagctcatgaaattatgatattgtttaggatggttcttttgtattcgatggagcaatatatgagttgaattgatggtagtcccatcattattgtaattgattaagagtatacacagttcatgtgaaaagcatggattttgattatgcaaagcaaaccttgtatacttgttacttatttttagattctctcaa

SEQ ID NO: 30358 - DNA, 2406 bp, Zea Mays
catcgtgctgcggtgtccgagtcacatcgtcttcccggaaccaacaagtcgttgggtctgaccgtctgccgtggccgtaccgggccgccctgttcatcgggtcaaatccttcgtcttcttcctcgtcgcatcctctccacctaatccacaatccggaacctcaccgtggagaaccccagatcaaaccctttccccgcccattccccttcgcacttccactctcccagtcctccggtgcgattcgtttcttccttacttccctgcccgcccgagggagaagacgaaatcgggcgaggaatccggccgccagggtttcttgatccgggcgcgtgattcgtcgtgcccaggcaccagtgagaaatcaaatcaagaacacgccagcggaagtgagacgagggcgcggggaggaatcaagatcgcttctttgagctgccagttcccccgcgccaatgccggatccggccggcggcgccgggctggcatgttccctctaactgcccctgtccgccgccgcggctcccgatgctcgtgtggtcttcgggagcaggagagggagcagcggccgtcgtgggcggcggctaggagcgaagatgcagatccggctgtcgccgagcatgaggagcatcaccatctccactagccatggcctgctagacttgatgaggctcaaggtcgccgcgcgacacttttcctaccgcaccgtcttccacaccgtcctcatcctcgccttcctcctgcccttcgtcttcatactcaccgccatcatgacgctagagggcttcaacaagtgctcctcactagattgtctaggaagacgtttaggtccgcgccttcttggtaggggaaacgatggttccatgaggcttgtgagggatttatatgtgatgcttgataaagtaaattctgaggaagcacctcttgacttgaaggttccagaaacttttgatgaatttatctgggacatgaagaataatgattatgatttaaggtcatttgcttttaagctgaaggctacgatggagagcatggataaggaattgaggtcatcaaggctatcagagcagttgaacaagcactatgctgcaattgctattcctaaaggcctttattgcctttcattgcgtttaactgatgaatactcctcaaatgcccttgcaaggaaacaattaccgcccccagatcctgctattgttgaggtgaaaggtgttcatcaatttgattggttaacacaagaaaatgttcctgtacttgaatcaatagaaactcagcgcgctgccagagatcgttaccatggaagtcgccgcccaataaccagtgctaatgatagcccaagggtttttgctgccaagcttcaggcaggaagtccaacatatactaatgtgctcaatcatattcgaatatacatgcctgagttgttcccaagcctcaacaaagtcgtatttcttgatgatgatgttgttgtccagcatgacctatcaccactttgggatattgatctatctgggaaggttaatggcgctgttgagacttgcagaggtggagatagttgggtgatgtctaagaggttcaggaattatttaaacttttctcatcccctcattgcaaaaaactttgatccttcagagtgtgcttgggcatatggtatgaatatttttgacctgaatgcatggaggaagacaacaatcaaagacaaataccatcattgggtcaaggagaacctgaagtcaaacttcacactttggaggctgggaacattaccaccaggccttatagcatttaaaggccatgttcacccaattgatccatcatggcatctgttaggtttggggtatcaggaaaagacagatatcagtagtgttgaacaagcagcagttatacattataacgggcaaagtaaaccatggctggagattggttttaaacatcttcagccattttggacaaaatatgtgaactactcaaatgaattcttaagaaactgccatataatggagccacagttgtagattgtcgtgacaaaataaataaaaagcatatatcaagtgaaattaaattcgttattttggaagtcaacatcagagagtttatgaagggtaactggggagctcagtaacccccctccatggtcatatgcgttgatggtgaatatccaatgaacagagcatctttcccctcataggaccccttcccttttaatttattccatttgtatcatagctcatgaaattatgatattgtttaggatggttcttttgtattcgatggagcaatatatgagttgaattgatggtagtcccatcattattgtaattgattaagagtatacacagttcatgtgaaaagcatggattttgattatgcaaagcaaaccttgtatacttgttacttatttttagattctctcaa

SEQ ID NO: 30359 - DNA, 1829 bp, Zea Mays
ctgattcggttggtgtggataacaggaatgagattgtctaggaagacgtttaggtccgcgccttcttggtaggggaaacgatggttccatgaggcttgtgagggatttatatgtgatgcttgataaagtaaattctgaggaagcacctcttgacttgaaggttccagaaacttttgatgaatttatctgggacatgaagaataatgattatgatttaaggtcatttgcttttaagctgaaggctacgatggagagcatggataaggaattgaggtcatcaaggctatcagagcagttgaacaagcactatgctgcaattgctattcctaaaggcctttattgcctttcattgcgtttaactgatgaatactcctcaaatgcccttgcaaggaaacaattaccgcccccagagttggtgccttgtctttcagacaactcctatttccattttgtgttagcatcagataacatccttgcagcctcagttgtggtcagatcaacaattagatcatcactgaagcctgagaggattgttttccatgttattactgataaaaagacctatcctgccatgcattcatggtttgctttaaattctctcagtcctgctattgttgaggtgaaaggtgttcatcaatttgattggttaacacaagaaaatgttcctgtacttgaatcaatagaaactcagcgcgctgccagagatcgttaccatggaagtcgccgcccaataaccagtgctaatgatagcccaagggtttttgctgccaagcttcaggcaggaagtccaacatatactaatgtgctcaatcatattcgaatatacatgcctgagttgttcccaagcctcaacaaagtcgtatttcttgatgatgatgttgttgtccagcatgacctatcaccactttgggatattgatctatctgggaaggttaatggcgctgttgagacttgcagaggtggagatagttgggtgatgtctaagaggttcaggaattatttaaacttttctcatcccctcattgcaaaaaactttgatccttcagagtgtgcttgggcatatggtatgaatatttttgacctgaatgcatggaggaagacaacaatcaaagacaaataccatcattgggtcaaggagaacctgaagtcaaacttcacactttggaggctgggaacattaccaccaggccttatagcatttaaaggccatgttcacccaattgatccatcatggcatctgttaggtttggggtatcaggaaaagacagatatcagtagtgttgaacaagcagcagttatacattataacgggcaaagtaaaccatggctggagattggttttaaacatcttcagccattttggacaaaatatgtgaactactcaaatgaattcttaagaaactgccatataatggagccacagttgtagattgtcgtgacaaaataaataaaaagcatatatcaagtgaaattaaattcgttattttggaagtcaacatcagagagtttatgaagggtaactggggagctcagtaacccccctccatggtcatatgcgttgatggtgaatatccaatgaacagagcatctttcccctcataggaccccttcccttttaatttattccatttgtatcatagctcatgaaattatgatattgtttaggatggttcttttgtattcgatggagcaatatatgagttgaattgatggtagtcccatcattattgtaattgattaagagtatacacagttcatgtgaaaagcatggattttgattatgcaaagcaaaccttgtatacttgttacttatttttagattctctcaa

SEQ ID NO: 30360 - DNA, 1979 bp, Zea Mays
ttggtcgtttacatggttatttgctgatcagccaccaaggtgccatctttgattgctcaagcatccaaaaaccgcttatttttggcatatgtatgtaaaaagtaactctacagagtggttgctgcttatatgtgccatattaggttgttgctggtttgagcctatatgcagttcagcttaggattgtctaggaagacgtttaggtccgcgccttcttggtaggggaaacgatggttccatgaggcttgtgagggatttatatgtgatgcttgataaagtaaattctgaggaagcacctcttgacttgaaggttccagaaacttttgatgaatttatctgggacatgaagaataatgattatgatttaaggtcatttgcttttaagctgaaggctacgatggagagcatggataaggaattgaggtcatcaaggctatcagagcagttgaacaagcactatgctgcaattgctattcctaaaggcctttattgcctttcattgcgtttaactgatgaatactcctcaaatgcccttgcaaggaaacaattaccgcccccagagttggtgccttgtctttcagacaactcctatttccattttgtgttagcatcagataacatccttgcagcctcagttgtggtcagatcaacaattagatcatcactgaagcctgagaggattgttttccatgttattactgataaaaagacctatcctgccatgcattcatggtttgctttaaattctctcagtcctgctattgttgaggtgaaaggtgttcatcaatttgattggttaacacaagaaaatgttcctgtacttgaatcaatagaaactcagcgcgctgccagagatcgttaccatggaagtcgccgcccaataaccagtgctaatgatagcccaagggtttttgctgccaagcttcaggcaggaagtccaacatatactaatgtgctcaatcatattcgaatatacatgcctgagttgttcccaagcctcaacaaagtcgtatttcttgatgatgatgttgttgtccagcatgacctatcaccactttgggatattgatctatctgggaaggttaatggcgctgttgagacttgcagaggtggagatagttgggtgatgtctaagaggttcaggaattatttaaacttttctcatcccctcattgcaaaaaactttgatccttcagagtgtgcttgggcatatggtatgaatatttttgacctgaatgcatggaggaagacaacaatcaaagacaaataccatcattgggtcaaggagaacctgaagtcaaacttcacactttggaggctgggaacattaccaccaggccttatagcatttaaaggccatgttcacccaattgatccatcatggcatctgttaggtttggggtatcaggaaaagacagatatcagtagtgttgaacaagcagcagttatacattataacgggcaaagtaaaccatggctggagattggttttaaacatcttcagccattttggacaaaatatgtgaactactcaaatgaattcttaagaaactgccatataatggagccacagttgtagattgtcgtgacaaaataaataaaaagcatatatcaagtgaaattaaattcgttattttggaagtcaacatcagagagtttatgaagggtaactggggagctcagtaacccccctccatggtcatatgcgttgatggtgaatatccaatgaacagagcatctttcccctcataggaccccttcccttttaatttattccatttgtatcatagctcatgaaattatgatattgtttaggatggttcttttgtattcgatggagcaatatatgagttgaattgatggtagtcccatcattattgtaattgattaagagtatacacagttcatgtgaaaagcatggattttgattatgcaaagcaaaccttgtatacttgttacttatttttagattctctcaa

SEQ ID NO: 30361 - DNA, 1548 bp, Zea Mays
cttggtttcactgagctacaaacaaagcacacatctgtggttttacaatccttattagttctaactaattttaaaacatttgcagttgctacaactcttctgacctttgtggggttgtttcggaaagcccatgatgagaacctcaagcaaattgaggctgagaagaagaaagcccagaaagaagctgaaaaggaggcaactcaggacaaaactcctgtaaagtcaaaaaatgggaatgcagataaatcaccaagatcaccatcaaccttcaaatgatatacggcaaaagttcacatgatcatcatttcttcctcaaagaatgtctgccttttctggcctcggcacaatttcacaagcatcaatagtaatgcaaatccataataccatgtggacaactcatgcagtcatgcttacaagacaagatgcttttggttcaacatccatgcatgtatctcatgacactgtacaaagctcaccccacacaaacttaggttcttctgtacaaaatccacactagatctttctttttccccccttctgtttatactagcaccaggagtagctcattgtttgtaaactagaaataggagtgtaggcagtgatcagtagtaggtcagaagcaatagaaaaggattagtgctaccacaggcaggttctaaccaggtaaagggaccttgggatgttcttgggaattttaaccttatatacaaagatgaagacaagaatgatgggcagatttcgaaagtttattaatgatttagccttgagggacattcctttacagggtcggagtttcacttggtcaaatctgcaagctgatccggtgttggtaaggcttgacagttgagtgggagcagctgtttccaaactgccttctgcagagtgcagcctcggaggactctgaccactgtcttctgttgctcgggctggatgatattaagcctggaaaacctcgatttcacttcgaatccttttggccaaaaatcgaaggcttcatgcatactgttgaggaagcttggaactcggttctaggatcctcctgcccttttgatgttttgtccaggaaactcaaatccactgcaagaaagcttcagaattggagccacagagtttcttcatctactggaaattgctcaagactctcggactttgtccaacgaggaagcatggctgcacaataatatcaagaaacattgccttgccctctcctctcaagcgtattgcgaggagccgctctaggatcagctggctgggtgagggcgatgccaacacagctctgtttcatgttcatgctaggaaccatagaggaaaaactttattatgagattatgtgaggcgggtcaggttttcacccatgatgttttttttgcttcggactaacttgcatcaagatcacaccattgatcttgatgagttaatgtcacgaccggttttagaagacaaaccgaatgtgaattatgtacatgttaggacttagatcacgtatacaacgattacataaatatcatatcatcgcacaatgcttaaataatgataaagaatatgtac

SEQ ID NO: 30362 - DNA, 1241 bp, Zea Mays
ctaactaattttaaaacatttgcagttgctacaactcttctgacctttgtggggttgtttcggaaagcccatgatgagaacctcaagcaaattgaggctgagaagaagaaagcccagaaagaagctgaaaaggaggcaactcaggacaaaactcctgtaaagtcaaaaaatgggaatgcagataaatcaccaagatcaccatcaaccttcaaatgatatacggcaaaagttcacatgatcatcatttcttcctcaaagaatgtctgccttttctggcctcggcacaatttcacaagcatcaatagtaatgcaaatccataataccatgtggacaactcatgcagtcatgcttacaagacaagggaccttgggatgttcttgggaattttaaccttatatacaaagatgaagacaagaatgatgggcagatttcgaaagtttattaatgatttagccttgagggacattcctttacagggtcggagtttcacttggtcaaatctgcaagctgatccggtgttggtaaggcttgacagttgagtgggagcagctgtttccaaactgccttctgcagagtgcagcctcggaggactctgaccactgtcttctgttgctcgggctggatgatattaagcctggaaaacctcgatttcacttcgaatccttttggccaaaaatcgaaggcttcatgcatactgttgaggaagcttggaactcggttctaggatcctcctgcccttttgatgttttgtccaggaaactcaaatccactgcaagaaagcttcagaattggagccacagagtttcttcatctactggaaattgctcaagactctcggactttgtccaacgaggaagcatggctgcacaataatatcaagaaacattgccttgccctctcctctcaagcgtattgcgaggagccgctctaggatcagctggctgggtgagggcgatgccaacacagctctgtttcatgttcatgctaggaaccatagaggaaaaactttattatgagattatgtgaggcgggtcaggttttcacccatgatgttttttttgcttcggactaacttgcatcaagatcacaccattgatcttgatgagttaatgtcacgaccggttttagaagacaaaccgaatgtgaattatgtacatgttaggacttagatcacgtatacaacgattacataaatatcatatcatcgcacaatgcttaaataatgataaagaatatgtac

SEQ ID NO: 30363 - DNA, 1295 bp, Zea Mays
ctaactaattttaaaacatttgcagttgctacaactcttctgacctttgtggggttgtttcggaaagcccatgatgagaacctcaagcaaattgaggctgagaagaagaaagcccagaaagaagctgaaaaggaggcaactcaggacaaaactcctgtaaagtcaaaaaatgggaatgcagataaatcaccaagatcaccatcaaccttcaaatgatatacggcaaaagttcacatgatcatcatttcttcctcaaagaatgtctgccttttctggcctcggcacaatttcacaagcatcaatagtaatgcaaatccataataccatgtggacaactcatgcagtcatgcttacaagacaagaaaaatagaaagcagttcctacaggagttgagagaaattcacgatgcttgtcagggaccttgggatgttcttgggaattttaaccttatatacaaagatgaagacaagaatgatgggcagatttcgaaagtttattaatgatttagccttgagggacattcctttacagggtcggagtttcacttggtcaaatctgcaagctgatccggtgttggtaaggcttgacagttgagtgggagcagctgtttccaaactgccttctgcagagtgcagcctcggaggactctgaccactgtcttctgttgctcgggctggatgatattaagcctggaaaacctcgatttcacttcgaatccttttggccaaaaatcgaaggcttcatgcatactgttgaggaagcttggaactcggttctaggatcctcctgcccttttgatgttttgtccaggaaactcaaatccactgcaagaaagcttcagaattggagccacagagtttcttcatctactggaaattgctcaagactctcggactttgtccaacgaggaagcatggctgcacaataatatcaagaaacattgccttgccctctcctctcaagcgtattgcgaggagccgctctaggatcagctggctgggtgagggcgatgccaacacagctctgtttcatgttcatgctaggaaccatagaggaaaaactttattatgagattatgtgaggcgggtcaggttttcacccatgatgttttttttgcttcggactaacttgcatcaagatcacaccattgatcttgatgagttaatgtcacgaccggttttagaagacaaaccgaatgtgaattatgtacatgttaggacttagatcacgtatacaacgattacataaatatcatatcatcgcacaatgcttaaataatgataaagaatatgtac

SEQ ID NO: 30364 - DNA, 1863 bp, Zea Mays
agttgctacaactcttctgacctttgtggggttgtttcggaaagcccatgatgagaacctcaagcaaattgaggctgagaagaagaaagcccagaaagaagctgaaaaggaggcaactcaggacaaaactcctgtaaagtcaaaaaatgggaatgcagataaatcaccaagatcaccatcaaccttcaaatgatatacggcaaaagttcacatgatcatcatttcttcctcaaagaatgtctgccttttctggcctcggcacaatttcacaagcatcaatagtaatgcaaatccataataccatgtggacaactcatgcagtcatgcttacaagacaaggtaacaaatgatctatttcatatatgtgtaatgttctgttgtaacaggcgaaatatgtatacttgccagtaccactcttaacatatattcactgccctttttccagatgcttttggttcaacatccatgcatgtatctcatgacactgtacaaagctcaccccacacaaacttaggttcttctgtacaaaatccacactagatctttctttttccccccttctgtttatactagcaccaggagtagctcattgtttgtaaactagaaataggagtgtaggcagtgatcagtagtaggtcagaagcaatagaaaaggattagtgctaccacaggcaggttctaaccaggtaaaggtgagtatatagccatgtgcccatgatctttgaattcttgactagagcaaagtgtttgtgcgtgacgtcctgccacaagtatctcgagatcaattaaatcttggtcaaaatgtgagcttcagtgtttcgctccatgatttgtcaagggaaaaatggtcacctgttgcttttgcattctcattttctgcacctcctataatcgatgttatggttttgatgacactaatttctgttgtagaaaaatagaaagcagttcctacaggagttgagagaaattcacgatgcttgtcagggaccttgggatgttcttgggaattttaaccttatatacaaagatgaagacaagaatgatgggcagatttcgaaagtttattaatgatttagccttgagggacattcctttacagggtcggagtttcacttggtcaaatctgcaagctgatccggtgttggtaaggcttgacagttgagtgggagcagctgtttccaaactgccttctgcagagtgcagcctcggaggactctgaccactgtcttctgttgctcgggctggatgatattaagcctggaaaacctcgatttcacttcgaatccttttggccaaaaatcgaaggcttcatgcatactgttgaggaagcttggaactcggttctaggatcctcctgcccttttgatgttttgtccaggaaactcaaatccactgcaagaaagcttcagaattggagccacagagtttcttcatctactggaaattgctcaagactctcggactttgtccaacgaggaagcatggctgcacaataatatcaagaaacattgccttgccctctcctctcaagcgtattgcgaggagccgctctaggatcagctggctgggtgagggcgatgccaacacagctctgtttcatgttcatgctaggaaccatagaggaaaaactttattatgagattatgtgaggcgggtcaggttttcacccatgatgttttttttgcttcggactaacttgcatcaagatcacaccattgatcttgatgagttaatgtcacgaccggttttagaagacaaaccgaatgtgaattatgtacatgttaggacttagatcacgtatacaacgattacataaatatcatatcatcgcacaatgcttaaataatgataaagaatatgtac

SEQ ID NO: 30365 - DNA, 1670 bp, Zea Mays
ctccgccagtccgcctggagcacgcgcgaatacatccagcccaccccctgccgcctcctcctctataagacgagacctgcgcaccggcaccgccatctccgtctccctgtctcaccggtgccgcttcccctcacccgctcgatttactgcccaatccggcccgcttcgccccgccacgaattttaatcaaccgtttggagcttgaatttgaattccagctcgaatcacccacccggccagctgggagcgagagcgttccagctcgaatcacccagcccgccagccgggagcgagagcgagctgggtgagctcgattcgatgcgttgctgagcgtggctcaaccgattcaggtcgggcggtggcgcagtcagagggatctgaaccctagcgccgtccggatctgtgacccgcgctgctcggcgcgtcggcggcatgagtgcctggaaaacgtggcgaggaggagaagcggcggggatatgagcggagccagcggcagcggggacgacttcgggcgggcggtggcgcgtgccgcagtggcgcaggcgctggaggccgcggggttcgactgcgcgcaccgctccgcggtggacgcggtcgtcgacatcctcctgcgctacatcacgcacctgggtcggtccgccgccttccatgccaacctcgccggacgcgcgctcgccaacgagcttgacgtcatccaggcgctcgaggaggtcggcgccgacacggacggcttcgccggcgcggcggccacgggccactgcctcgtcagctccggcgtcgtcagggaccttatggcgttcgttgactccaaggacgaggtgccgttcgcgcgtccgctgcctaggttccccgtccagcgcgtgcagccgcagcccactgccagcttggcggtggcggggcgggagactgggatgaggcacgtgccggagtggttgcccgtgttcccggatccgcacacgtatgtgagtacggaggtgtgggttgagccaccggcgaccaaggacagggttgacaaggtggagcaggtgcggcaacggaggaaggctgagaagtccctgctcagcttgcagcaaaggctggctatggcaggtgcggatgggtttcgtccagtagctgctgtggcgcaggataacgcagagaaggggaaggagatacaggcagctgggacaaagagaaacccatttcttgagccagcattgccgcctggagagaagtatgtatctgaggttgatatgcctcctgaaaagaagaaaccctctgtccttgaggcatttgcgccagctatccaagctagaaccatcaaagagttcgatgctggggcagggttggatcaaaatcaaaggaacatcgttccaaaggagagggctcgggtgcatcttaagattggatttggaaagaagccatttgctgcagctctgaactcaagagccctggacctgagggaagatccttcattcctgaaagaggaagcaaaggatgacaagaagcggagagcaggcatgatattaagggcatcgatggagaacccacaagaacttcctcagctctaaagttatctatagaggaagtgcggtacccagagtggagttgcatcatggtgtaattgtggaacttcagcttcctgaatctagagttaagagataaagtctatggagaatcgtgaagagacg

SEQ ID NO: 30366 - DNA, 1184 bp, Zea Mays
ccgcctctccccgtccacaaaaggaggagtcccagaccgcgcatgagtgcaccaccctcaccaaagtttacaccaccgctgattaccatcgtcgtgagcgagagctatgagtagggtcaccgctcgagggccttgattacaccggtgatttgagggacctagactgtcggagtgatcaccaaggattagtggagctgtttgtgggagcggcaggcgggttgtggtctcaagcggcaagtaattctccgccgatgaagaaactctatcactgatctgcccccacaccatcgccgagacaaccaactgtgctccacgcagtaagctaacgagcaagtgaccgaggagcccgaagcacagcagattgaagattctgagcaagagctcgtaattgaaggtgaagagcagatagtaccagaggaggactactacgacgagttcgacgagatctaggcgtcgtctccgagtcaattatggtgtcgtggcggtagtatcttagctcaatttatttattatcggctattttaagacattctcattatgtaataaagttatgacattcgtctctatacacttagtcattatatatatggatctaaaagggaaatgtgcccttgggccatttctatagtgttttggtgattagatgcacaacacattatgtttaactaacatggcgtatgagcaaaggtatatgaagcaaattgagctctaaagaggacataatgcaaatctagatggaccaagtgaaaagataagctctggacaacttagtcaattgttttgtgtgctaatcatatttatctaagtgacagggacttcataaagataagtccaaaagagagcaaaagaaaacaaagaaagaaacagagaaaaggtgctggactgcagagcacggacggtccggtgccacccaccgaacaatccgatgcacggtccggccaacagcctgcttttgggaattctagactgcgtcggctataaattcatcggacggtccgtgcgaggcaccggacagtccgacgtgccatcctcgcaacgactagctgccacgtcggcctcgggccaacggtcaagtggtgcaccggacagtccggtgccccacaccggtcggtctggtgcccctagaacaagaaaagcagccaatcagagattctctgcccatgcctagcccgtgcactgttcag

SEQ ID NO: 30367 - DNA, 1259 bp, Zea Mays
ctctccccgtccacaaaaggaggagtcccagaccgcgcatgagtgcaccaccctcaccaaagtttacaccaccgctgattaccatcgtcgtgagcgagagctatgagtagggtcaccgctcgagggccttgattacaccggtgatttgagggacctagactgtcggagtgatcaccaaggattagtggagctgtttgtgggagcggcaggcgggttgtggtctcaagcggcaagtaattctccgccgatgaagaaactctatcactgatctgcccccacaccatcgccgagacaaccaactgtgctccacgcagtaagctaacgagcaagtgaccgaggagcccgaagcacagcagattgaagattctgagcaagagctcgtaattgaaggtgctagactggacacctagagacaatgaagcagaaactagagtatcaagacagtaactagaagttctagatggtactgtattgagacggcaaacatccatatcgaatcccaggtacgcacgtatctcatctgtgtgttgaggcagaggcagcgaccagcaagagcggcatgcgcaccttaggccagcctcttctctcaaccaaccatagctttagaaagcccagcaatggccacggaggacaccagcggttggtgaaccaacacggcaccaccagtttccagcctgcactcacgcatggttaaccaccttatttttattcttgtttatttcttttcagggaagccattaaaggggtttaactttcaatttggtagtatataaatattaatgggttgccggtatgattttgttatccctttttacctccagcttggggcatgaagctatatagaagaaattaccttttgctttctgtacaaaaatttcatgctaggacaagctcagctcgtccaaacttggatgaacaaaaacgtaatcagcgcgtgacgccatgtgggagcaaagttgggaaaatggatattggcggtggtccagaggtcactcttattggcagtctagaaaatgccaaaggatcacagctaccctatttggtctgattgaataatgtgcgaagatatacgtcacatctttcttggcctcccatcttcgcctcaggcagctgggagtggttttatactagctgatgacatcaagtcttaggtgcttccattgatcaataactcagggaaatatggagggatcatgatgtggttcaagtactatgatgatcaagatggctacaattcttcaatgaagagtgatgtttag

SEQ ID NO: 30368 - DNA, 1285 bp, Zea Mays
atgggcgatggcgccgacgaagattcttccatggtcgcgaccgtaacctgcaggacttgcttccgtggtcgtgaccgtcgtcaagtggaagatatgtggcttgttgtagagaaatcacaattccccaacatcacacatgaattcatcattgcattttcattccacatctggaggaacaatttcacagaaagcaaacaaggacatgaggagcttgatggagccagcttgcgagaacatgaagaattcacaaaggtgaaaaatatcacaaaggttgaactggggagatatgagatagatacatcatacatggtatttctctccttttccactagattataatgactgcccaaaactatttttctgtgaattttgcctcagcttcatgaagcaccaagaattagcttcagaggcacatggtgctagactggacacctagagacaatgaagcagaaactagagtatcaagacagtaactagaagttctagatggtactgtattgagacggcaaacatccatatcgaatcccaggtacgcacgtatctcatctgtgtgttgaggcagaggcagcgaccagcaagagcggcatgcgcaccttaggccagcctcttctctcaaccaaccatagctttagaaagcccagcaatggccacggaggacaccagcggttggtgaaccaacacggcaccaccagtttccagcctgcactcacgcatggttaaccaccttatttttattcttgtttatttcttttcagggaagccattaaaggggtttaactttcaatttggtagtatataaatattaatgggttgccggtatgattttgttatccctttttacctccagcttggggcatgaagctatatagaagaaattaccttttgctttctgtacaaaaatttcatgctaggacaagctcagctcgtccaaacttggatgaacaaaaacgtaatcagcgcgtgacgccatgtgggagcaaagttgggaaaatggatattggcggtggtccagaggtcactcttattggcagtctagaaaatgccaaaggatcacagctaccctatttggtctgattgaataatgtgcgaagatatacgtcacatctttcttggcctcccatcttcgcctcaggcagctgggagtggttttatactagctgatgacatcaagtcttaggtgcttccattgatcaataactcagggaaatatggagggatcatgatgtggttcaagtactatgatgatcaagatggctacaattcttcaatgaagagtgatgtttag

SEQ ID NO: 30369 - DNA, 1831 bp, Zea Mays
atgggcgatggcgccgacgaagattcttccatggtcgcgaccgtaacctgcaggacttgcttccgtggtcgtgaccgtcgtcaagtggaagatatgtggcttgttgtagagaaatcacaattccccaacatcacacatgaattcatcattgcattttcattccacatctggaggaacaatttcacagaaagcaaacaaggacatgaggagcttgatggagccagcttgcgagaacatgaagaattcacaaaggtgaaaaatatcacaaagacagcatgtcatcagtgtttccctcagcacatttagcttttgccggcatcgacatgaatgcacacactctctttgcgatcacaacggcattggcaattctcccaacagtctgtctcaggaacctcagtctcctctcgtatctttctgctggcggtgtgatggcgacaattgcagtcatcgtctgcctattctgggttggcattggagaaggaatcgggtttcacttttccggtgctctagtgaacgtgacccaccttccagtggcgcttggcctgtatggattctgctactcgggacactcggttttcccaaacatatactcgtccatgaaggagcgctcgcagtttccgtttgtgctcctgttctgcttcacggtggtgacagtcgcctatgctggaatcgccgtctcagggtttctcatgtttggcgagtccaccatgtcacagttcaccctgaacttgccacagcagtacatcccatcgaaaattgccatctggatgacgattgtgaatccgtacacaaagtatgcattgacaatgactccggtcgccttgtctatagaggaagccctgccaaagaagatgcagaattacctggttggaatgtctgttaggacatgcctcgtcctctccactgttgtggtggctctgctttttccttatttcgggctggtgatggcattgcttggatctgtcttcacaatgcttgtggctctgatactcccatgcgcgtgctacctctccatcaagaagggcgcagtgccattgtgggagatcatcctgtgcatagtcatcataatgatcggcgccgtatgtgcaagcgtgggatcatacacctcagtcagccagatgattagcagcaccagatagcgcacgctagctgatgtttatctagctgctacagatccttccaaatgctttgacatagttggaactggcagctttcgtagctaagtttatttgttccttctttatggcagaaatttggtaagagagagtttagttgcgggaggacaggcgaaggttgttgtttcagacatccatgacaagagttgtttttcttttcgttagaaattttctgtgggcgtgtcttcggttgtcgtctgcacagggcaggagagaacaattcagaaagaaaagaaaaacgcagggactgcctaaatgctagtactagtagttagtgttaatccctccagcacaggagcatggtgacgcatcggcgcacgatgtagagcctggccctctgctccttcaccaggctcgccagccggccaggcaccgagcggccgggcggggcccgggacccccggctcttgagccccgccgcagggcagccagggctccccggcgtggacctccgcctccccttcttgctcttgtcgttcattattctctccgtctctctagactctgtactccctctccctttctcttgatctctgctaggatcgtggaacacagacggtggtggtggcagaccggcggagacggcagcagctctctgcccgcaggagttgtgttgttcggttggtttgttgttgcagatggaaaaagagtgaggc

SEQ ID NO: 30370 - DNA, 2606 bp, Zea Mays
ggcggcgtacgaacgcggaacgcgggagaggcggcgcggccatgagttggagccggaccggctcctctgaaaccggccgcatatctaggctcgcatgtgttgccgttggagatcgcggtcgcgacgagttcgggtcgggtacggacacatcgttattgattgcattacggggttgcaaggatcgctatatatataggttgcatttgggcgtgaggagaagaagatcgtggtctcgtggatatcagcaatggaccgcgatgaggagatgggccacggggaccggtccctgctattcgtcggcgacgaggacgacgacattggcacctacagggacggcggcttcatggaaacctcctccgacgagggatctttctccgacccgagcgacggcgaagcccgcggcgggcgccgcggcggtgacggcagcaagagcgcgtggccgcagagttacaggcagtcgatcgatatgctgagcgtggtgccgtcgccgacggtgagcatgctgatggcagcgagcccgaacctcaccagatttggcagctccttcctcaaggccgggagctccttcttcctccggaagggcgacgactcggtgctgccgctcgccaggccgctgctgccgccttcgctcccgcagctgtcgcagtcgtcgctgcggccgcagccacccatgaggcagtccacggacatcctcgcccagccgccgcggcctccggctgggcacgaggcccagttgcccgacaggccgtccagtgcgtgcctgagaccagattatatcgagcttcctccgcctgctagcaagtgcagcaggaaccaatcaatcatcaatgggttcaacgtgctgtgcggcgttgggatactcagcacatcttatggaatcaaggaagggggatggtcaagcctccttctgctccccttgttgggtggcagctcttgctacacaggcttgcttctaaagagatgcatagacagttcgcccaacattgggacatacccagacattgggcaagctgctttcggtgttgctggtcgaatctttgtatcggttgttctttacttggagctttatgcaagctgtgtggagtacatcacgctgctaggagacagcatgtcatcagtgtttccctcagcacatttagcttttgccggcatcgacatgaatgcacacactctctttgcgatcacaacggcattggcaattctcccaacagtctgtctcaggaacctcagtctcctctcgtatctttctgctggcggtgtgatggcgacaattgcagtcatcgtctgcctattctgggttggcattggagaaggaatcgggtttcacttttccggtgctctagtgaacgtgacccaccttccagtggcgcttggcctgtatggattctgctactcgggacactcggttttcccaaacatatactcgtccatgaaggagcgctcgcagtttccgtttgtgctcctgttctgcttcacggtggtgacagtcgcctatgctggaatcgccgtctcagggtttctcatgtttggcgagtccaccatgtcacagttcaccctgaacttgccacagcagtacatcccatcgaaaattgccatctggatgacgaggaagccctgccaaagaagatgcagaattacctggttggaatgtctgttaggacatgcctcgtcctctccactgttgtggtggctctgctttttccttatttcgggctggtgatggcattgcttggatctgtcttcacaatgcttgtggctctgatactcccatgcgcgtgctacctctccatcaagaagggcgcagtgccattgtgggagatcatcctgtgcatagtcatcataatgatcggcgccgtatgtgcaagcgtgggatcatacacctcagtcagccagatgattagcagcaccagatagcgcacgctagctgatgtttatctagctgctacagatccttccaaatgctttgacatagttggaactggcagctttcgtagctaagtttatttgttccttctttatggcagaaatttggtaagagagagtttagttgcgggaggacaggcgaaggttgttgtttcagacatccatgacaagagttgtttttcttttcgttagaaattttctgtgggcgtgtcttcggttgtcgtctgcacagggcaggagagaacaattcagaaagaaaagaaaaacgcagggactgcctaaatgctagtactagtagttagtgttaatccctccagcacaggagcatggtgacgcatcggcgcacgatgtagagcctggccctctgctccttcaccaggctcgccagccggccaggcaccgagcggccgggcggggcccgggacccccggctcttgagccccgccgcagggcagccagggctccccggcgtggacctccgcctccccttcttgctcttgtcgttcattattctctccgtctctctagactctgtactccctctccctttctcttgatctctgctaggatcgtggaacacagacggtggtggtggcagaccggcggagacggcagcagctctctgcccgcaggagttgtgttgttcggttggtttgttgttgcagatggaaaaagagtgaggc

SEQ ID NO: 30371 - DNA, 2417 bp, Zea Mays
atggaccgcgatgaggagatgggccacggggaccggtccctgctattcgtcggcgacgaggacgacgacattggcacctacagggacggcggcttcatggaaacctcctccgacgagggatctttctccgacccgagcgacggcgaagcccgcggcgggcgccgcggcggtgacggcagcaagagcgcgtggccgcagagttacaggcagtcgatcgatatgctgagcgtggtgccgtcgccgacggtgagcatgctgatggcagcgagcccgaacctcaccagatttggcagctccttcctcaaggccgggagctccttcttcctccggaagggcgacgactcggtgctgccgctcgccaggccgctgctgccgccttcgctcccgcagctgtcgcagtcgtcgctgcggccgcagccacccatgaggcagtccacggacatcctcgcccagccgccgcggcctccggctgggcacgaggcccagttgcccgacaggccgtccagtgcgtgcctgagaccagattatatcgagcttcctccgcctgctagcaagtgcagcaggaaccaatcaatcatcaatgggttcaacgtgctgtgcggcgttgggatactcagcacatcttatggaatcaaggaagggggatggtcaagcctccttctgctccccttgttgggtggcagctcttgctacacaggcttgcttctaaagagatgcatagacagttcgcccaacattgggacatacccagacattgggcaagctgctttcggtgttgctggtcgaatctttgtatcggttgttctttacttggagctttatgcaagctgtgtggagtacatcacgctgctaggagacagcatgtcatcagtgtttccctcagcacatttagcttttgccggcatcgacatgaatgcacacactctctttgcgatcacaacggcattggcaattctcccaacagtctgtctcaggaacctcagtctcctctcgtatctttctgctggcggtgtgatggcgacaattgcagtcatcgtctgcctattctgggttggcattggagaaggaatcgggtttcacttttccggtgctctagtgaacgtgacccaccttccagtggcgcttggcctgtatggattctgctactcgggacactcggttttcccaaacatatactcgtccatgaaggagcgctcgcagtttccgtttgtgctcctgttctgcttcacggtggtgacagtcgcctatgctggaatcgccgtctcagggtttctcatgtttggcgagtccaccatgtcacagttcaccctgaacttgccacagcagtacatcccatcgaaaattgccatctggatgacgattgtgaatccgtacacaaagtatgcattgacaatgactccggtcgccttgtctatagaggaagccctgccaaagaagatgcagaattacctggttggaatgtctgttaggacatgcctcgtcctctccactgttgtggtggctctgctttttccttatttcgggctggtgatggcattgcttggatctgtcttcacaatgcttgtggctctgatactcccatgcgcgtgctacctctccatcaagaagggcgcagtgccattgtgggagatcatcctgtgcatagtcatcataatgatcggcgccgtatgtgcaagcgtgggatcatacacctcagtcagccagatgattagcagcaccagatagcgcacgctagctgatgtttatctagctgctacagatccttccaaatgctttgacatagttggaactggcagctttcgtagctaagtttatttgttccttctttatggcagaaatttggtaagagagagtttagttgcgggaggacaggcgaaggttgttgtttcagacatccatgacaagagttgtttttcttttcgttagaaattttctgtgggcgtgtcttcggttgtcgtctgcacagggcaggagagaacaattcagaaagaaaagaaaaacgcagggactgcctaaatgctagtactagtagttagtgttaatccctccagcacaggagcatggtgacgcatcggcgcacgatgtagagcctggccctctgctccttcaccaggctcgccagccggccaggcaccgagcggccgggcggggcccgggacccccggctcttgagccccgccgcagggcagccagggctccccggcgtggacctccgcctccccttcttgctcttgtcgttcattattctctccgtctctctagactctgtactccctctccctttctcttgatctctgctaggatcgtggaacacagacggtggtggtggcagaccggcggagacggcagcagctctctgcccgcaggagttgtgttgttcggttggtttgttgttgcagatggaaaaagagtgaggc

SEQ ID NO: 30372 - DNA, 2027 bp, Zea Mays
gtcttgcatcgcgaatactttgctgtggatgttatttcaatgagaaaatatgtattgttgaggtccttgatagggatgaagtaatgaagaagttccatgaatcaattgctcagctggagcaagccctgtgcgattttccatatgataaactggatatatctgatgaagctagagagcaggttgagttagtgcatgcacagctcaaaagagccaaagagcgggtcgacatgcccgatgacgagttctacaacgaattatgttcgctgtataacaagagccacgacccaagtgctgagttggatatccttgggagattgtcggagaagttacacctgacgaccatcgctgatctcacgcaagaatcacttgctttgcacgagatggtggcatctggtggtggcaacgatcctggagaacacattgagaaaatgtcgatgctgctgaagaagatcaaggactttgtgcagactcagaaccctgaaacgggcccgctggtgactgccaagccaatgggttccaacgggaagccaagacctgtaaacgttcctgacgagttccggtgcccaatctctcttgagctgatgaaagacccggttatcgttgctactggccagacatacgagcgggcattgatcgagaaatggctagcttccgggcaccatacctgtccaagcactcaacaaaggatgccaaacacgacgctgacaccgaactatgttctcagaagccttatcacgcagtggtgtgaggccaacgggatcgatccaccgaagcgcccgacgcagcagcctgacagacctacatcttcatgctcttcgagcgagcgcgccagcatcgacgctctcctctccaagctatgctccgcagatcccgaggaacagagatcggctgccgcagagctccggctcctagcgaagcggaacgcgaacaaccggatctgcatcgccgaggccggtgccatccccttgctactgagcctcctgtcttcgtctgacctgcagacgcaggagcacgccgtgacggcgcttctgaacctctccatacacgaggacaacaaggcgagcatcatactgtccggcgctgtcccgggcatagttcatgtcctcaagaacggaagcatggaggcacgggagaacgctgcggccacactcttcagcctatcggtggtggacgaatacaaggtcacgatcgggggcacaggagccatccctgccctcgtggtcttgctgagcgagggcaggcagcgcgggaagaaggacgcggcggctgccctattcaacctgtgcatctaccaggggaacaagggccgcgccatacgggctggcctcgtgccactcgtcatggggctcgtgacgaaccccaccggagctctgctggacgaggccatggcgatcctgtcgatactgtccagccaccccgagggcaaggccgcgatcggggcggcggagcccgtccccgtcctcgtggagatgatcgcgggtgggtcgccgaggaacagggagaacgctgccgccgtgatgctgcacctgtccgccagcgtgcggcagtccgcgcatctggctcgggcgcaggagtgcggcatcatggccccgctgcgggagctggcactgaatggcacggggagggggaagaggaaggccgtgcagctgctcgagcggatgagcaggttcctggtccagcagcaggaggacgcggtggatccacgtgtgcaggagctggaggagatcgagcgccagcttgccgcctttggacctggcgttacggaggctgatgtccttcaacagttgggggctctttaacctatggtacatttttcactatgatactactatacttatatagaaaagttctagcggcggactttattatcagtaaaatctcagttctagctactgaatgttagcgtgggtttcggatttcaagatttttatggccatgcgtgtatatgcatttgcgattttgacattgtcagtaggtggtatcgtagtctacggcagtgccagttgcaacgagaatgccatttcatg

SEQ ID NO: 30373 - DNA, 1797 bp, Zea Mays
tttgaccctattcccctttcagcaaccctagcacacgttctcccattcctcatccccatccatggcaccaccttctgttctcctccgcgccacatccgcctccttcacttcggctcctaagttcgatctccacatcaccacatatggtgtctataccgcaaccgtgtcaccttcaaccctccaacgaggctccactctgccagaccacctcacagcgtcgatttctgtccatggcctcgtggtgccagagcctgtgcagtcatcatcggcctgctggtgcctatgttgtgatgatgatggttgctgccgatgtggtgccagagcaggtgcgaccctcgacgctggttagcaaatgggatctttccttccgtgaatcctttttcagaaatcattttttgtggttgccctttaatgtttctttgtgtctttaatttcattcatcattttttgttgttaggtctagttttgatgtcctatgttttttaggtctgaatctcagtttagatacgaattgctactctatgtatgctactttatgctactacccgttagtgcttttgatctctttatttgtgtggtacttctatagatcttatctttttttatatgactgataatgatagtatactcagtatcaaagaatatagtttttgaattgtgttttttgctaggtacgacatcgcttgttggcattcatttcacagtttgtaccaggttttgtgctctgctcatactgcatagtacactagtactgtctttttcgtgaggtggtttaaatctgtaggataactagataagttgttggtttgcttctgcctcttgatttaaattcctcggtcattatttgatccaatgtggtgggctctgagcttgcctcactcttctgttgggtgatttattaagccgttgacatgttttgcaattgtttttattcttgttcagcactttgtctaattcagcgtaagcaaattagtaatgaaatatgaggttcttgatgcagactctgttcagaaaatttcttttctagaaacatgttttttgttaacaattatatccattttatactaaaaaacctttccattctgctcataataatactttcttagtaccatttcatgaactaggatttgtttgtaagatgctttgtagatctacaactaccactcaatttatgagattatttgtaaacttcattcagttatgtcttatgctcaaatgtttttgcctttttcacaagttgaagagcacaagtgcctgaattctgagttgtggcatgcatgtgccggctctcttgtttcattgcctgcgatcgatagtcgagtgatgtattttcctcaaggccacggggtagagatggaccatcttcatctggtctaaattccaaggcttgtcatgaaaaaatgagggacaagttgaatgacaggttcctagaattaagttcaatttcatatcacattatcatttgcagcgggcgcgacacgtgagcgagcgagcatgcggttgtgcgggtgtgcgaggtgcacgggcgatgacgcagcgctctacaatacatgcgagcatcaacaaacgatctttgcattggtttgtgcatcaagaatactttttatcagagttcactcgaggaatgcaagaattaggatagccaattagatcttttttattggtgtatcctgagtttcctctaataaggatcctgagtttcctctaataaggatcctatgtcaccagttgggtcaattttactaaacattttttgccatcatccttaaatacatactacaaaggctgatttacgct

SEQ ID NO: 30374 - DNA, 2033 bp, Zea Mays
gtccagcctgccgttcgagtccacctctgctgctctccctgcccagcaggcctccctccacctctccctgcaagcgctccctcacatcgatctcccgagacacggcagcgccttcctcctcacaaccgctgcgccatcttcagtccatgcccacacgctccctctccactacatccactctgccagctctgctcctccttgctctctaacacgcacgcttgaagaccgtggaggccggtgacagagtcgtcgtctggaagacgggaagaggaaagtttgggggaagcacgcttggatgttgattggtttatgctttatccaaaatgccctaaagattttaatttttaatcaatcattgttgcttgcagagactgcgtctcacgatttgaagcgatttgtgttgttgaagctttgattaagcaagctgtttctgttcactttatacgaagggtcatgccttcggataatgaaggagaagatttaggaacacaattgtctcggctgttaggacttatgcaagatgtgtgcactatcaaaagtggatcacacttggactcgaaagatgcatatgttactgtcatgcatgtgaagtttgcaacaaagaaaggtgaacacccattgtgcaaaatcgatagctacatgaaatgtagtgaactaaagtgggttcagcttgaaggcgatcaacagaaacttctcttgttattcgacataaaacgaaggcaagcatattaacgcatttaatgccacactcagattgatgtcatgtccaagttcttcaagctgatgatggtaggtgttctgcttcacttctttctcattgttgaagttgtcccaggttgtattcactcttagaacccctctattatttatttttgaacaaagcttccttttttgttacgtcctaaaatgatatcaagcaagaccattatttctgtgggttgagtaaatctagattttttacttggcatgatgagacaatctggagaatgtataccaattatgttgtatgccttttatatttatctacattaccgagtgtagcatattatttgtttctatcttagtcaattattactcatgctatggtatatttttcttttgcttcttgaaaataatttaacctatgttattgagtcatgttataacatattattcttttgcttcttggaaataatgtaaccatagattgtgcttcaaaattattgtcgtcttgaccatcaccatatgcacaacaggaacaaggtctgctactcagcttgcatcaatgctacaacactagctcttgtatatgctaggattccaatgcgagacactgtcacatcttgtagtgttgtctatttgtgttctactcctttgctccacaggaacctacctaattttcataactttagcagtagtcttatggtaataaaagtcaaacaataataatgtattgtgctagatctgaattacctcgaagacagtgttgggggttccgatgtcactgttgacatcatatccaaatttgtatcattttgtatggtgtgatatatctagaagctctaagaatttttgtcttgtgcaggtcctgcaattaatgaatgatttgaaccaaagtgttcgaaatgttgttctcttgtattgaggcttactgtgtgcttgaggttcttcgacctctctatgaatcccctaagataccggcacaaaagataactgttgcgatatgtgtcattgatcaatttcgttgttactaggagtttaaggtaaaagacatatggcatatgatgacttgtggacatgttattaatggaatgtactgttatatatattgagtatctgtttgaattgtaaggccttgtgatatttcctaaagatttgtataagtttgtaatttgttgtgatagtcttagtatttaaattatgcaattgatatgacattattaaaatcatatatagaagtctgtatagtactaatggttgaaatgtagtggtgaaatagctacataaaaataataaaatttatgtataactaggatcacaaatggattacgaaa

SEQ ID NO: 30375 - DNA, 1969 bp, Zea Mays
cgctccctcacatcgatctcccgagacacggcagcgccttcctcctcacaaccgctgcgccatcttcagtccatgcccacacgctccctctccactacatccactctgccagctctgctcctccttgctctctaacacgcacgcttgaagaccgtggaggccggtgacagagtcgtcgtctggaagacgggaagaggaaagtttgggggaagcacgcttggatgttgattggtttatgctttatccaaaatgccctaaagattttaatttttaatcaatcattgttgcttgcagagactgcgtctcacgatttgaagcgatttgtgttgttgaagctttgattaagcaagctgtttctgttcactttatacgaagggtcatgccttcggataatgaaggagaagatttaggaacacaattgtctcggctgttaggactttgattcccatcaattaaatagatgcaagatgtgtgcactatcaaaagtggatcacacttggactcgaaagatgcatatgttactgtcatgcatgtgaagtttgcaacaaagaaaggtgaacacccattgtgcaaaatcgatagctacatgaaatgtagtgaactaaagtgggttcagcttgaagaaacttctcttgttattcgacataaaacgaaggcaagcatattaacgcatttaatgccacactcagattgatgtcatgtccaagttcttcaagctgatgatggtaggtgttctgcttcacttctttctcattgttgaagttgtcccaggttgtattcactcttagaacccctctattatttatttttgaacaaagcttccttttttgttacgtcctaaaatgatatcaagcaagaccattatttctgtgggttgagtaaatctagattttttacttggcatgatgagacaatctggagaatgtataccaattatgttgtatgccttttatatttatctacattaccgagtgtagcatattatttgtttctatcttagtcaattattactcatgctatggtatatttttcttttgcttcttgaaaataatttaacctatgttattgagtcatgttataacatattattcttttgcttcttggaaataatgtaaccatagattgtgcttcaaaattattgtcgtcttgaccatcaccatatgcacaacaggaacaaggtctgctactcagcttgcatcaatgctacaacactagctcttgtatatgctaggattccaatgcgagacactgtcacatcttgtagtgttgtctatttgtgttctactcctttgctccacaggaacctacctaattttcataactttagcagtagtcttatggtaataaaagtcaaacaataataatgtattgtgctagatctgaattacctcgaagacagtgttgggggttccgatgtcactgttgacatcatatccaaatttgtatcattttgtatggtgtgatatatctagaagctctaagaatttttgtcttgtgcaggtcctgcaattaatgaatgatttgaaccaaagtgttcgaaatgttgttctcttgtattgaggcttactgtgtgcttgaggttcttcgacctctctatgaatcccctaagataccggcacaaaagataactgttgcgatatgtgtcattgatcaatttcgttgttactaggagtttaaggtaaaagacatatggcatatgatgacttgtggacatgttattaatggaatgtactgttatatatattgagtatctgtttgaattgtaaggccttgtgatatttcctaaagatttgtataagtttgtaatttgttgtgatagtcttagtatttaaattatgcaattgatatgacattattaaaatcatatatagaagtctgtatagtactaatggttgaaatgtagtggtgaaatagctacataaaaataataaaatttatgtataactaggatcacaaatggattacgaaa

SEQ ID NO: 30376 - DNA, 1977 bp, Zea Mays
ggccttatatacatgatgtgggcgtcatttttctgattgcctctgaatgcctatatccattttctagggtcatgccttcggataatgaaggagaagatttaggaacacaattgtctcggctgttaggacttatgcaagatgtgtgcactatcaaaagtggatcacacttggactcgaaagatgcatatgttactgtcatgcatgtgaagtttgcaacaaagaaaggtgaacacccattgtgcaaaatcgatagctacatgaaatgtagtgaactaaagtgggttcagcttgaaggcgatcaacagaaacttctcttgttattcgacataaaacgaaggcaagcatattaacgcatttaatgccacactcagattgatgtcatgtccaagttcttcaagctgatgatggtaggtgttctgcttcacttctttctcattgttgaagttgtcccaggttgtattcactcttagaacccctctattatttatttttgaacaaagcttccttttttgttacgtcctaaaatgatatcaagcaagaccattatttctgtgggttgagtaaatctagattttttacttggcatgatgagacaatctggagaatgtataccaattatgttgtatgccttttatatttatctacattaccgagtgtagcatattatttgtttctatcttagtcaattattactcatgctatggtatatttttcttttgcttcttgaaaataatttaacctatgttattgagtcatgttataacatattattcttttgcttcttggaaataatgtaaccatagattgtgcttcaaaattattgtcgtcttgaccatcaccatatgcacaacaggaacaaggtctgctactcagcttgcatcaatgctacaacactagctcttgtatatgctaggattccaatgcgagacactgtcacatcttgtagtgttgtctatttgtgttctactcctttgctccacaggaacctacctaattttcataactttagcagtagtcttatggtaataaaagtcaaacaataataatgtattgtgctagatctgaattacctcgaagacagtgttgggggttccgatgtcactgttgacatcatatccaaatttgtatcattttgtatggtgtgatatatctagaagctctaagaatttttgtcttgtgcaggtcctgcaattaatgaatgatttgaaccaaagtgttcgaaatgttgttctcttgtattgaggttagttaattccatatttgatactatataggcctactttagctgacattttgctttttccacacccatgatgacgggtatgatctctatttctattgatcttgttcaatttctcaatagttacatcctacatttacaacctagagagattgaaaattttttatagcaacatcttaattattaaaactctctgttgtttgctccaccacgagcttccagtgcactttctctctctatctcgtgtgatcaggttgttaagatatgcatctactcatattttaatttttagcagatatgtatctaaattttcttgtgttttaatacaggcttactgtgtgcttgaggttcttcgacctctctatgaatcccctaagataccggcacaaaagataactgttgcgatatgtgtcattgatcaatttcgttgttactaggagtttaaggtaaaagacatatggcatatgatgacttgtggacatgttattaatggaatgtactgttatatatattgagtatctgtttgaattgtaaggccttgtgatatttcctaaagatttgtataagtttgtaatttgttgtgatagtcttagtatttaaattatgcaattgatatgacattattaaaatcatatatagaagtctgtatagtactaatggttgaaatgtagtggtgaaatagctacataaaaataataaaatttatgtataactaggatcacaaatggattacgaaa

SEQ ID NO: 30377 - DNA, 848 bp, Zea Mays
ggcgcaacatgaaaataatatgagcctacaaaaagtggttttgattaaatctagaaacctacctcgtcaattgtaggatggggaatcttattgacttcaattggtttacccacgaccacatgcatgggttttgggaaggggaatggtgtgctgcattcaaatgtgagtagaccatgaaaatttatctaataccagagaacaatgtttcaaaaagtatagaacataagtctggaaggaaaagaacagaatgctaagaaccatgaagttacccaaatttatcccagaagataataggagtaaatttaactgctctagcgatcttgataaacaatttaccaccaggcctccaccacttgtatgcatagctctaaccaaacaataatagtagagaatcagtaatatgatctttttggaatcaaatttatgattaaaccaatgttttggcatccaggggtgtgatggtcctctttagctaaaatagcatgttacaatatttcaaaaagtcatcacataagttatgtgtagccataacaatttagtttagaattcatcttttatgctgagattaaaataaaaaaatacaagtgtcactgtcacatgatgaatagtgtcagattgcttgcttgtctattttgcttccttgacatctaggatgaatttcaaactgacctattgcaactatacttcactttatatgtactacatagatgtttttgtgatgatcttttaaacaaaacaacatgatacttcagctaacaaggatgcctgcacccaaggtgtaacaccccgggatccacaaacaccccagaatgctactaaactacacatctaacattcatatataaaat

SEQ ID NO: 30378 - DNA, 1028 bp, Zea Mays
caacaattctacaacaacaaaccaaaatgcaaactgagaaaagaggcatatatcattgagcaccaaaaacttctttaggcatacttgaaaatccatacagataccacaaaaactgacacaatgtttcaccatagtaccatccatagcggaacacgtcctttttaaccatctaataaatcacagcagagggatagataaaacaagaacaacaatactctaggtggccttgtcagccttggaggctgtggcagcagcctggcctctgagccttccagtcctcctagccgcaatgagaccgaccttctggccagggggagcatcgcggcggacagtagaggcgtgaccgatatgttggtggttacctcctccgtggggatgctccacggggttcatggccacaccacggaccttgggccagctgttcctcttcacacggtacttgtggtaggcgttgccagccttcagcatcggcttctcagtcctgccaccaccggcaacctgcccaatcatggcacggcagctgctggggacaattttcttgtccccagaggccctggcgaagacaccgcggtcaccaacgtggtgctcgacgttgcagacgacggcaccctcggggatcccgcggagcggcaggacgttgccgatggagagcgtggcgcggcggccgcagtaaacgaactggccggtgtacatgccctcggcggcgacgaagagctccttctggtgcttgtacctgaaggggtggcggaaggtgaccttggcgagcggggcgccgcgtccggggtcgtggatcacgtcggtgactacgcccttgaggtacccgttgcgctcgccgaagtcgagggagcggaaccgggcggggcccttgcggtggtgggtgtgggacttgaacacggatcccgcacccttacgctgcgcgcggatcacgcgacccatcttgcccggcggcggggaggaagcggcggcggcggcggcgcggcgggaagagggtgcggaagtgagcgcggtgcggctagcgttggacgaga

SEQ ID NO: 30379 - DNA, 1264 bp, Zea Mays
ctctgctagaaaaggttcagaatggatctctggtattgaggatggataacaacgcaaatttgtgcgacaatggtccttccacatgtgatcaggagaagaaaagaaacagaacacttatcattgcaacagttgttccaatagttgtagcagctctactgttcgttgcaggattacttatcctacgtagaatgagaaatagacaagatacatggatgccaaacaactcaaggtttactagccctcaagccagttcacacatatttgagaacagaaagttcacctacaaggagctgaagctcatgacagctaacttcagagaagaaatagggaggggagggtttggtgccgtcttcctaggatacttggagaatggaaatccagttgccgtcaagatgcgttcaaagacatcctctcaaggggataaagagtttctagctgaggttcagcatttgactagagttcatcacaaaaatctggtctccttgattggatattgcaaggacaagaaacatctggcccttgtctatgaatacatgcagggaggaagcctagaggactgtctaagaggagaagcctctgctgctacacccctcacttggcatcaacgtctcaagatcgctctcaactctgctcaagggttggagtacctacacaaatcatgccagccaccactgatccacagggacgtgaagacgaagaacattcttctatccgctgatctcgaggccaagatagcggacttcgggctcatgaaggcgttcgctgacgagttcaggacccatccaccagcggtccccgtaagcgacgccgagagcgtccacgtcgcgctgtgggtgcgccggaggctctcggagggcgacatcgcgagcgtcgctgacccgaggatgggaggggcgtacgacgtcaactccgtctggaaagtcgcggagctgggactcaggtgcaaggaacagccgtcgagggagcggccggcgatgaccgacatcgtggcggagctcagggagagcttgcagctggaggtgtcctatgcgatgggctactacagcagctcggtctctaccagcgcaatcgatctcagcacagcaagtgctggtttgcaaagcgatgagaaacccagcgaccgtctggggcaaaaagctgcacttgagttgcaacagcaacatgtagacagtgaatcatcggcaactgtaggtcctgcaccaagatgagaaaccaacagttcaactttgcgtgttttaatctaggacttcctcataaattaagg

SEQ ID NO: 30380 - DNA, 2379 bp, Zea Mays
cctccacatcggtgctcgtcttcgcctcgtctttgaaaattgacaagggctcaaggctgaggactcaaccggacaggcaagagctgccggctgcggtgggtcaactacctccaccctggcctcaagcgtgggcgcatgtctccccatgaagagcgcctcatccttgagctgcacgctcggtggggaaacaggtggtccaggatagcacggcgcttgccagggcgcactgacaatgagatcaagaactactggaggacacacatgaggaagaaagcacaggagaggaagaggaacatgtctccatcatcatcctcatcttcactgagttaccagtcaggctacccagatactccatcaatcattggagttaagggacaggagcttcatggtggcagtggctgcatcacaagcatcctgaagggcacccatccggacatggatggctatcccatggaccagatatggatggaaattgaggcgccagaggtgccctcggaggtgggctttgttggagggaacgaaaatgtgtgcagcagccttgccacccctctgccaccacctaccgtctgggaatactacccagaggtctgctggaagcttgacgatgagatcaagatggcaccacaatttggttatatagtgaaggagctgacccctgcttctgataccatatatattgggtctgattactaagttatacaccatcctagcagaagtgaagtgcttttgttgacacaagctttagcatggatctggatatttatctcccgcttagaattggaggcctatggctctatgcatgatttctatgtatctatctagtgtgcaagacaagatcatctcaatttgtccttgatgctatgtaacacaagggcaaaggtgctatgtctgtttactcagaataattagctattccgtgggactcctgttgggcatgaagccaagaataaattttatattgatatagatggtcttaacttggaacgattttagagtttcaatccagagaaaccattgttaaggtgaacattaagctgacccagctaaaaatatagttcgcttttaacccatccgtaaaaaccagtgaatgttgttttgtacaagtggatcggctggttgatggcctcaagtaacaactactaaccccaaaagaaaccaaacgagtaccaaattagtgcactgatagagttgcctgcctttataaaaaaaatgtattattccattgtaccaacttggcaacttgcaggtcatggtattaggaaagagaagagagctctcaggagccaccaagtctcaatgtgaaaaggtgccatagtctgatccagcaaaaaaagctgttggcaaaggactagctccaatttttttctcagcccaagttcagatgggtttctgtaaaattccaatcatctatctttataatcatcttttcattttgttcccccaaatgaaattgatttcagagtacatagcaacagagaaagtagaaatgtcacattatgaatggaagtcaaaataacaacaaaaaaaactcaagtaaaggagaggattcaagtagacgggaatcatggtacaatttggtaaaaaacgaatccacactagaattcaataagaaagctagttttgcacattagtagttagcctcgcaggtcaagcacgcaaggaaaaagtaatgttagtgcgataagggaaataaaaggtgatgataagtggcatgcattgggaattttgtaatcatctactttagtgaaactgatatgcaacaaattaaccatacacatcttttaattgaataaacggctagtgcttaaccacctggacaaccatactttcatagggtgcctccaataaaataatgaataactgaggatgggaatatggttttttccttttccctttctgctccactttctattactcccaccccctaacgtgctccatccataaactctagtaatgtccattgagatgttactagaaaaatcaagttcacactaccaagaaaaaataaacccgaaaactacaatgagatgacacatcacttatgttagtggtgtacaggagacagataaaatgcatggcacatgtttctggcagatccacttatcagaaggaaaggtgttcccagttgcaaggggcagaacaggttcgaattcgtatccttgttttcaaataaaagatatatgagatgtgagaaacataaccttttatttttctgaaggatacattatcaaacttgtacagtgtcatatttttccatttttctttgaaaaaaaggaaatacttcatggttcttgcaaaaatgcttctttggcattttgcatatgcagggtactgagcacttgctcttaaccactcaagttgaatattacaaaatcaaac

SEQ ID NO: 30381 - DNA, 2813 bp, Zea Mays
ataatctcaaaatacatgaacggtaaacaaataaattaacttttattgtatactgtagtttattaacaaaaagcaagaatatacctctgcaaattccagacgtcaataaagctgatgtcctaacatgcacacctatgattttgcaatacaatatgcgcaacatgagccaattaaaaaagctactttatcagttagaatctgagggcaacccaaatggtggaatataggatctttagggagctccaaatcacacccaccatatcacctggccaccaagacctccccctcttacctataaatgagaggcaaaagccagtaagccaccaaaccagtaggcaactaagacaaagtggcatactcttctctgtactagctttcttcttcctctcctcttcctcacaaacagactggatttcaacaagataatcctgaaactggagccaacaagcacacagagaaagaagagcaagaagaccggctcccagccgatacaaggactcaaccggacaggcaagagctgccggctgcggtgggtcaactacctccaccctggcctcaagcgtgggcgcatgtctccccatgaagagcgcctcatccttgagctgcacgctcggtggggaaacaggtggtccaggatagcacggcgcttgccagggcgcactgacaatgagatcaagaactactggaggacacacatgaggaagaaagcacaggagaggaagaggaacatgtctccatcatcatcctcatcttcactgagttaccagtcaggctacccagatactccatcaatcattggagttaagggacaggagcttcatggtggcagtggctgcatcacaagcatcctgaagggcacccatccggacatggatggctatcccatggaccagatatggatggaaattgaggcgccagaggtgccctcggaggtgggctttgttggagggaacgaaaatgtgtgcagcagccttgccacccctctgccaccacctaccgtctgggaatactacccagaggtctgctggaagcttgacgatgagatcaagatggcaccacaatttggttatatagtgaaggagctgacccctgcttctgataccatatatattgggtctgattactaagttatacaccatcctagcagaagtgaagtgcttttgttgacacaagctttagcatggatctggatatttatctcccgcttagaattggaggcctatggctctatgcatgatttctatgtatctatctagtgtgcaagacaagatcatctcaatttgtccttgatgctatgtaacacaagggcaaaggtgctatgtctgtttactcagaataattagctattccgtgggactcctgttgggcatgaagccaagaataaattttatattgatatagatggtcttaacttggaacgattttagagtttcaatccagagaaaccattgttaaggtgaacattaagctgacccagctaaaaatatagttcgcttttaacccatccgtaaaaaccagtgaatgttgttttgtacaagtggatcggctggttgatggcctcaagtaacaactactaaccccaaaagaaaccaaacgagtaccaaattagtgcactgatagagttgcctgcctttataaaaaaaatgtattattccattgtaccaacttggcaacttgcaggtcatggtattaggaaagagaagagagctctcaggagccaccaagtctcaatgtgaaaaggtgccatagtctgatccagcaaaaaaagctgttggcaaaggactagctccaatttttttctcagcccaagttcagatgggtttctgtaaaattccaatcatctatctttataatcatcttttcattttgttcccccaaatgaaattgatttcagagtacatagcaacagagaaagtagaaatgtcacattatgaatggaagtcaaaataacaacaaaaaaaactcaagtaaaggagaggattcaagtagacgggaatcatggtacaatttggtaaaaaacgaatccacactagaattcaataagaaagctagttttgcacattagtagttagcctcgcaggtcaagcacgcaaggaaaaagtaatgttagtgcgataagggaaataaaaggtgatgataagtggcatgcattgggaattttgtaatcatctactttagtgaaactgatatgcaacaaattaaccatacacatcttttaattgaataaacggctagtgcttaaccacctggacaaccatactttcatagggtgcctccaataaaataatgaataactgaggatgggaatatggttttttccttttccctttctgctccactttctattactcccaccccctaacgtgctccatccataaactctagtaatgtccattgagatgttactagaaaaatcaagttcacactaccaagaaaaaataaacccgaaaactacaatgagatgacacatcacttatgttagtggtgtacaggagacagataaaatgcatggcacatgtttctggcagatccacttatcagaaggaaaggtgttcccagttgcaaggggcagaacaggttcgaattcgtatccttgttttcaaataaaagatatatgagatgtgagaaacataaccttttatttttctgaaggatacattatcaaacttgtacagtgtcatatttttccatttttctttgaaaaaaaggaaatacttcatggttcttgcaaaaatgcttctttggcattttgcatatgcagggtactgagcacttgctcttaaccactcaagttgaatattacaaaatcaaac

SEQ ID NO: 30382 - DNA, 865 bp, Zea Mays
ccatctcttgctcaatagccgttcgctcagctctctagaactcgggccctgttcgtcagagtcaaccctgtcctccctgcgcggatcgcaaccacatcgcacgaaaagctcgccggcagactcagatttcgtggaaccgcctcgcacctccacgctttaaggcctcatcatccgaagcacttgaccatctcccgtcacctagcactcaaaagaacctggccgccatcacctgagggagctcgagaaggggggagccgagggccgcggacacaagcttcgccgccaggaccaccgaccacccctgcgcgacgagcaagccactgaggacccaggtgttcagtaggtgtagactgctaagcaggagctcgttgaaggcaagttgtgcccttgatcacttttatttacctaataatgttccttttaatcattatgatctgcataggttaattttgatgggacccaataggtcaacctagtttgactatctttataccttgtttaccactgaacttttgggtagcacctgttattgccttatgtggttttgggtattgagatacacattattcatgatcattcttttattatcagtttgttatttactgttcatgataagatcattatgttaattgtaacatggagcgaccactcgggaaaactatgctaccataagggtggtatgggacgccctaggctaactaattagaaaagctagtggaggactaccttacccgaaaggggcaagggcaataggggagtggtcggtgtagaaaggttctcaggttgattttgctgcgatggtggttagatgagggatccctgcatttggacttcctagaaactgtagcgggttttctaaagctag

SEQ ID NO: 30383 - DNA, 652 bp, Zea Mays
tcttgtgttctgacatgcttctgcatgtaccatcgagtcacaatcgacgactcattcatgcctagtgggaattgcacatgaaatgtatgtgcggaattcatttcagggtatcacaaataaaataaagaaccaatcagttgcatatgaaatcaatacttcttttattatgagctgtatatcgcaattgcatcatagacgtgcagcttgggtcccctactgcgtgcctgtcgctctggcctcaccagtgtgacgccaaaggggtgtactccctgacaggctgcatatacccccaaatgcgcctcgagcgacaactgacaaaccacaacatccacagactttctgcaaaggcaaagcttcacttcctgcgaatcggggatggatcagttctttggacccaccagtttcacactagttctgttttgcagacttcttccccttctgcttctgtttctgcttcagttgagtgaggccaggcgctgtgatcttggcattcccgacgattgcagccaccagctcagggtctgtgcatgccttcatgagctccttctcacggttggtagcatcaggtgtgtgcaggaacaagctcatcgcggtttttgcagctgaaaccaacatacttgagcatcaggacaaatgttataccaagggagaa

SEQ ID NO: 30384 - DNA, 2106 bp, Zea Mays
actccctacccctagccgtcacacccaacagccagccacccttctcccccacgccatcctcctccctctctcccacacggcagcaggcagggcgccatctcctagcagctcctcccatggcgtcctctgcccttcttctcctccatggccgccgaagcccctcccatggccgacgctctctgctccagcccctccagcagctatggcgtcccccctcctccccttcttcttcctcaagccagcaggcacctccctctactccctgcgcgcagcagcagccatggcgctgcctctcttctccatggcgagtagcagctcattcacctctctctcccatggcgtgctgctccagtcggcctcccttctccccctcggctccttcctccaggccgggctcctatgccaggaacggctgctccacttgaccgctgctccattttttttcccctcgctctgctctctcggctgctggcagccagggcgcgacgcctctgctccttctctctaccccacaaaacagccagcgcgcaggagcttcttctccatggacgcccagaatcccagcagcgagcccccttcctcgctgttcgtcgtggtgcccgccggctgttcggcaaaatgcgcagcaagccacgcactgcagcagcttcgtcccttgccttgcgttgtgtcgagcttcgctactgcacatctcccataaaaaaacagcagcccctccgcgtcacgcgctcgactcgctgcgctcgcccgcgtggtgtcgcagtaggacagcagtcgtgtcgcattcgccatcgacctcgccttcgtgtacaccccctcgcagcagcgccaacatagcagccgcgacactcccctccaccccgcactcgccacgctcaacaaaaatgccccctcgcgtagctacacacttgttgttgctgcacgttgttcgtcgacgcgcagccccttcgcgccgtgcccgtgatgtcgtcgttcttgctgttttgtcgcgccaatcgacagccgcagcagcccctccgtggcgtgtgctccaccttgacacgccctcggtgcccgtcgtgctccttcgacttcgcttcggtctcccatgatcgacgacgcgttcgtcttcacgccacatgtgcagcaaccacgaccgaggtttgatatggtgagctgatgtgttattttgtgttagatcggatatatatatgtggctgcgatagttattttgtgcgtcgtaggggttgatcgcggatgtataaattgtttgctagaatgcttcgttgtaaaataatgtgttagtgtggcaaaaatttgataaaacctaaagcatgtttggtgacttccgcactcgactaatgagttagtctatattaattttttttgtattcatcgttggtgtaggttaaattaggtgaaaaatgtaatttacgtgatatataatgggcgtttggaagatgagataggttaatttagaaaggtgtgttatcaaacatatgtgccgaattgtgatgtagtagtgattgcgtaagttgaaccgaagtgtcccaagtacatgtcgtgatatggttgtattgagataataaattataagtgttgcgtgatatgagactcgatcgatgtagttaatattgaattggcctgtagagaggtggtgacatgccgaagtagtcatcgcttcctctacggttaagtcggagtcatgcgtgatgatgttatttatggggtgaatgcgtattgaaatattttatgttgtgccatatgattaggaagatgaaggatagatatgttgtttcggaaatgttagccaatagattcgaacaagcgtgatagaggttgagtcacttatgttataaaattgatgctcgacatgttaggtctcctaaaatgtggtgttttaggtgacttgtgtgttatccattttaagttgagaaatgtttaagagaagctaattaatttgctcccacccatgttttgagtcgcaatgtctaaaatggattgaatgaacttgagatgtattacaatagctgtgtgtcgtgttggtcatccaaaaatggcgaaaggtggtgtgcgatggtaattgggaaatagtcacgtcattagccaactcatgtcaggtaggag

SEQ ID NO: 30385 - DNA, 735 bp, Zea Mays
gtcatgttgtgtaaacaaataaaatattgtcatctttttaatggtgttaatgttgaacgccgacgacgtgtagataactaaagctaacatgtagttatctacggtgtcttccactttaatgtttagttcgccactgtgtcttgtatatcttgtgctatttttgtgctactttcattatattcatacatatgcatcttgcacctcatataggaccgagagatgatgatcgagctagtgatgtggtgccacccacaagatgcagtcgatggacgacccaaggaaggatggacataaccagtggatgctcgccaagcgagtacctcccccccagcaaacactatctaagtgttaaaaattaaaggcaagccccggttttatgcataacctgttatttatgctattttacttcacttaatgattgtaggattgattgtgcacttaagtgtaggaattgcttgaaaccctagttgcatgatctcaggaatcctattgagatgaatactagtatgctaagtcgagtagctgctttattaagtaggatctcggtagaagacgagtgatttttctagcactcgcgcgaggtcaggacattgattgtacccactttcatatcgtactgatgttggttgtgggcaacaatccatggggattagttgtctacgagatgaaatttgaataaggattaaggtgtggtaccgtgagtcaagcgtttgaacgtactaaacacataccgag

SEQ ID NO: 30386 - DNA, 871 bp, Zea Mays
ttaccttgcaaggataaaaactcgattcgaatcgtctgcttctcgcagctaatgagactgcttgatccatgctgctacattgagtaataagtggaaatgaggtgactggcaaaagatgttgattgatataatgtttgataccatgtatgaatagctaggtactcatctagtttaaaaggatcatactaaaacttgaaaagctaaaacttgattttagactcagctagtgcttttggcaaaccaaacccctcagccaaacagctgcatgtctagaggtagaggagtagactcctcacaccgggtaagtctagctgagtattagtatactcagccttgcttgtggcacaatttttgcaggtactctttaggatgatttgttgctggtgtgacttggccttcgtccctgccaccgggacagacggtcgagtgggttattgcttccgcaggagaggaccaggaggagtagcgtggccaggcttcgccatgttactcggttcttctccgttagttatttccgctgcattaaaatttatggttattatttctgaaactccgataatgtaatcactaatgatacttattaaatttgtggtattatgttttattgtatttctttgtgcctcaccttcgagtgagctagtggtattcgatcctggataagtggctttatcggactagatccgagggactgacgggttattcctatttaagtgtggtctagcttctaaggcgggacttaggcacttaagttggaataattcgggcggttccgccacatatttcctgatgcattattgattaatgtgtcggctatgggcatgggatattcatctttaggagtgctctatttaaattgcgaaaatcaatgcat

SEQ ID NO: 30387 - DNA, 1795 bp, Zea Mays
atggacaagagccctggtgctgcttctcacttacgtctttcctcgttggtgaaccgcggaatatatgaggccttggagttgagggatggaggatctgattatcttggcaagggtgttcttaagcttttggcttaacatttgagaggagatggcggtcacgatcacgtgggtgaagacgagacagatcttcatcagccgcggcaaccccaccgtcgaggtggacgtgggcctcagggatggcagctacgcgaggggggccgtacccagcggcgtatccactgttgaaaccaagagttgtctctcccaaggacgcatttcatcaccatcactaagcaacgcatgggcacatcaccagggtataagcttttttttgctattctaccttttttctctcttaccctgtttgttttctgaaattcgtcagttggttagtttttagctttctgaaaggctgaaagcaagatccgatccagcaaagccttttgactttctccctttcacttctacgtgcctttgcataattgtccatttttttaaaaaaatactacagcaagtagtacacgtttatttaccaaaccataaagcttcctgtgctgcgaaacagtagtatctggggaaggttatgtgtatgtcacagtactaacacagtggatcagaactaagcacagcagatcagatcagattttcttttaaggctgcttgatttatcttattatcaagcgtaagtctgttgttcttgttcgaattacaattgagagccagacacttcatgagatgcttggcagtaatatttctcttgtttgtgtgatcaatcatgccattattttagtctaatagatggacatgttttaaattttgaggaggcattgaaacaatttgcatcatgaaggcgttcgagaagttccagtatgtagatgttcttattcctattgtttcttttcctctaaagtaccgctgcacgagcctgttgtcgatgccttcgtgggccacacctatagccacaacagcaaggctaggagcagcaaggccaggacgaactgtacgatcctgacactaactagggtgtggcacaaggatagcaaatagtcgactgattagagctaggggatcttaggataagttgttaatttgttagggaatcagttatgggcactgtagatataaggcgctgattagtttgtatataggcatcgaagaaaaaactctttctgtccaacctcctccgacgatcatcctcctgtctgttccgatctcgtgcgggctccaccattgtaatgcttgccaccggtacaggtattgctccgttctgcttgttcctgtggaacatgttctttaagaaacatgaccactacaaggtataagcaccttagctgtcagtggatgccatggcagtggatgagggtgacagagctattgattccaactcatctgcatttggaagcatcagatgaacctgatcaatgtgacatgtatgaagctgacagtaaatcatcctcaacgccgcagatgcatacaaactcaaaggcaagctctcagcgttacaagtcaagtagaacaaatgacgagtgaaattgaggagcccagggtacctaatttaatgtttgttctaagaaaattttgagtttcagaatacatatgtaaatcaggatatatgtgtatatgtgtgtgttcttgtgctttgagctaaccaactatgtttaagtacttctccccatgttctttattgtttataatttgttataccaggagccacataagatgtcaatattagaaatttccacaaattaaactaata

SEQ ID NO: 30388 - DNA, 1194 bp, Zea Mays
atggacaagagccctggtgctgcttctcacttacgtctttcctcgttggtgaaccgcggaatatatgaggccttggagttgagggatggaggatctgattatcttggcaagggtgttcttaaggagatggcggtcacgatcacgtgggtgaagacgagacagatcttcatcagccgcggcaaccccaccgtcgaggtggacgtgggcctcagggatggcagctacgcgaggggggccgtacccagcggcgtatccactggaggcattgaaacaatttgcatcatgaaggcgttcgagaagttccagtatgtagatgttcttattcctattgtttcttttcctctaaagtaccgctgcacgagcctgttgtcgatgccttcgtgggccacacctatagccacaacagcaaggctaggagcagcaaggccaggacgaactgtacgatcctgacactaactagggtgtggcacaaggatagcaaatagtcgactgattagagctaggggatcttaggataagttgttaatttgttagggaatcagttatgggcactgtagatataaggcgctgattagtttgtatataggcatcgaagaaaaaactctttctgtccaacctcctccgacgatcatcctcctgtctgttccgatctcgtgcgggctccaccattgtaatgcttgccaccggtacaggtattgctccgttctgcttgttcctgtggaacatgttctttaagaaacatgaccactacaaggtataagcaccttagctgtcagtggatgccatggcagtggatgagggtgacagagctattgattccaactcatctgcatttggaagcatcagatgaacctgatcaatgtgacatgtatgaagctgacagtaaatcatcctcaacgccgcagatgcatacaaactcaaaggcaagctctcagcgttacaagtcaagtagaacaaatgacgagtgaaattgaggagcccagggtacctaatttaatgtttgttctaagaaaattttgagtttcagaatacatatgtaaatcaggatatatgtgtatatgtgtgtgttcttgtgctttgagctaaccaactatgtttaagtacttctccccatgttctttattgtttataatttgttataccaggagccacataagatgtcaatattagaaatttccacaaattaaactaata

SEQ ID NO: 30389 - DNA, 1773 bp, Zea Mays
atggacaagagccctggtgctgcttctcacttacgtctttcctcgttggtgaaccgcggaatatatgaggccttggagttgagggatggaggatctgattatcttggcaagggtgttcttaaggagatggcggtcacgatcacgtgggtgaagacgagacagatcttcatcagccgcggcaaccccaccgtcgaggtggacgtgggcctcagggatggcagctacgcgaggggggccgtacccagcggcgtatccactgttgaaaccaagagttgtctctcccaaggacgcatttcatcaccatcactaagcaacgcatgggcacatcaccagggtataagcttttttttgctattctaccttttttctctcttaccctgtttgttttctgaaattcgtcagttggttagtttttagctttctgaaaggctgaaagcaagatccgatccagcaaagccttttgactttctccctttcacttctacgtgcctttgcataattgtccatttttttaaaaaaatactacagcaagtagtacacgtttatttaccaaaccataaagcttcctgtgctgcgaaacagtagtatctggggaaggttatgtgtatgtcacagtactaacacagtggatcagaactaagcacagcagatcagatcagattttcttttaaggctgcttgatttatcttattatcaagcgtaagtctgttgttcttgttcgaattacaattgagagccagacacttcatgagatgcttggcagtaatatttctcttgtttgtgtgatcaatcatgccattattttagtctaatagatggacatgttttaaattttgaggaggcattgaaacaatttgcatcatgaaggcgttcgagaagttccagtatgtagatgttcttattcctattgtttcttttcctctaaagtaccgctgcacgagcctgttgtcgatgccttcgtgggccacacctatagccacaacagcaaggctaggagcagcaaggccaggacgaactgtacgatcctgacactaactagggtgtggcacaaggatagcaaatagtcgactgattagagctaggggatcttaggataagttgttaatttgttagggaatcagttatgggcactgtagatataaggcgctgattagtttgtatataggcatcgaagaaaaaactctttctgtccaacctcctccgacgatcatcctcctgtctgttccgatctcgtgcgggctccaccattgtaatgcttgccaccggtacaggtattgctccgttctgcttgttcctgtggaacatgttctttaagaaacatgaccactacaaggtataagcaccttagctgtcagtggatgccatggcagtggatgagggtgacagagctattgattccaactcatctgcatttggaagcatcagatgaacctgatcaatgtgacatgtatgaagctgacagtaaatcatcctcaacgccgcagatgcatacaaactcaaaggcaagctctcagcgttacaagtcaagtagaacaaatgacgagtgaaattgaggagcccagggtacctaatttaatgtttgttctaagaaaattttgagtttcagaatacatatgtaaatcaggatatatgtgtatatgtgtgtgttcttgtgctttgagctaaccaactatgtttaagtacttctccccatgttctttattgtttataatttgttataccaggagccacataagatgtcaatattagaaatttccacaaattaaactaata

SEQ ID NO: 30390 - DNA, 964 bp, Zea Mays
atggacaagagccctggtgctgcttctcacttacgtctttcctcgttggtgaaccgcggaatatatgaggccttggagttgagggatggaggatctgattatcttggcaagggtgttcttaagcttttggcttaacatttgagaggagatggcggtcacgatcacgtgggtgaagacgagacagatcttcatcagccgcggcaaccccaccgtcgaggtggacgtgggcctcagggatggcagctacgcgaggggggccgtacccagcggcgtatccactgttgaaaccaagagttgtctctcccaaggacgcatttcatcaccatcactaagcaacgcatgggcacatcaccagggcatcgaagaaaaaactctttctgtccaacctcctccgacgatcatcctcctgtctgttccgatctcgtgcgggctccaccattgtaatgcttgccaccggtacaggtattgctccgttctgcttgttcctgtggaacatgttctttaagaaacatgaccactacaaggtataagcaccttagctgtcagtggatgccatggcagtggatgagggtgacagagctattgattccaactcatctgcatttggaagcatcagatgaacctgatcaatgtgacatgtatgaagctgacagtaaatcatcctcaacgccgcagatgcatacaaactcaaaggcaagctctcagcgttacaagtcaagtagaacaaatgacgagtgaaattgaggagcccagggtacctaatttaatgtttgttctaagaaaattttgagtttcagaatacatatgtaaatcaggatatatgtgtatatgtgtgtgttcttgtgctttgagctaaccaactatgtttaagtacttctccccatgttctttattgtttataatttgttataccaggagccacataagatgtcaatattagaaatttccacaaattaaactaata

SEQ ID NO: 30391 - DNA, 1142 bp, Zea Mays
tgcgaagctcgcaggagaagaacacgtaggtggagagcatgatctgaaggatctggaaccttgttaggaaggaggtgtgcctttttgctcttggttcatttcttctctcccttcgtgctgcttcttatgttcctcagatcttgtgcccatctcgattttggtgactcaatttgcaagttgggttgggcacgtgagatctggaactatgttgcaggctaaaaagatgcctctaaagaagctaaaagaagaggagggctagagaagaggttaattaacatggaagtagatgattacgtccaagacaccatacctagggataacgcatggaatatatgaggccttggagttgagggatggaggatctgattatcttggcaagggtgttcttaagcttttggcttaacatttgagaggagatggcggtcacgatcacgtgggtgaagacgagacagatcttcatcagccgcggcaaccccaccgtcgaggtggacgtgggcctcagggatggcagctacgcgaggggggccgtacccagcggcgtatccactgttgaaaccaagagttgtctctcccaaggacgcatttcatcaccatcactaagcaacgcatgggcacatcaccaggcttgccaccggtacaggtattgctccgttctgcttgttcctgtggaacatgttctttaagaaacatgaccactacaaggtataagcaccttagctgtcagtggatgccatggcagtggatgagggtgacagagctattgattccaactcatctgcatttggaagcatcagatgaacctgatcaatgtgacatgtatgaagctgacagtaaatcatcctcaacgccgcagatgcatacaaactcaaaggcaagctctcagcgttacaagtcaagtagaacaaatgacgagtgaaattgaggagcccagggtacctaatttaatgtttgttctaagaaaattttgagtttcagaatacatatgtaaatcaggatatatgtgtatatgtgtgtgttcttgtgctttgagctaaccaactatgtttaagtacttctccccatgttctttattgtttataatttgttataccaggagccacataagatgtcaatattagaaatttccacaaattaaactaata

SEQ ID NO: 30392 - DNA, 1671 bp, Zea Mays
ctggaaccttgttaggaaggagatcttgtgcccatctcgattttggtgactcaatttgcaagttgggttgggcacgtgagatctggaactatgttgcaggctaaaaagatgcctctaaagaagctaaaagaagaggagggctagagaagaggttaattaacatggaagtagatgattacgtccaagacaccatacctagggataacgcatggtaacaaattgattcttgtttttgtccccttctttttcctgtgttgttgtatgtttggaggataggatgaccagagtttgcctgcaaccgatctaaaggttagagcgagcgccatgtgatgcaggtatgtacatcgctgttccaaaattcatgtgtttgatgccggattgcgtgtagctagctgttcatagtagggattagcgctgaaaaattgggggaaagcaaagtacactggtgacctcaagttcaatcgaatcaatatggcacatcagttagactgtttgcttatcttagaaaattgatttttgttctttttactactaaagccttacttctctcttctgtaattaaagtggtgaccaacttggaaggacagttcatatgtcaagttgggagttctaaggaaggattgtttaatggccaatttgatgctgccctatttgaccaccctcaggggaagaaacaactattatttccatgcaataataatagctcttacaaaaacatgctatgagctcttaacatttgagataactatatctttgaacaattgatctctcaggaatatatgaggccttggagttgagggatggaggatctgattatcttggcaagggtgttcttaaggagatggcggtcacgatcacgtgggtgaagacgagacagatcttcatcagccgcggcaaccccaccgtcgaggtggacgtgggcctcagggatggcagctacgcgaggggggccgtacccagcggcgtatccactggaggcattgaaacaatttgcatcatgaaggcgttcgagaagttccagtatgtagatgttcttattcctattgtttcttttcctctaaagtaccgctgcacgagcctgttgtcgatgccttcgtgggccacacctatagccacaacagcaaggctaggagcagcaaggccaggacgaactcttgccaccggtacaggtattgctccgttctgcttgttcctgtggaacatgttctttaagaaacatgaccactacaaggtataagcaccttagctgtcagtggatgccatggcagtggatgagggtgacagagctattgattccaactcatctgcatttggaagcatcagatgaacctgatcaatgtgacatgtatgaagctgacagtaaatcatcctcaacgccgcagatgcatacaaactcaaaggcaagctctcagcgttacaagtcaagtagaacaaatgacgagtgaaattgaggagcccagggtacctaatttaatgtttgttctaagaaaattttgagtttcagaatacatatgtaaatcaggatatatgtgtatatgtgtgtgttcttgtgctttgagctaaccaactatgtttaagtacttctccccatgttctttattgtttataatttgttataccaggagccacataagatgtcaatattagaaatttccacaaattaaactaata

SEQ ID NO: 30393 - DNA, 2975 bp, Zea Mays
tctttgtgaattgacagtggtgtgcccctcccctgccacttcctatatatctgccctctatcgcaactccgttgctctgtagcggttacctccctttcgctctactgctctctctctctctctggaccttgccgttctctccctcgtcggcaatcagcccgcttcctgtgctctctatgctccccttccgttcgtagcctcggccttcgtctccctccatggacccgcgctaaatgcatcgcgagattccaaaccggtagcgtttcttcctgctccatccgccgcaagatgtaagcaagggcctcacttcacacccggagtgggagaccatccagaatacatcctcagatcttcttgtgtctgagaaaaaagcgacgcccttcaatggaggagagcttcgtgcccttgcggggcatcaagaacgacctccacgggaggctcgcctgctacaagcaggactgggccggagggttccgtgccggtatcaggatcctggcgccgacgacctacatattcttcgcgtccgcgataccggtcatatcgttcggggagcaattggagaggaacactgatggagtcctcacggcagtgcagacgttggcatccactgcgctgtgcggcgtaatccactccatcgtgggagggcagccgctgctgatcctgggagtcgccgaaccgacggtgctcatgtacacattcatgttcagcttcgccaaggacaggcccgacctcgggcggagtctgttcctggcctggaccggttgggtttgcgtgtggactgccatcctactcttcttgctggccatactaggcgcgtgctccatcatcaaccggttcacccgcgtcgctggcgagctgtttgggcttctgatcgctatgctcttcatgcagcaggctatcaagggacttatcgatgagttccgcattcctgagagggaagaccgaaaggcgctagagtttgttccatcatggcggtttgccaacggaatgtttgcaattgtgttgtcgtttggccttttactcactgccctgaggagcaggaaggcacggtcatggcgctatggagcaggttggctgcgtggcttcatcgctgactatggtgttccactgatggtgctagtttggactggagtgtcttacataccatatggaaatgtaccaaaagcaattccgcgacgccttttcagtcctaatccatggtcccctggtgcatacgataactggacagtcatcaaggatatgacacaagttccactcctctacatcattggtgccttcataccagcaacaatgattgctgttctctactacttcgatcatagcgttgcatctcagcttgctcagcagaaagagttcaatttgaggaaacctccatccttccactatgatttgcttctcttaggcttcctgacgttaatgtgtggccttattggtatccctccatcaaatggtgtcattccacaatcacccatgcacacgaagagtttggctactctcaagcatcagctgcttcgtaaccggctagtagccactgcacgaaagagcatgagccagaatgcgagcttgagccaactgtatggcagcatgcaggatgcttatcagcagatgcagacaccactggtttatcagcaacagtctgtcagaagaggcttaaatgagctcaaggactcaacagtccagctagcttcgagtatgggtaacattgatgcaccagttgatgagacagtctttgacatagagaaagaaattgatgatctgcttcccattgaggtcaaggagcagcgcttgagcaacttgctacaggcttccatggtgggtggttgtgtcgctgctatgccactactcaagaagatccctacatctgtcctctggggctattttgccttcatggccattgagagcttgcctggtaaccagttttgggaaaggatcttgctgctcttcactgctcccagcagaagatacaaggtgcttgaagagtaccacaccacgttcgtcgagacagtgccattcaagacgatagccatgttcacaatgttccagacagcgtacctgttggtctgctttggaatcacatggattccaatagctggagttcttttccccctcatgatcatgctcctggttccagtcaggcagtacatcctccccaagctcttcaaaggtgcgcatctaactgacctagatgcagctgaatatgaggaatcgccggctataccattcagccttgctgcgacatcgatgttgcattcggaaacacccagagtgcagaaatcctagacaacatggtcacaagaagccggggtgagatcaaacgcatcaacagcccgaagatcaccagctcaggtggcacgcctgtggcagaactgaaaggcatccgcagcccatccatttctgaaaaagcatacagccctcgtgtcattgagctctggcatgagcgcagccctaggacgccgtccatgctgggtgaaggctcaacaccaaagtgaatgaaagcaacgatacattgcttaagctattcaaccactggtcatcagttatatgagtggttttaaagtggtttcagtgttagtatccttatatgaagatgtcctctgatgagattactacttatgtgtatctccagtctctcttttttttgttctcctgattaaaggagtgatatacctgtaatctctgaactagcagaatattagagtggctacttgaaaaatcatgtcactagcatattatcattctttaattgtctataatcattgatactatattactatgtacatgaaattggtggaaattatgcacatgcatttccattgaacccaagcatgtatctggattctggaatactcaaatgctcacaatattccattgacggcggtggtgaagcatggaactttatagaccctgcttcccttctgaatttgcacacattttgcatttttgctagttgtaacaagttctcttgcttcttttta

SEQ ID NO: 30394 - DNA, 4698 bp, Zea Mays
ctgctttgcggggaagtgggaccatggcctcgagcctggttaccacggacaggagatggggtgctactcctgcaaggaaatctagtatgactgttctgggaaaagtcccaaaaccgattaatttaccaagtcagaggttggaaaacaatggtcttgatcccaatctggaactggttccaaagggcacccacacctggggcagcaaagcaccatctacaacaccaaacgcatggagttcctcatcaattctgtcttccaagaacgatggaagttccacttcatctagtcacttcaatgtccggcccacctctggcggaggctcaaggccatcaacagctggaagtgaatcacttggttcacccaatgcttggggtgcaaattctcgcccatcttcagcatcaggcacatttccatcatctcatctaccaatggccacaaatcgtccccaaagtgcggaaacaagacctggaagttcacaaatttctcgatttgcggataatgcttcagataatgtgaaagcatcgataaggactattgatagatcggaatcttcatcacgtgggcctgggttcacattaagtactggtgatttcccaacgcttggctctgaagcaaacagtcaacgagggcatagttcgaaagggcgcccaacttctagtttgggtaaagaggtgtcgcaaggtgaacaagtgaagagcctagcaactggaactggtgaagtaatttcaccatccaataatcaccctgttgatatcatgaagacagagcatcatgcacacactggaggtgctcctgtcccagccacaagtgtgccaaatgaaggcttgcaacaacagccatatccaccaaattttcctatgcctcctctgcagtttgattcatggcgtgcacctcctggtcacccccctgagggaatgtggcatagaggaccagtgccaggtgggccatacagacctgttggcccccctggtagtttccctgtcgaaccctttggttattatggccagttcccacccaactccgaagctgcaggaaggcagggctcagggcatggtggatatcacactaaaaatgatgtgtatcatcctatgcctcataattcctatattatgaatcagcctgttattccagtcagaccagtttatcagggtccagtgctgtatgatgggtattatggccctcaagcaaatttcaataacaccaatgttagagatcctcattttgttggaggtcctggaatactaaatcaattcccaaatcagaatgacaggtttcaccctggacatcctcaaaacagaccaggcaaacatgaaacggtcccaagggagcagctggaatctgataagctacatgtctttcaccaagaacaccctgggagtttgcatgataatccagatcgtctaggaggttcccgtgaatttgaaaggaatgtgcagccagcaccgccacttcttccacatcctgatggaaaacagactgatatgaacatgagggcagatacaagggacacctttagtgagactgaaagaaccgtggtacttacaaaatcggtgcctaaccagagaggttcggttggtatagaccatttgtctgtttatgaaaacacacgatcccatcacagagaaacttgtgatggcactctgcgcaagaagttcaaggaggatagctcagttgtacttgaccagcatcctgtcattaagaagaatgcagctttaatagagaaaattgagagtttgaacaacaaagccagaaatgtctatgcacagaatctcccagaaccagcttcatccaaggaattcaagaagcataaaaaaactactgatgtttcatctaatgatgtcatcagtacgacatgcacatctgatcaggcagtttctgtttcacatatttctgctgtggtgcagagacgaccaaatgtgaccattgagggagagttgattcttcgagaaacagttaccatggtccttgtaaagataggccagctaataaattcggaagttgtggacgtggagaaagttacataactaattcattaccagtagctgatttggggaatgatatccatcatggccaacaacctcagattgcctcacagctgcaacctgtgattgtacctgatgatatgccagcttcactcgattatgagtctcagcgggcaaaaatgaaggagttggctgcagaacgtgcaaaaaggatgaaagctgaggaagaggaacggataaagaaccaaaaagcaaaagcactcgcaaagttggaagaattgaacaggcgatcatcagtacttcagaagaaatcaaatgatacaaaagtagaaactgatgatgcacatgataagcaacagattggacttgatgtgaatgctaaacttgacacttcaactgaacaacatgatgttgttacgcctgataggcttactgctcttctgcctcctaatgatcccaatcatactatggttcagatacaggcccagtctactgcacaatcaaatgctttagatggtggcaaagcgcatgatgctcataccacctcatctttggtcaagaacacacacagcaacatggagcatgttgtgcagaagagtatctcacagtcgcataatatcagtatggtaaagactaagcaaggctacaggaaaagacaggttgtttcagaggagaaaatttctggcgagaaggcaagtgcttcagtaaccactgattccagtgtgcagaaaaatgttgatgttcccgtcgacacagtaacggctgttgttgcaccacatgatgatcccccaactcagaacaagaagggaacccggcatttgaggagtaagaaaaagtataactgttggtggactttcacttacagctatgaatcaggagcatgttaattcagcagatggaacaaatagtactgaaagtggcctatcaagacctcagcaagcaagaaaatctggaaagcatcagcatgttcttcggcctgttgagaagccacatgggaatgatggtgtcttgtgggcaccagatatgctaccattgcataatgagcagtctgatggagccatgccgactgcagcagtagctgacgtcactcagccagctgggaaagccatcaatgatggagagaatgtgacaagaacaaagagggctgaaatggaaagatatgttcccaagcctatgtccaaagagctgcaacaacataatccaagccatgataaggaagcaattgataagcccggtgctgctaaatcacatcctgcagccgaacccaagaaaactagcaaaggacatgggggcaaatctaatccttcttggcgcaagcgggatccagatcaacctgctatggtggcaccaaattctgttgaccaagcagacaactcttatgaatcaaaggaggttcagaactgcaccgatatgaatcagcctgttgaacttggcaaggaagatacacagttaaaatccaatgtagatgctgctgctgagaatagctcagctccagctcaaactgttccactatctgccggtggtgcaaaagaacatagtgcggctaacaggcaaaggcgacagcattttaaggctcaaagaaatgaagcaagtagctactcaaatgagagcaaagttagagagggcaagaacgactctgtctatcaatcagcatcaccggtgattgattcgaactcatccaatcacaagaatgtgccaagatcagatgtgaaaaacagcggcatagtttcacattctagagcctggaagccgaaaaccaattcccatcctcagaacagctcagacggcaagattgctgttgaagggaaagtggattcccatggtggtaggcttgagctgaacatgcccaaaggatctgatacaattacccatcaagacaccagcagtaaaccgatgaaaaggagtgatggcaccgatgaggcctcacacagcaaacaggagaacctgacacaggaagatggtaaccagaagatcgagactggacaggagcaggctaatcctgcaccgcgtcgccaaggccagcccaatgcaaggtatcacaggggaggtggggcacacaggggaaggggcggttatgacactgggaggccaaaccatggcacaaacgcggagaggtggaagggtggcagccatcttgaataccagccggtcggatcccaaaacaaagctggaggcgacttccagctgagtcagggcatggaagatcgaaccgaggggcctcctgcatctggacaagcgttcggggagcgtggccacagcagggggctacgcccagcaggccgctttgtccggcgaaacactgcctctacgtctaccactaattctcaccaacatgaataatcttccgcggctgccacatccgctgagctgcaggaaaaaactcgccttcgtggtggcgtttcacaacatatttggatgcacttgggtgggcggttggtgtccgtcgtcaacgacgagtctacggtggtgagcattaggatcatgtaacggtattagtctttgccccaaagggcacaccctggcccctcacgtgtcacgtgtgactagattttttccagaggaacatccacccttgtttgggatgcaacgttggaacgtgtgctaacagagttgtgtttgagaactgggtttaaatgttgttagcctgtgttgctgatgggaactgagagtgttggtttttgcccaactttcatggcatgtctttgtttgattgttg

SEQ ID NO: 30395 - DNA, 4791 bp, Zea Mays
cggggaagtgggaccatggcctcgagcctggttaccacggacaggagatggggtgctactcctgcaaggaaatctagtatgactgttctgggaaaagtcccaaaaccgattaatttaccaagtcagaggttggaaaacaatggtcttgatcccaatctggaactggttccaaagggcacccacacctggggcagcaaagcaccatctacaacaccaaacgcatggagttcctcatcaattctgtcttccaagaacgatggaagttccacttcatctagtcacttcaatgtccggcccacctctggcggaggctcaaggccatcaacagctggaagtgaatcacttggttcacccaatgcttggggtgcaaattctcgcccatcttcagcatcaggcacatttccatcatctcatctaccaatggccacaaatcgtccccaaagtgcggaaacaagacctggaagttcacaaatttctcgatttgcggataatgcttcagataatgtgaaagcatcgataaggactattgatagatcggaatcttcatcacgtgggcctgggttcacattaagtactggtgatttcccaacgcttggctctgaagcaaacagtcaacgagggcatagttcgaaagggcgcccaacttctagtttgggtaaagaggtgtcgcaaggtgaacaagtgaagagcctagcaactggaactggtgaagtaatttcaccatccaataatcaccctgttgatatcatgaagacagagcatcatgcacacactggaggtgctcctgtcccagccacaagtgtgccaaatgaaggcttgcaacaacagccatatccaccaaattttcctatgcctcctctgcagtttgattcatggcgtgcacctcctggtcacccccctgagggaatgtggcatagaggaccagtgccaggtgggccatacagacctgttggcccccctggtagtttccctgtcgaaccctttggttattatggccagttcccacccaactccgaagctgcaggaaggcagggctcagggcatggtggatatcacactaaaaatgatgtgtatcatcctatgcctcataattcctatattatgaatcagcctgttattccagtcagaccagtttatcagggtccagtgctgtatgatgggtattatggccctcaagcaaatttcaataacaccaatgttagagatcctcattttgttggaggtcctggaatactaaatcaattcccaaatcagaatgacaggtttcaccctggacatcctcaaaacagaccaggcaaacatgaaacggtcccaagggagcagctggaatctgataagctacatgtctttcaccaagaacaccctgggagtttgcatgataatccagatcgtctaggaggttcccgtgaatttgaaaggaatgtgcagccagcaccgccacttcttccacatcctgatggaaaacagactgatatgaacatgagggcagatacaagggacacctttagtgagactgaaagaaccgtggtacttacaaaatcggtgcctaaccagagaggttcggttggtatagaccatttgtctgtttatgaaaacacacgatcccatcacagagaaacttgtgatggcactctgcgcaagaagttcaaggaggatagctcagttgtacttgaccagcatcctgtcattaagaagaatgcagctttaatagagaaaattgagagtttgaacaacaaagccagaaatgtctatgcacagaatctcccagaaccagcttcatccaaggaattcaagaagcataaaaaaactactgatgtttcatctaatgatgtcatcagtacgacatgcacatctgatcaggcagtttctgtttcacatatttctgctgtggtgcagagacgaccaaatgtgaccattgagggtacaattcttggaccggcacattcacatttaactgaatttagcaaagctgagaagcttggtgattcaattaacaatcatttacataggagagttgattcttcgagaaacagttaccatggtccttgtaaagataggccagctaataaattcggaagttgtggacgtggagaaagttacataactaattcattaccagtagctgatttggggaatgatatccatcatggccaacaacctcagattgcctcacagctgcaacctgtgattgtacctgatgatatgccagcttcactcgattatgagtctcagaacaaaaagcaggatgcagcatcaaatgctcaaaacaatcagcgggcaaaaatgaaggagttggctgcagaacgtgcaaaaaggatgaaagctgaggaagaggaacggataaagaaccaaaaagcaaaagcactcgcaaagttggaagaattgaacaggcgatcatcagtacttcagaagaaatcaaatgatacaaaagtagaaactgatgatgcacatgataagcaacagattggacttgatgtgaatgctaaacttgacacttcaactgaacaacatgatgttgttacgcctgataggcttactgctcttctgcctcctaatgatcccaatcatactatggttcagatacaggcccagtctactgcacaatcaaatgctttagatggtggcaaagcgcatgatgctcataccacctcatctttggtcaagaacacacacagcaacatggagcatgttgtgcagaagagtatctcacagtcgcataatatcagtatggtaaagactaagcaaggctacaggaaaagacaggttgtttcagaggagaaaatttctggcgagaaggcaagtgcttcagtaaccactgattccagtgtgcagaaaaatgttgatgttcccgtcgacacagtaacggctgttgttgcaccacatgatgatcccccaactcagaacaagaagggaacccggcatttgaggagtaagaaaaagctatgaatcaggagcatgttaattcagcagatggaacaaatagtactgaaagtggcctatcaagacctcagcaagcaagaaaatctggaaagcatcagcatgttcttcggcctgttgagaagccacatgggaatgatggtgtcttgtgggcaccagatatgctaccattgcataatgagcagtctgatggagccatgccgactgcagcagtagctgacgtcactcagccagctgggaaagccatcaatgatggagagaatgtgacaagaacaaagagggctgaaatggaaagatatgttcccaagcctatgtccaaagagctgcaacaacataatccaagccatgataaggaagcaattgataagcccggtgctgctaaatcacatcctgcagccgaacccaagaaaactagcaaaggacatgggggcaaatctaatccttcttggcgcaagcgggatccagatcaacctgctatggtggcaccaaattctgttgaccaagcagacaactcttatgaatcaaaggaggttcagaactgcaccgatatgaatcagcctgttgaacttggcaaggaagatacacagttaaaatccaatgtagatgctgctgctgagaatagctcagctccagctcaaactgttccactatctgccggtggtgcaaaagaacatagtgcggctaacaggcaaaggcgacagcattttaaggctcaaagaaatgaagcaagtagctactcaaatgagagcaaagttagagagggcaagaacgactctgtctatcaatcagcatcaccggtgattgattcgaactcatccaatcacaagaatgtgccaagatcagatgtgaaaaacagcggcatagtttcacattctagagcctggaagccgaaaaccaattcccatcctcagaacagctcagacggcaagattgctgttgaagggaaagtggattcccatggtggtaggcttgagctgaacatgcccaaaggatctgatacaattacccatcaagacaccagcagtaaaccgatgaaaaggagtgatggcaccgatgaggcctcacacagcaaacaggagaacctgacacaggaagatggtaaccagaagatcgagactggacaggagcaggctaatcctgcaccgcgtcgccaaggccagcccaatgcaaggtatcacaggggaggtggggcacacaggggaaggggcggttatgacactgggaggccaaaccatggcacaaacgcggagaggtggaagggtggcagccatcttgaataccagccggtcggatcccaaaacaaagctggaggcgacttccagctgagtcagggcatggaagatcgaaccgaggggcctcctgcatctggacaagcgttcggggagcgtggccacagcagggggctacgcccagcaggccgctttgtccggcgaaacactgcctctacgtctaccactaattctcaccaacatgaataatcttccgcggctgccacatccgctgagctgcaggaaaaaactcgccttcgtggtggcgtttcacaacatatttggatgcacttgggtgggcggttggtgtccgtcgtcaacgacgagtctacggtggtgagcattaggatcatgtaacggtattagtctttgccccaaagggcacaccctggcccctcacgtgtcacgtgtgactagattttttccagaggaacatccacccttgtttgggatgcaacgttggaacgtgtgctaacagagttgtgtttgagaactgggtttaaatgttgttagcctgtgttgctgatgggaactgagagtgttggtttttgcccaactttcatggcatgtctttgtttgattgttg

SEQ ID NO: 30396 - DNA, 4932 bp, Zea Mays
aagtgggaccatggcctcgagcctggttaccacggacaggagatggggtgctactcctgcaaggaaatctagtatgactgttctgggaaaagtcccaaaaccgattaatttaccaagtcagaggttggaaaacaatggtcttgatcccaatctggaactggttccaaagggcacccacacctggggcagcaaagcaccatctacaacaccaaacgcatggagttcctcatcaattctgtcttccaagaacgatggaagttccacttcatctagtcacttcaatgtccggcccacctctggcggaggctcaaggccatcaacagctggaagtgaatcacttggttcacccaatgcttggggtgcaaattctcgcccatcttcagcatcaggcacatttccatcatctcatctaccaatggccacaaatcgtccccaaagtgcggaaacaagacctggaagttcacaaatttctcgatttgcggataatgcttcagataatgtgaaagcatcgataaggactattgatagatcggaatcttcatcacgtgggcctgggttcacattaagtactggtgatttcccaacgcttggctctgaagcaaacagtcaacgagggcatagttcgaaagggcgcccaacttctagtttgggtaaagaggtgtcgcaaggtgaacaagtgaagagcctagcaactggaactggtgaagtaatttcaccatccaataatcaccctgttgatatcatgaagacagagcatcatgcacacactggaggtgctcctgtcccagccacaagtgtgccaaatgaaggcttgcaacaacagccatatccaccaaattttcctatgcctcctctgcagtttgattcatggcgtgcacctcctggtcacccccctgagggaatgtggcatagaggaccagtgccaggtgggccatacagacctgttggcccccctggtagtttccctgtcgaaccctttggttattatggccagttcccacccaactccgaagctgcaggaaggcagggctcagggcatggtggatatcacactaaaaatgatgtgtatcatcctatgcctcataattcctatattatgaatcagcctgttattccagtcagaccagtttatcagggtccagtgctgtatgatgggtattatggccctcaagcaaatttcaataacaccaatgttagagatcctcattttgttggaggtcctggaatactaaatcaattcccaaatcagaatgacaggtttcaccctggacatcctcaaaacagaccaggcaaacatgaaacggtcccaagggagcagctggaatctgataagctacatgtctttcaccaagaacaccctgggagtttgcatgataatccagatcgtctaggaggttcccgtgaatttgaaaggaatgtgcagccagcaccgccacttcttccacatcctgatggaaaacagactgatatgaacatgagggcagatacaagggacacctttagtgagactgaaagaaccgtggtacttacaaaatcggtgcctaaccagagaggttcggttggtatagaccatttgtctgtttatgaaaacacacgatcccatcacagagaaacttgtgatggcactctgcgcaagaagttcaaggaggatagctcagttgtacttgaccagcatcctgtcattaagaagaatgcagctttaatagagaaaattgagagtttgaacaacaaagccagaaatgtctatgcacagaatctcccagaaccagcttcatccaaggaattcaagaagcataaaaaaactactgatgtttcatctaatgatgtcatcagtacgacatgcacatctgatcaggcagtttctgtttcacatatttctgctgtggtgcagagacgaccaaatgtgaccattgagggtacaattcttggaccggcacattcacatttaactgaatttagcaaagctgagaagcttggtgattcaattaacaatcatttacataggagagttgattcttcgagaaacagttaccatggtccttgtaaagataggccagctaataaattcggaagttgtggacgtggagaaagttacataactaattcattaccagtagctgatttggggaatgatatccatcatggccaacaacctcagattgcctcacagctgcaacctgtgattgtacctgatgatatgccagcttcactcgattatgagtctcagcgggcaaaaatgaaggagttggctgcagaacgtgcaaaaaggatgaaagctgaggaagaggaacggataaagaaccaaaaagcaaaagcactcgcaaagttggaagaattgaacaggcgatcatcagtacttcagaagaaatcaaatgatacaaaagtagaaactgatgatgcacatgataagcaacagattggacttgatgtgaatgctaaacttgacacttcaactgaacaacatgatgttgttacgcctgataggcttactgctcttctgcctcctaatgatcccaatcatactatggttcagatacaggcccagtctactgcacaatcaaatgctttagatggtggcaaagcgcatgatgctcataccacctcatctttggtcaagaacacacacagcaacatggagcatgttgtgcagaagagtatctcacagtcgcataatatcagtatggtaaagactaagcaaggctacaggaaaagacaggttgtttcagaggagaaaatttctggcgagaaggcaagtgcttcagtaaccactgattccagtgtgcagaaaaatgttgatgttcccgtcgacacagtaacggctgttgttgcaccacatgatgatcccccaactcagaacaagaagggaacccggcatttgaggagtaagaaaaaggtagatgatgcttcagttatttctaaacatccacctgtggtgtttaatgaacagaatacagtgaaaatctctaccgagccaaaaacacatactggtggtgttattatcagtagctctattgttccgattgaaggtactattgtaactgttggaagtataactgttggtggactttcacttacagctatgaatcaggagcatgttaattcagcagatggaacaaatagtactgaaagtggcctatcaagacctcagcaagcaagaaaatctggaaagcatcagcatgttcttcggcctgttgagaagccacatgggaatgatggtgtcttgtgggcaccagatatgctaccattgcataatgagcagtctgatggagccatgccgactgcagcagtagctgacgtcactcagccagctgggaaagccatcaatgatggagagaatgtgacaagaacaaagagggctgaaatggaaagatatgttcccaagcctatgtccaaagagctgcaacaacataatccaagccatgataaggaagcaattgataagcccggtgctgctaaatcacatcctgcagccgaacccaagaaaactagcaaaggacatgggggcaaatctaatccttcttggcgcaagcgggatccagatcaacctgctatggtggcaccaaattctgttgaccaagcagacaactcttatgaatcaaaggaggttcagaactgcaccgatatgaatcagcctgttgaacttggcaaggaagatacacagttaaaatccaatgtagatgctgctgctgagaatagctcagctccagctcaaactgttccactatctgccggtggtgcaaaagaacatagtgcggctaacaggcaaaggcgacagcattttaaggctcaaagaaatgaagcaagtagctactcaaatgagagcaaagttagagagggcaagaacgactctgtctatcaatcagcatcaccggtgattgattcgaactcatccaatcacaagaatgtgccaagatcagatgtgaaaaacagcggcatagtttcacattctagagcctggaagccgaaaaccaattcccatcctcagaacagctcagacggcaagattgctgttgaagggaaagtggattcccatggtggtaggcttgagctgaacatgcccaaaggatctgatacaattacccatcaagacaccagcagtaaaccgatgaaaaggagtgatggcaccgatgaggcctcacacagcaaacaggagaacctgacacaggaagatggtaaccagaagatcgagactggacaggagcaggctaatcctgcaccgcgtcgccaaggccagcccaatgcaaggtatcacaggggaggtggggcacacaggggaaggggcggttatgacactgggaggccaaaccatggcacaaacgcggagaggtggaagggtggcagccatcttgaataccagccggtcggatcccaaaacaaagctggaggcgacttccagctgagtcagggcatggaagatcgaaccgaggggcctcctgcatctggacaagcgttcggggagcgtggccacagcagggggctacgcccagcaggccgctttgtccggcgaaacactgcctctacgtctaccactaattctcaccaacatgaataatcttccgcggctgccacatccgctgagctgcaggaaaaaactcgccttcgtggtggcgtttcacaacatgtagatttggatgcacttgggtgggcggttggtgtccgtcgtcaacgacgagtctacggtggtgagcattaggatcatgtaacggtattagtctttgccccaaagggcacaccctggcccctcacgtgtcacgtgtgactagattttttccagaggaacatccacccttgtttgggatgcaacgttggaacgtgtgctaacagagttgtgtttgagaactgggtttaaatgttgttagcctgtgttgctgatgggaactgagagtgttggtttttgcccaactttcatggcatgtctttgtttgattgttg

SEQ ID NO: 30397 - DNA, 4757 bp, Zea Mays
ctcgagcctggttaccacggacaggagatggggtgctactcctgcaaggaaatctagtatgactgttctgggaaaagtcccaaaaccgattaatttaccaagtcagaggttggaaaacaatggtcttgatcccaatctggaactggttccaaagggcacccacacctggggcagcaaagcaccatctacaacaccaaacgcatggagttcctcatcaattctgtcttccaagaacgatggaagttccacttcatctagtcacttcaatgtccggcccacctctggcggaggctcaaggccatcaacagctggaagtgaatcacttggttcacccaatgcttggggtgcaaattctcgcccatcttcagcatcaggcacatttccatcatctcatctaccaatggccacaaatcgtccccaaagtgcggaaacaagacctggaagttcacaaatttctcgatttgcggataatgcttcagataatgtgaaagcatcgataaggactattgatagatcggaatcttcatcacgtgggcctgggttcacattaagtactggtgatttcccaacgcttggctctgaagcaaacagtcaacgagggcatagttcgaaagggcgcccaacttctagtttgggtaaagaggtgtcgcaaggtgaacaagtgaagagcctagcaactggaactggtgaagtaatttcaccatccaataatcaccctgttgatatcatgaagacagagcatcatgcacacactggaggtgctcctgtcccagccacaagtgtgccaaatgaaggcttgcaacaacagccatatccaccaaattttcctatgcctcctctgcagtttgattcatggcgtgcacctcctggtcacccccctgagggaatgtggcatagaggaccagtgccaggtgggccatacagacctgttggcccccctggtagtttccctgtcgaaccctttggttattatggccagttcccacccaactccgaagctgcaggaaggcagggctcagggcatggtggatatcacactaaaaatgatgtgtatcatcctatgcctcataattcctatattatgaatcagcctgttattccagtcagaccagtttatcagggtccagtgctgtatgatgggtattatggccctcaagcaaatttcaataacaccaatgttagagatcctcattttgttggaggtcctggaatactaaatcaattcccaaatcagaatgacaggtttcaccctggacatcctcaaaacagaccaggcaaacatgaaacggtcccaagggagcagctggaatctgataagctacatgtctttcaccaagaacaccctgggagtttgcatgataatccagatcgtctaggaggttcccgtgaatttgaaaggaatgtgcagccagcaccgccacttcttccacatcctgatggaaaacagactgatatgaacatgagggcagatacaagggacacctttagtgagactgaaagaaccgtggtacttacaaaatcggtgcctaaccagagaggttcggttggtatagaccatttgtctgtttatgaaaacacacgatcccatcacagagaaacttgtgatggcactctgcgcaagaagttcaaggaggatagctcagttgtacttgaccagcatcctgtcattaagaagaatgcagctttaatagagaaaattgagagtttgaacaacaaagccagaaatgtctatgcacagaatctcccagaaccagcttcatccaaggaattcaagaagcataaaaaaactactgatgtttcatctaatgatgtcatcagtacgacatgcacatctgatcaggcagtttctgtttcacatatttctgctgtggtgcagagacgaccaaatgtgaccattgagggtacaattcttggaccggcacattcacatttaactgaatttagcaaagctgagaagcttggtgattcaattaacaatcatttacataggagagttgattcttcgagaaacagttaccatggtccttgtaaagataggccagctaataaattcggaagttgtggacgtggagaaagttacataactaattcattaccagtagctgatttggggaatgatatccatcatggccaacaacctcagattgcctcacagctgcaacctgtgattgtacctgatgatatgccagcttcactcgattatgagtctcagcgggcaaaaatgaaggagttggctgcagaacgtgcaaaaaggatgaaagctgaggaagaggaacggataaagaaccaaaaagcaaaagcactcgcaaagttggaagaattgaacaggcgatcatcagtacttcagaagaaatcaaatgatacaaaagtagaaactgatgatgcacatgataagcaacagattggacttgatgtgaatgctaaacttgacacttcaactgaacaacatgatgttgttacgcctgataggcttactgctcttctgcctcctaatgatcccaatcatactatggttcagatacaggcccagtctactgcacaatcaaatgctttagatggtggcaaagcgcatgatgctcataccacctcatctttggtcaagaacacacacagcaacatggagcatgttgtgcagaagagtatctcacagtcgcataatatcagtatggtaaagactaagcaaggctacaggaaaagacaggttgtttcagaggagaaaatttctggcgagaaggcaagtgcttcagtaaccactgattccagtgtgcagaaaaatgttgatgttcccgtcgacacagtaacggctgttgttgcaccacatgatgatcccccaactcagaacaagaagggaacccggcatttgaggagtaagaaaaaggtagatgatgcttcagttatttctaaacatccacctgtggtgtttaatgaacagaatacagtgaaaatctctaccgagccaaaaacacatactggtggtgttattatcagtagctctattgttccgattgaaggtactattgtaactgttggaagtataactgttggtggactttcacttacagctatgaatcaggagcatgttaattcagcagatggaacaaatagtactgaaagtggcctatcaagacctcagcaagcaagaaaatctggaaagcatcagcatgttcttcggcctgttgagaagccacatgggaatgatggtgtcttgtgggcaccagatatgctaccattgcataatgagcagtctgatggagccatgccgactgcagcagtagctgacgtcactcagccagctgggaaagccatcaatgatggagagaatgtgacaagaacaaagagggctgaaatggaaagatatgttcccaagcctatgtccaaagagctgcaacaacataatccaagccatgataaggaagcaattgataagcccggtgctgctaaatcacatcctgcagccgaacccaagaaaactagcaaaggacatgggggcaaatctaatccttcttggcgcaagcgggatccagatcaacctgctatggtggcaccaaattctgttgaccaagcagacaactcttatgaatcaaaggaggttcagaactgcaccgatatgaatcagcctgttgaacttggcaaggaagatacacagttaaaatccaatgtagatgctgctgctgagaatagctcagctccagctcaaactgttccactatctgccggtggtgcaaaagaacatagtgcggctaacaggcaaaggcgacagcattttaaggctcaaagaaatgaagcaagtagctactcaaatgagagcaaagttagagagggcaagaacgactctgtctatcaatcagcatcaccggtgattgattcgaactcatccaatcacaagaatgtgccaagatcagatgtgaaaaacagcggcatagtttcacattctagagcctggaagccgaaaaccaattcccatcctcagaacagctcagacggcaagattgctgttgaagggaaagtggattcccatggtggtaggcttgagctgaacatgcccaaaggatctgatacaattacccatcaagacaccagcagtaaaccgatgaaaaggagtgatggcaccgatgaggcctcacacagcaaacaggagaacctgacacaggaagatggtaaccagaagatcgagactggacaggagcaggctaatcctgcaccgcgtcgccaaggccagcccaatgcaaggtatcacaggggaggtggggcacacaggggaaggggcggttatgacactgggaggccaaaccatggcacaaacgcggagaggtggaagggtggcagccatcttgaataccagccggtcggatcccaaaacaaagctggaggcgacttccagctgagtcagggcatggaagatcgaaccgaggggcctcctgcatctggacaagcgttcggggagcgtggccacagcagggggctacgcccagcaggccgctttgtccggcgaaacactgcctctacgtctaccactaattctcaccaacatgaataatcttccgcggctgccacatccgctgagctgcaggaaaaaactcgccttcgtggtggcgtttcacaacatatttggatgcacttgggtgggcggttggtgtccgtcgtcaacgacgagtctacggtggtgagcattaggatcatgtaacggtgttctaataggtgtgatctggataccggcagcttatggggacgtctaggagagagatgcattgatggat

SEQ ID NO: 30398 - DNA, 5368 bp, Zea Mays
atggcgctgatgatgacgccgttgctgacccgccgcggctcctgccgactcctcagcgacgacttcatcccgccctccgcccgcacgcccagatctgggggccgcaccacgcccaaagcagcagtccctctactcctggggaggagagcgggcgaggtggcagggaacgggaacgccagacgaagaaggaagggacaagggagggaggaagcagaaggagactgcgagatcccagaatataacagaactgcggccgccgaagatgctcggattggaaggggctcggatgggggcatggggcggaggcgtccgttgatggcggcgcggatggagtcgcgaggtggggcagaggagagggagcgcgtccgtgcccgtcgcggagaggatggaaggggcgcggatggggcggaggagacagaggcaatggcatcagtcgcggagaggaaggcgtcagtcgcggagaggagagggaggcgtcagcgatggggtgctactcctgcaaggaaatctagtatgactgttctgggaaaagtcccaaaaccgattaatttaccaagtcagaggttggaaaacaatggtcttgatcccaatctggaactggttccaaagggcacccacacctggggcagcaaagcaccatctacaacaccaaacgcatggagttcctcatcaattctgtcttccaagaacgatggaagttccacttcatctagtcacttcaatgtccggcccacctctggcggaggctcaaggccatcaacagctggaagtgaatcacttggttcacccaatgcttggggtgcaaattctcgcccatcttcagcatcaggcacatttccatcatctcatctaccaatggccacaaatcgtccccaaagtgcggaaacaagacctggaagttcacaaatttctcgatttgcggataatgcttcagataatgtgaaagcatcgataaggactattgatagatcggaatcttcatcacgtgggcctgggttcacattaagtactggtgatttcccaacgcttggctctgaagcaaacagtcaacgagggcatagttcgaaagggcgcccaacttctagtttgggtaaagaggtgtcgcaaggtgaacaagtgaagagcctagcaactggaactggtgaagtaatttcaccatccaataatcaccctgttgatatcatgaagacagagcatcatgcacacactggaggtgctcctgtcccagccacaagtgtgccaaatgaaggcttgcaacaacagccatatccaccaaattttcctatgcctcctctgcagtttgattcatggcgtgcacctcctggtcacccccctgagggaatgtggcatagaggaccagtgccaggtgggccatacagacctgttggcccccctggtagtttccctgtcgaaccctttggttattatggccagttcccacccaactccgaagctgcaggaaggcagggctcagggcatggtggatatcacactaaaaatgatgtgtatcatcctatgcctcataattcctatattatgaatcagcctgttattccagtcagaccagtttatcagggtccagtgctgtatgatgggtattatggccctcaagcaaatttcaataacaccaatgttagagatcctcattttgttggaggtcctggaatactaaatcaattcccaaatcagaatgacaggtttcaccctggacatcctcaaaacagaccaggcaaacatgaaacggtcccaagggagcagctggaatctgataagctacatgtctttcaccaagaacaccctgggagtttgcatgataatccagatcgtctaggaggttcccgtgaatttgaaaggaatgtgcagccagcaccgccacttcttccacatcctgatggaaaacagactgatatgaacatgagggcagatacaagggacacctttagtgagactgaaagaaccgtggtacttacaaaatcggtgcctaaccagagaggttcggttggtatagaccatttgtctgtttatgaaaacacacgatcccatcacagagaaacttgtgatggcactctgcgcaagaagttcaaggaggatagctcagttgtacttgaccagcatcctgtcattaagaagaatgcagctttaatagagaaaattgagagtttgaacaacaaagccagaaatgtctatgcacagaatctcccagaaccagcttcatccaaggaattcaagaagcataaaaaaactactgatgtttcatctaatgatgtcatcagtacgacatgcacatctgatcaggcagtttctgtttcacatatttctgctgtggtgcagagacgaccaaatgtgaccattgagggtacaattcttggaccggcacattcacatttaactgaatttagcaaagctgagaagcttggtgattcaattaacaatcatttacataggagagttgattcttcgagaaacagttaccatggtccttgtaaagataggccagctaataaattcggaagttgtggacgtggagaaagttacataactaattcattaccagtagctgatttggggaatgatatccatcatggccaacaacctcagattgcctcacagctgcaacctgtgattgtacctgatgatatgccagcttcactcgattatgagtctcagcgggcaaaaatgaaggagttggctgcagaacgtgcaaaaaggatgaaagctgaggaagaggaacggataaagaaccaaaaagcaaaagcactcgcaaagttggaagaattgaacaggcgatcatcagtacttcagaagaaatcaaatgatacaaaagtagaaactgatgatgcacatgataagcaacagattggacttgatgtgaatgctaaacttgacacttcaactgaacaacatgatgttgttacgcctgataggcttactgctcttctgcctcctaatgatcccaatcatactatggttcagatacaggcccagtctactgcacaatcaaatgctttagatggtggcaaagcgcatgatgctcataccacctcatctttggtcaagaacacacacagcaacatggagcatgttgtgcagaagagtatctcacagtcgcataatatcagtatggtaaagactaagcaaggctacaggaaaagacaggttgtttcagaggagaaaatttctggcgagaaggcaagtgcttcagtaaccactgattccagtgtgcagaaaaatgttgatgttcccgtcgacacagtaacggctgttgttgcaccacatgatgatcccccaactcagaacaagaagggaacccggcatttgaggagtaagaaaaaggtagatgatgcttcagttatttctaaacatccacctgtggtgtttaatgaacagaatacagtgaaaatctctaccgagccaaaaacacatactggtggtgttattatcagtagctctattgttccgattgaaggtactattgtaactgttggaagtataactgttggtggactttcacttacagctatgaatcaggagcatgttaattcagcagatggaacaaatagtactgaaagtggcctatcaagacctcagcaagcaagaaaatctggaaagcatcagcatgttcttcggcctgttgagaagccacatgggaatgatggtgtcttgtgggcaccagatatgctaccattgcataatgagcagtctgatggagccatgccgactgcagcagtagctgacgtcactcagccagctgggaaagccatcaatgatggagagaatgtgacaagaacaaagagggctgaaatggaaagatatgttcccaagcctatgtccaaagagctgcaacaacataatccaagccatgataaggaagcaattgataagcccggtgctgctaaatcacatcctgcagccgaacccaagaaaactagcaaaggacatgggggcaaatctaatccttcttggcgcaagcgggatccagatcaacctgctatggtggcaccaaattctgttgaccaagcagacaactcttatgaatcaaaggaggttcagaactgcaccgatatgaatcagcctgttgaacttggcaaggaagatacacagttaaaatccaatgtagatgctgctgctgagaatagctcagctccagctcaaactgttccactatctgccggtggtgcaaaagaacatagtgcggctaacaggcaaaggcgacagcattttaaggctcaaagaaatgaagcaagtagctactcaaatgagagcaaagttagagagggcaagaacgactctgtctatcaatcagcatcaccggtgattgattcgaactcatccaatcacaagaatgtgccaagatcagatgtgaaaaacagcggcatagtttcacattctagagcctggaagccgaaaaccaattcccatcctcagaacagctcagacggcaagattgctgttgaagggaaagtggattcccatggtggtaggcttgagctgaacatgcccaaaggatctgatacaattacccatcaagacaccagcagtaaaccgatgaaaaggagtgatggcaccgatgaggcctcacacagcaaacaggagaacctgacacaggaagatggtaaccagaagatcgagactggacaggagcaggctaatcctgcaccgcgtcgccaaggccagcccaatgcaaggtatcacaggggaggtggggcacacaggggaaggggcggttatgacactgggaggccaaaccatggcacaaacgcggagaggtggaagggtggcagccatcttgaataccagccggtcggatcccaaaacaaagctggaggcgacttccagctgagtcagggcatggaagatcgaaccgaggggcctcctgcatctggacaagcgttcggggagcgtggccacagcagggggctacgcccagcaggccgctttgtccggcgaaacactgcctctacgtctaccactaattctcaccaacatgaataatcttccgcggctgccacatccgctgagctgcaggaaaaaactcgccttcgtggtggcgtttcacaacatatttggatgcacttgggtgggcggttggtgtccgtcgtcaacgacgagtctacggtggtgagcattaggatcatgtaacggtattagtctttgccccaaagggcacaccctggcccctcacgtgtcacgtgtgactagattttttccagaggaacatccacccttgtttgggatgcaacgttggaacgtgtgctaacagagttgtgtttgagaactgggtttaaatgttgttagcctgtgttgctgatgggaactgagagtgttggtttttgcccaactttcatggcatgtctttgtttgattgttg

SEQ ID NO: 30399 - DNA, 1762 bp, Zea Mays
ggtcgcggctgcccgccgcttttcccttcttccgttgcggcctcgctataaaaaccgtccgtccagtccgcgccgcggccgccgctcgctcgctcgctgcagctacgcacgcacgcgcctgctcctccccttagcttccacaaggctcgactcggccggcggcgatggcgcggaagaagatccgggagtacgactccaagcgcctcctccgggagcacctcaagcgcctcgccggcatcgacctccagatcctctccgcgcaggtcacacagtcaacggatttcactgagcttgcaaaccaggagccgtggctctcatctatgaagttggttgtgaaacctgacatgctctttgggaaacgtgggaagagtgggcttgtggccctcaacctagatcttgcccaagttcgccaatttgtcaaggagcggttgggagttgaggtcgagatgggtggctgcaaagctccaattacaaccttcatagttgaaccatttgtgccacatgaccaagagtactacctttcgattgtatctgaaaggcttggcaacaccattagtttctcagaatgtggaggtattgagatcgaggagaactgggacaaggttaagactatctttcttcccacagagaagcaaatgacacctgacgcatgtgctccattgattgccaccctgccattggaggtccgcacaaagataggtggtttcattagagctgtattttctgttttccaagacttggatttctcatttcttgagatgaacccattcaccttggtaaatggtgaaccgtatcctctggatatgagaggagaactagatgacacagctgctttcaaaaacttcaataagtggggcaatattgtgtttcccctaccatttggaagagttctcagtccctccgaaagttttatccatgaactggatgagaagacaagtgcttctctgaaattcacggtactgaacccaaaaggacgcatctggacaatggttgcaggtggtggtgctagtgtcatatacgcagacactgttggtgatttgggatatgcttcggagctaggaaattatgcagagtacagtggagctcccaaggaggaggaggttctgcagtatgctagagtgcttttggattgcgctacctctgatcctgatggccgtaagagagcccttctaatcggaggaggaatcgctaacttcacagatgttgcttctacatttagtggcatcattcgggctttaagagagaaggagtccaaattaaaggctgcaaggatgaacatttatgtccggagaggtggtccgaactaccaaactggactcgccaaaatgcgcaccctaggcgccgaacttggcgttccaattgaggtctatggaccagaggcgaccatgactgggatctgcaaagaagccattgattgcatcatggccgcgtaaatcacaaatgtggttgttccatttgaagtcacatccgttttgtactagacgttccttgtacgtgattgctctggtaaaacagagaacgatcattgtcatgagtaaactcggcctttgtaacacagttacgcaagtaataattaagatcttggtttggtgctctgccacccttctagggtgggccggtgaggtgaatgtacaaataacaatgcactttgtgatccaccagattgcagtgctctggtatttctagggtcttgtactgcctgtgctgttttgtgttgtttgtttctcactgcgtttgctgtttatccttggttgagagttgt

SEQ ID NO: 30400 - DNA, 1558 bp, Zea Mays
gttattagtaggtgaactggaggttggaatgctcagcacgtcttccttttgttatggaggtcacacagtcaacggatttcactgagcttgcaaaccaggagccgtggctctcatctatgaagttggttgtgaaacctgacatgctctttgggaaacgtgggaagagtgggcttgtggccctcaacctagatcttgcccaagttcgccaatttgtcaaggagcggttgggagttgaggtcgagatgggtggctgcaaagctccaattacaaccttcatagttgaaccatttgtgccacatgaccaagagtactacctttcgattgtatctgaaaggcttggcaacaccattagtttctcagaatgtggaggtattgagatcgaggagaactgggacaaggttaagactatctttcttcccacagagaagcaaatgacacctgacgcatgtgctccattgattgccaccctgccattggaggtccgcacaaagataggtggtttcattagagctgtattttctgttttccaagacttggatttctcatttcttgagatgaacccattcaccttggtaaatggtgaaccgtatcctctggatatgagaggagaactagatgacacagctgctttcaaaaacttcaataagtggggcaatattgtgtttcccctaccatttggaagagttctcagtccctccgaaagttttatccatgaactggatgagaagacaagtgcttctctgaaattcacggtactgaacccaaaaggacgcatctggacaatggttgcaggtggtggtgctagtgtcatatacgcagacactgttggtgatttgggatatgcttcggagctaggaaattatgcagagtacagtggagctcccaaggaggaggaggttctgcagtatgctagagtgcttttggattgcgctacctctgatcctgatggccgtaagagagcccttctaatcggaggaggaatcgctaacttcacagatgttgcttctacatttagtggcatcattcgggctttaagagagaaggagtccaaattaaaggctgcaaggatgaacatttatgtccggagaggtggtccgaactaccaaactggactcgccaaaatgcgcaccctaggcgccgaacttggcgttccaattgaggtctatggaccagaggcgaccatgactgggatctgcaaagaagccattgattgcatcatggccgcgtaaatcacaaatgtggttgttccatttgaagtcacatccgttttgtactagacgttccttgtacgtgattgctctggtaaaacagagaacgatcattgtcatgagtaaactcggcctttgtaacacagttacgcaagtaataattaagatcttggtttggtgctctgccacccttctagggtgggccggtgaggtgaatgtacaaataacaatgcactttgtgatccaccagattgcagtgctctggtatttctagggtcttgtactgcctgtgctgttttgtgttgtttgtttctcactgcgtttgctgtttatccttggttgagagttgt

SEQ ID NO: 30401 - DNA, 783 bp, Zea Mays
agatctactgctacaccaaactcacctctgcttcggtcgttacacgcgtgctcgtcaggagttcaggcgcggcgagcaggggggcgggggagaagcagccggactcgttagcccagtcggcagtcgccatgggcatcggctacgtagtgggcgtcctcggcggcgccatcctcgcccacgccgcctacgccaccatccaaccgcgcggtgctcaagatcacggaggaggagttctcgcggccgcccatggatgtgatgatggagttgctcttagggttggtcttgtgcatgtgggcaggtcttgctgttcccactaaatttctctcggtgcttccacattctgatgagaataggatcgtctcgctcccggctaacctggatttcatgatcttcaaccaccgtggaagagcgctgccgtcagactcagacctgaaactccatacatagacatgtccagaatccagatcttttttctttattttctgtaaggccttgttcggttattcctattacacatggattagatgagattggaaaaaattaaaaataaatttgacttgcttgagatttaaacttacccaattcaactcaatccatatggattgagagcgaaccgaacaagccctaacctgcaggttccagtttgtggccattagtttagtggggagggggtgggaggactttccaaggccataagtaggttatctacgctgtaattcgccaatttgtggcgccctagagcctatttgatcccatgagctaaagcaaactcactaaaataag

SEQ ID NO: 30402 - DNA, 1165 bp, Zea Mays
tcatttagatgaaggcccaaatatcaccttatccttctcctcgcccgcatttcatttcgttcggcgtccccacacggccacaccggaaaaaagaccccggcaagaacctcgctctccggcgtctccggccaatacccatggaggccaccgcagtgccgagggctctgttcctattcgggacatcgccggcgccgtatcgtatgcgtatgaactgcttgcgcgtagctattggaggagatgtgaggcggcagggggccgtggcagtgtgggcgaagaagaagagggggagggggcgggatagcgagacggaggaacgggtggacacgcacagcttcacccccaagccgggcgaggctgccgggctgttccccgaggccgtcctgcttagaaagaaaatggtgagagaggatggtcaagtgtcaccagaatttgctgatgcagacgaagaaaagctgtatgattttcttaatattgagctagaaagtgatttaaatctgaaaagaatgcggcactatgaagtagtttatctaattcatgaggaccgtgttgaagaagttgaaaatgttgtatcaaaagtacaagattttatcagggagaagaaaggaaggatatggaggcttaacaattgggggctgcgcaggcttgcttacaaaataaagaaagcaacacatgccaattacattttaatgaactttgagatagagtcaagatacatcaatgacttcaagaccctgctagacaaggatgagaggatcatcagacatctggttatgaaacgggatgaggcaattactgaagattgccctcccccaccagtatttcacactctgcgagctcaacaatattttgatgatgaatatgaagatgagggggaagaggaagaggatgaggatgctaggagtgagccaaagtctgccaattatgatgaggatgatgttgaagctgatgatgagcctgaaattatttatgtcgatgaagctgatgaggataattacgaagacactagaagaaggaacacaaagctaaaggtgaagaagtatacatcagagaaggtcatgtgatgacaaggaatgatggttgcgaggggaccttgcacaaacttcatcaatgatcaagcactaaggaatgttcaggactgttttgtattaattgcctcacaagtttc

SEQ ID NO: 30403 - DNA, 1115 bp, Zea Mays
atttcatttcgttcggcgtccccacacggccacaccggaaaaaagaccccggcaagaacctcgctctccggcgtctccggccaatacccatggaggccaccgcagtgccgagggctctgttcctattcgggacatcgccggcgccgtatcgtatgcgtatgaactgcttgcgcgtagctattggaggagatgtgaggcggcagggggccgtggcagtgtgggcgaagaagaagagggggagggggcgggatagcgagacggaggaacgggtggacacgcacagcttcacccccaagccgggcgaggctgccgggctgttccccgaggccgtcctgcttagaaagaaaatggtgagagaggatggtcaagtgtcaccagaatttgctgatgcagacgaagaagctgtatgattttcttaatattgagctagaaagtgatttaaatctgaaaagaatgcggcactatgaagtagtttatctaattcatgaggaccgtgttgaagaagttgaaaatgttgtatcaaaagtacaagattttatcagggagaagaaaggaaggatatggaggcttaacaattgggggctgcgcaggcttgcttacaaaataaagaaagcaacacatgccaattacattttaatgaactttgagatagagtcaagatacatcaatgacttcaagaccctgctagacaaggatgagaggatcatcagacatctggttatgaaacgggatgaggcaattactgaagattgccctcccccaccagtatttcacactctgcgagctcaacaatattttgatgatgaatatgaagatgagggggaagaggaagaggatgaggatgctaggagtgagccaaagtctgccaattatgatgaggatgatgttgaagctgatgatgagcctgaaattatttatgtcgatgaagctgatgaggataattacgaagacactagaagaaggaacacaaagctaaaggtgaagaagtatacatcagagaaggtcatgtgatgacaaggaatgatggttgcgaggggaccttgcacaaacttcatcaatgatcaagcactaaggaatgttcaggactgttttgtattaattgcctcacaagtttc

SEQ ID NO: 30404 - DNA, 2451 bp, Zea Mays
tctctcctacccctagtggcactgtgctctcttttccccggccctctttcccttcgtcccatccctacttcggtgagagtgaggagatcatggcggagtggtggtggtgctcatgctgcctctcgttgatgtgcaagcaaacccaagggtgagagtgctgccgttgagtgggatcattgcggcgtcctaagactcgtgcgcgcttgcgcccgtgagacgggaaattgggtcgcctcttattgtggtcgccagttttagcgacgaataagacatcgatcactccagtaacagactatggagaaacaatatctgagcttccttctacctgcatatactgtataggtataatgccgtgtgtttaggcattagctatatatatagtcgccaggtggtgtgcaagtgcaatgcagtagcggctagctagcaacaaagcccagagcacgtagtaggtctccatggcgtggaagatgttgcctgcggctagcgagctcttccccgcgatcgtccgggccggcacagccactcctccccggccacagccaccagccgcacgcaacagcccatcgcccaccgtccacaggcacgcccctcccgcggcacggcttggcagcgcggggacggtgctggtggtcgacgtcgacggcgccctgctcctgtcgcgttccctcttcccctacttcatgctggtcgcgctcgaggccggcagcttcctccgcggcctcgtcctgctgctcctctaccccgccatccgctgctgctactgctgcctcggcggcggcgacctggccgtgcgggccatggccgcggtcgccttctgcggcctgcgcgcgcggacgttccgcgccggccgcgccgtcctgccgcggtggctcctggaggacgtggcggccgaggcgctcgaggccgcgcggcgtgtcggcgacccggctcgggttgtgtgggccagcgccatgccgcgcgtgatggtggagcccttcctcagggagtacctgcaggtgccggccgcggccgccgtcgccgcgagggagatgaagacggcgtgggggttctacactggtctcatggagggaggtggtgaagactgcgaggcgacgatggcactgatgacgaagaggacgtcggcgggggaaggcgccggcgacgtcgaggtgtacgtggtatgcccggaggagaagagcaagtggcggcgcctggcgcggcgcgactaccccaccccgctggtcttccacgacggccggctcgcgtttctgccgacgccactcaacacggtggccatgttcacgtggcttcctctgggcgccgcgctcgccatcctccgcctggccgtcgcgctcgcgctgccgtacaaggtcgccacggcgctgctggccgccactggccagtcgtggcgcctccgcggctcactcccgccgccgggaaacagcggcgggtccgggcagctgtacgcgtgcaaccaccgcacgctgatcgaccccgtgtacgtgtccatcgcgctggaccggcccgtgcgcgccgtgtcctacagcctgagccgcgtgtccgacctcatctccccgatcggcgccaccgtgcggctggcccgggaccgcgcgcgcgacggcgccgccatggcgcgcctgctggcccgcggcgacagcgtggtggtgtgccccgagggcaccacgtgccgcgagccgtacctgctccgcttcagcccgctgttcgcggagctcggcggcgccggcggcgtggtgcccgtggcgctggcggccgaggcctccatgttctacggcaccacggcgagcgggtggaaggccgccgaccccttctacttcctgtgcaaccccagggtgtgctacacggtgcagttcctgaagagggtggacacggcggacgtggcgggcgacgggaagaagaagaaggcggcggccagcagcgtcgacgtggccaaccgcgtgcagcggctcatcgcggacgcgctcgggtacgagtgcaccatgctcaccaggaaggacaagtacctcatgctcgtcggcaacgacggcgccgttgccgcgccgcgttgccgccagcggcaagtaactaattaagctagcgcgtgccgacatgcatgcgcccgttgttcgagctcgttggctgcatgccagctgcacatatgaccgtatcagatgtggattgaagctgtttgatgcactctttttttttgtcgtatcgtcccacaccttttgtggctagtagtagaaatgtacgtagaggttcatgtgtattagaaaatgttctgtatgtaaggaaagagtattatattatatactgtatgtatatatgccatattcaccgtcatcagcatatacaggggaggacatatatataagaagagacgagtttgtctactacttgaggagcgtaatcaagcaagtttcgttatgggtttgagagtgatcctgatgcgtccatgggccatgagtataggct

SEQ ID NO: 30405 - DNA, 1271 bp, Zea Mays
gatgggacattcgtaaagttaagtttttctgcactctaggctaaacttcactgacgttacggaaggggtctcgaagagctgccaagacccacctgccacctccgatggacttcgccggccgggtttgccatttgggcgaagttcgcgtgagccaaggtaccgcgtcgagttccatcctgttgattcgccattccatccagagaatggtcaggaatcggtaccaatggctagtcatgaggggaagcgttataagtgctttctaccagttgaagaaactaaaaccatgaagtcaatgctcccacaaaatgcaactaatattataatagaaagtgaaaggagaattaagccaaaggagccagatgagttacttgaggttctcaaggatcagtgtttctacaggcacgaaggttggtggtcgtatgaattctgttattatgggaaaatcagacaggtccatgtagaggacggtaaggttatccaagaatttgttctaggcgaattcgatgacgacgcgactgctgcataccatgaaaatagcacctctgagttagctgacgatgaccatcacgtgaaagatatatctaagaggtatcatgttcacttgtatacaaatgggactgtatgtgatctcacagatattccccgggagacagaggttagatttgtctgctcggagcctactgtgctgattagttcagtcaaggagatctcttcctgcaaatatgttgtaacaattcaaagcccgatgctttgcaaaaacccgttgttccagcaagaaaaacgaacccttcccatccattgcaatgaattacctgctaaagcagaatccggtgctgaggatggtttgcttccaaaagaagcgcagatttccatcatccccgatcaggatgagctgcatggttttccagcttatgctacttgatataatgatatgccttcaatatttatttctggtgtagaaaaagcacagttttggaggcccagtggcaactgagcaacgctatgtattactctctccgttcttttttatttgtcgtggtttagttcaaaaattacgacaaatattggagaacggacccatagatcctacagcagcggctccttgtaaagcaggttgagacgatcattctgcagtgctaattatttaggaggattacgaaggtagaaagtttctcagtattagtaaatgtaacaagtttgagacagtaacatttgcttgaaatgtctagtctataacaaggacaatactgcattcttgaaatataggcgcc

SEQ ID NO: 30406 - DNA, 1354 bp, Zea Mays
cccaaaccccaatgaatccaccgcttcgtcgatgtctcttgatgatttctgtcgtcgaatcgaaaattcaaaggctgtaggtcgatgctggtggcgatctagtggctagtacccatatactacaaattctttcgcagatctagcggcctgtagtagtatggttcaaaagacttcgcctttaagtgcgcatatggatcgagggctggtttgccatttgggcgaagttcgcgtgagccaaggtaccgcgtcgagttccatcctgttgattcgccattccatccagagaatggtcaggaatcggtaccaatggctagtcatgaggggaagcgttataagtgctttctaccagttgaagaaactaaaaccatgaagtcaatgctcccacaaaatgcaactaatattataatagaaagtgaaaggagaattaagccaaaggagccagatgagttacttgaggttctcaaggatcagtgtttctacaggcacgaaggttggtggtcgtatgaattctgttattatgggaaaatcagacaggtccatgtagaggacggtaaggttatccaagaatttgttctaggcgaattcgatgacgacgcgactgctgcataccatgaaaatagcacctctgagttagctgacgatgaccatcacgtgaaagatatatctaagaggtatcatgttcacttgtatacaaatgggactgtatgtgatctcacagatattccccgggagacagaggttagatttgtctgctcggagcctactgtgctgattagttcagtcaaggagatctcttcctgcaaatatgttgtaacaattcaaagcccgatgctttgcaaaaacccgttgttccagcaagaaaaacgaacccttcccatccattgcaatgaattacctgctaaagcagaatccggtgctgaggatggtttgcttccaaaagaagcgcagatttccatcatccccgatcaggatgagctgcatggttttccagcttatgctacttgatataatgatatgccttcaatatttatttctggtgtagaaaaagcacagttttggaggcccagtggcaactgagcaacgctatgtattactctctccgttcttttttatttgtcgtggtttagttcaaaaattacgacaaatattggagaacggacccatagatcctacagcagcggctccttgtaaagcaggttgagacgatcattctgcagtgctaattatttaggaggattacgaaggtagaaagtttctcagtattagtaaatgtaacaagtttgagacagtaacatttgcttgaaatgtctagtctataacaaggacaatactgcattcttgaaatataggcgcc

SEQ ID NO: 30407 - DNA, 1081 bp, Zea Mays
ttctaaggggagaatggtcaggaatcggtaccaatggctagtcatgaggggaagcgttataagtgctttctaccagttgaagaaactaaaaccatgaagtcaatgctcccacaaaatgcaactaatattataatagaaagtgaaaggagaattaagccaaaggagccagatgagttacttgaggttctcaaggatcagtgtttctacaggcacgaaggttggtggtcgtatgaattctgttattatgggaaaatcagacaggtccatgtagaggacggtaaggttatccaagaatttgttctaggcgaattcgatgacgacgcgactgctgcataccatgaaaatagcacctctgagttagctgacgatgaccatcacgtgaaagatatatctaagaggtatcatgttcacttgtatacaaatgggactgtatgtgatctcacagatattccccgggagacagaggttagatttgtctgctcggagcctactgtgctgattagttcagtcaaggagatctcttcctgcaaatatgttgtaacaattcaaagcccgatgctttgcaaaaacccgttgttccagcaagaaaaacgaacccttcccatccattgcaatgaattacctgctaaagcagaatccggtgctgaggatggtttgcttccaaaagaagcgcagatttccatcatccccgatcaggatgagctgcatggttttccagcttatgctacttgatataatgatatgccttcaatatttatttctggtgtagaaaaagcacagttttggaggcccagtggcaactgagcaacgctatgtattactctctccgttcttttttatttgtcgtggtttagttcaaaaattacgacaaatattggagaacggacccatagatcctacagcagcggctccttgtaaagcaggttgagacgatcattctgcagtgctaattatttaggaggattacgaaggtagaaagtttctcagtattagtaaatgtaacaagtttgagacagtaacatttgcttgaaatgtctagtctataacaaggacaatactgcattcttgaaatataggcgcc

SEQ ID NO: 30408 - DNA, 2326 bp, Zea Mays
ttcccgccatcccccagcccaacacggtgccgcctccctcccgcaccccggccttctctgcctcccactcactcgacgcctccgccgccgccgccgccgggatgaagaaccccgacttcactgcagacaaagcgctcgccaaggacttcctgtccaacttcgtcggccctcacggcgaccccaagtacctgaacatcctgcaagatgtcgccaacaggaagatacgcgcggtccagatcgagctggacgacctgtttcatcacaaggacgtcgatgaggagttcctgcagcgtgtcactgagaacacgcggcgctacgtcggcatcttcgcggaggccatggacgagatcatgccggagcccactgaggcgtacaccgtcgacgaggaccgggacatcctgatgacgcagcgtgtggacgagggggtggacggcggcgcggacggcacggacccgctgcagagaatgccaccagatatcaaacggttctttgaggtttacatcaagacattctcaaaggcaactccactcaccattagacaagtaaaggcatccaacattgggcagcttgtgaaaatatctgggattgttactcgctgctcggatgtgaagcccttgatgcaggttgctgtttatacatgtgaagaatgtggctttgagatataccaggaagtgactgctagagtgtttatgcccctcattgaatgtccatctcaacgatgcaagctgaacaaagcaaaggggaatctaatccttcaattgcgtgcatcgaagtttttgaaatttcaggaggtgaagcttcaagagttagcagagcatgtacccaagggccacattcctcgttctctgactgttcatctaagaggagagctgactagaaaggattagttgctgatacttacttggaagcaatgtctgtcacacatttcaagaaaaaatatgaggagtatgatctcaaaggtgatgaacaagaacaaattgacagattggctgaggacggtgatatctacagtaagttggcaaggtccttggcacctgaaatatttggccatgaagacgtcaaaaaagcactgctgttactacttgttggtgcaccccataggaagctcgcagatggcatgaagatcagaggcgacctgcatatatgcatgatgggagatcctggtgttgcaaagagtcaacttctgaagcatattatcaatgttgcaccaagaggagtgtacaccactggacgtgggagcagtggtgttggtcttaccgctgccgtccaaaaggatccagtaacaaatgagtttgtcctcgagggtggagcactggtactggcagatatgggcatttgtgctatagatgagtttgacaagatggaagagtcagaccggacagcaatccatgaggtaatggagcagcaaacagttagcattgccaaggctggcatcaccacctctctcaatgcgagaactgcaattctggctgctgcaaatccagcatggggaaggtacgacatgaggaggactccagcagaaaatataaatctacctccggcactcctgtcccgtttcgacctgctttggttgatcctggatcgcgcggacatggaaaccgatctcgaaatggcgaggcacattgttcatgttcatcaaaaccttgaatcgccggcgctggggttcacaccactcgagccatctgtgctcagggcatacatatctgcagctagaagagtgattccttccgttcctagagagctcgaggaatacattgcgactgcatattccagcatccgccaagaggaggcgaagtcgaacgcgccaacctcctacacaaccatcaggacgcttctgagcatactccgtatctctatcgccttggcaaggcttaggttctcagaaaccgtggcccagagcgacgtcgacgaagcactgcggctgatgcagatgtccaagtactcgttgtactcggacgaccgccagcggtctggcctcgatgcgatatctgacatatattccatcctgagagacgaggccgcgaggacgagcagcatggacgtgagatatgctcatgctcttaacttgatctccagaaagggatacagcgaggctcaattgaaggagtgcttggaggaatacgcttccctgaatgtgtggcagatccatccgagcacctttgacatccacttcatcgatgcctgatgctgaagccggcaccgatcaccaaacaaatttcatcatgagtttgtggcttcatgatttgtgacgggagggatgaacaccgtcgactgaagcctaacaggatctaaaagttttagcccagttcgggcttgttcctttttg

SEQ ID NO: 30409 - DNA, 2198 bp, Zea Mays
ttcccgccatcccccagcccaacacggtgccgcctccctcccgcaccccggccttctctgcctcccactcactcgacgcctccgccgccgccgccgccgggatgaagaaccccgacttcactgcagacaaagcacaaggacgtcgatgaggagttcctgcagcgtgtcactgagaacacgcggcgctacgtcggcatcttcgcggaggccatggacgagatcatgccggagcccactgaggcgtacaccgtcgacgaggaccgggacatcctgatgacgcagcgtgtggacgagggggtggacggcggcgcggacggcacggacccgctgcagagaatgccaccagatatcaaacggttctttgaggtttacatcaagacattctcaaaggcaactccactcaccattagacaagtaaaggcatccaacattgggcagcttgtgaaaatatctgggattgttactcgctgctcggatgtgaagcccttgatgcaggttgctgtttatacatgtgaagaatgtggctttgagatataccaggaagtgactgctagagtgtttatgcccctcattgaatgtccatctcaacgatgcaagctgaacaaagcaaaggggaatctaatccttcaattgcgtgcatcgaagtttttgaaatttcaggaggtgaagcttcaagagttagcagagcatgtacccaagggccacattcctcgttctctgactgttcatctaagaggagagctgactagaaaggattagttgctgatacttacttggaagcaatgtctgtcacacatttcaagaaaaaatatgaggagtatgatctcaaaggtgatgaacaagaacaaattgacagattggctgaggacggtgatatctacagtaagttggcaaggtccttggcacctgaaatatttggccatgaagacgtcaaaaaagcactgctgttactacttgttggtgcaccccataggaagctcgcagatggcatgaagatcagaggcgacctgcatatatgcatgatgggagatcctggtgttgcaaagagtcaacttctgaagcatattatcaatgttgcaccaagaggagtgtacaccactggacgtgggagcagtggtgttggtcttaccgctgccgtccaaaaggatccagtaacaaatgagtttgtcctcgagggtggagcactggtactggcagatatgggcatttgtgctatagatgagtttgacaagatggaagagtcagaccggacagcaatccatgaggtaatggagcagcaaacagttagcattgccaaggctggcatcaccacctctctcaatgcgagaactgcaattctggctgctgcaaatccagcatggggaaggtacgacatgaggaggactccagcagaaaatataaatctacctccggcactcctgtcccgtttcgacctgctttggttgatcctggatcgcgcggacatggaaaccgatctcgaaatggcgaggcacattgttcatgttcatcaaaaccttgaatcgccggcgctggggttcacaccactcgagccatctgtgctcagggcatacatatctgcagctagaagagtgattccttccgttcctagagagctcgaggaatacattgcgactgcatattccagcatccgccaagaggaggcgaagtcgaacgcgccaacctcctacacaaccatcaggacgcttctgagcatactccgtatctctatcgccttggcaaggcttaggttctcagaaaccgtggcccagagcgacgtcgacgaagcactgcggctgatgcagatgtccaagtactcgttgtactcggacgaccgccagcggtctggcctcgatgcgatatctgacatatattccatcctgagagacgaggccgcgaggacgagcagcatggacgtgagatatgctcatgctcttaacttgatctccagaaagggatacagcgaggctcaattgaaggagtgcttggaggaatacgcttccctgaatgtgtggcagatccatccgagcacctttgacatccacttcatcgatgcctgatgctgaagccggcaccgatcaccaaacaaatttcatcatgagtttgtggcttcatgatttgtgacgggagggatgaacaccgtcgactgaagcctaacaggatctaaaagttttagcccagttcgggcttgttcctttttg

SEQ ID NO: 30410 - DNA, 2653 bp, Zea Mays
ttcccgccatcccccagcccaacacggtgccgcctccctcccgcaccccggccttctctgcctcccactcactcgacgcctccgccgccgccgccgccgggatgaagaaccccgacttcactgcagacaaagcgctcgccaaggacttcctgtccaacttcgtcggccctcacggcgaccccaagtacctgaacatcctgcaagatgtcgccaacaggaagatacgcgcggtccagatcgagctggacgacctgtttcatcacaaggacgtcgatgaggagttcctgcagcgtgtcactgagaacacgcggcgctacgtcggcatcttcgcggaggccatggacgagatcatgccggagcccactgaggcgtacaccgtcgacgaggaccgggacatcctgatgacgcagcgtgtggacgagggggtggacggcggcgcggacggcacggacccgctgcagagaatgccaccagatatcaaacggttctttgaggtttacatcaagacattctcaaaggcaactccactcaccattagacaagtaaaggcatccaacattgggcagcttgtgaaaatatctgggattgttactcgctgctcggatgtgaagcccttgatgcaggttgctgtttatacatgtgaagaatgtggctttgagatataccaggaagtgactgctagagtgtttatgcccctcattgaatgtccatctcaacgatgcaagctgaacaaagcaaaggggaatctaatccttcaattgcgtgcatcgaagtttttgaaatttcaggaggtgaagcttcaagagttagcagagcatgtacccaagggccacattcctcgttctctgactgttcatctaagaggagagctgactagaaaggtaaaacaaaatagtagctttactgaaacttgagcagtttttttgggttgctttgcgcaacaatagcctttactcttctgttatcgctatttctatcaatgtgctctacacttagcttcagaagcaagctgcttttagatttatgtttttggtttattcaattcactagctaaatgctctcttgagaattaagaactcactaaagatattatgtaatataaccaagtactaaatgctatcatgagcaggttgcacctggagatgtggttgagatgtcaggaatttttctccctatgccttactatgggtttagagcaatgcgtgcaggattagttgctgatacttacttggaagcaatgtctgtcacacatttcaagaaaaaatatgaggagtatgatctcaaaggtgatgaacaagaacaaattgacagattggctgaggacggtgatatctacagtaagttggcaaggtccttggcacctgaaatatttggccatgaagacgtcaaaaaagcactgctgttactacttgttggtgcaccccataggaagctcgcagatggcatgaagatcagaggcgacctgcatatatgcatgatgggagatcctggtgttgcaaagagtcaacttctgaagcatattatcaatgttgcaccaagaggagtgtacaccactggacgtgggagcagtggtgttggtcttaccgctgccgtccaaaaggatccagtaacaaatgagtttgtcctcgagggtggagcactggtactggcagatatgggcatttgtgctatagatgagtttgacaagatggaagagtcagaccggacagcaatccatgaggtaatggagcagcaaacagttagcattgccaaggctggcatcaccacctctctcaatgcgagaactgcaattctggctgctgcaaatccagcatggggaaggtacgacatgaggaggactccagcagaaaatataaatctacctccggcactcctgtcccgtttcgacctgctttggttgatcctggatcgcgcggacatggaaaccgatctcgaaatggcgaggcacattgttcatgttcatcaaaaccttgaatcgccggcgctggggttcacaccactcgagccatctgtgctcagggcatacatatctgcagctagaagagtgattccttccgttcctagagagctcgaggaatacattgcgactgcatattccagcatccgccaagaggaggcgaagtcgaacgcgccaacctcctacacaaccatcaggacgcttctgagcatactccgtatctctatcgccttggcaaggcttaggttctcagaaaccgtggcccagagcgacgtcgacgaagcactgcggctgatgcagatgtccaagtactcgttgtactcggacgaccgccagcggtctggcctcgatgcgatatctgacatatattccatcctgagagacgaggccgcgaggacgagcagcatggacgtgagatatgctcatgctcttaacttgatctccagaaagggatacagcgaggctcaattgaaggagtgcttggaggaatacgcttccctgaatgtgtggcagatccatccgagcacctttgacatccacttcatcgatgcctgatgctgaagccggcaccgatcaccaaacaaatttcatcatgagtttgtggcttcatgatttgtgacgggagggatgaacaccgtcgactgaagcctaacaggatctaaaagttttagcccagttcgggcttgttcctttttg

SEQ ID NO: 30411 - DNA, 2234 bp, Zea Mays
ttcccgccatcccccagcccaacacggtgccgcctccctcccgcaccccggccttctctgcctcccactcactcgacgcctccgccgccgccgccgccgggatgaagaaccccgacttcactgcagacaaagcgctcgccaaggacttcctgtccaacttcgtcggccctcacggcgaccccaagtacctgaacatcctgcaagatgtcgccaacaggaagatacgcgcggtccagatcgagctggacgacctgtttcatcacaaggacgtcgatgaggagttcctgcagcgtgtcactgagaacacgcggcgctacgtcggcatcttcgcggaggccatggacgagatcatgccggagcccactgaggcgtacaccgtcgacgaggaccgggacatcctgatgacgcagcgtgtggacgagggggtggacggcggcgcggacggcacggacccgctgcagagaatgccaccagatatcaaacggttctttgaggtttacatcaagacattctcaaaggcaactccactcaccattagacaagtaaaggcatccaacattgggcagcttgtgaaaatatctgggattgttactcgctgctcggatgtgaagcccttgatgcaggttgctgtttatacatgtgaagaatgtggctttgagatataccaggaagtgactgctagagtgtttatgcccctcattgaatgtccatctcaacgatgcaagctgaacaaagcaaaggggaatctaatccttcaattgcgtgcatcgaagtttttgaaatttcaggaggtgaagcttcaagagttagcagagcatgtacccaagggccacattcctcgttctctgactgttcatctaagaggagagctgactagaaaggttgcacctggagatgtggttgagatgtcaggaatttttctccctatgccttactatgggtttagagcaatgcgtgcaggattagttgctgatacttacttggaagcaatgtctgtcacacatttcaagaaaaaatatgaggagtatgatctcaaaggtgatgaacaagaacaaattgacagattggctgaggacggtgatatctacagtaagttggcaaggtccttggcacctgaaatatttggccatgaagacgtcaaaaaagcactgctgttactacttgttggtgcaccccataggaagctcgcagatggcatgaagatcagaggcgacctgcatatatgcatgatgggagatcctggtgttgcaaagagtcaacttctgaagcatattatcaatgttgcaccaagaggagtgtacaccactggacgtgggagcagtggtgttggtcttaccgctgccgtccaaaaggatccagtaacaaatgagtttgtcctcgagggtggagcactggtactggcagatatgggcatttgtgctatagatgagtttgacaagatggaagagtcagaccggacagcaatccatgaggtaatggagcagcaaacagttagcattgccaaggctggcatcaccacctctctcaatgcgagaactgcaattctggctgctgcaaatccagcatggggaaggtacgacatgaggaggactccagcagaaaatataaatctacctccggcactcctgtcccgtttcgacctgctttggttgatcctggatcgcgcggacatggaaaccgatctcgaaatggcgaggcacattgttcatgttcatcaaaaccttgaatcgccggcgctggggttcacaccactcgagccatctgtgctcagggcatacatatctgcagctagaagagtgattccttccgttcctagagagctcgaggaatacattgcgactgcatattccagcatccgccaagaggaggcgaagtcgaacgcgccaacctcctacacaaccatcaggacgcttctgagcatactccgtatctctatcgccttggcaaggcttaggttctcagaaaccgtggcccagagcgacgtcgacgaagcactgcggctgatgcagatgtccaagtactcgttgtactcggacgaccgccagcggtctggcctcgatgcgatatctgacatatattccatcctgagagacgaggccgcgaggacgagcagcatggacgtgagatatgctcatgctcttaacttgatctccagaaagctgatataagagatgtgtattcttttggctaccaaggacattgaagattatttttttcaaaaaaacggagggact

SEQ ID NO: 30412 - DNA, 708 bp, Zea Mays
cttgccccaatctatgaaccaaaaatcgaacctgccgaggcacatgttcggcaacttgcagagcaagatgttcccggcctacttcacgcttatatctgcatgcgcagccatctccgtcgccgccttcgcgtaccttcacccgtggaagacggcgtccactgtgcagcgctaccagcttggattcctcctctcagcgctcggctgcaacctctccaaccttctagtcttcactcccatgaccatcgagatgatgaagaagaggcacaagatcgagcgggacctgagtatcggcgaggaagtcggatggtcaaagaaccagcaggtggctaaatccaaccccaccctcgctgcaatgaacaagaagtttgggatgatccacgggctgtcatcactggccaacatcatgtcgtttggcagcttggccatgcactcctggtacctggccagcaagctagagctgtgaagaaggggagacaagacgacacctttctccgccttgttgtgaatcttgtcagttgtcacgatggtgttgcttgctgctctcaaaccagtttcaaaattggaataactagaaaatggccagacacatacagacagggttttgtaaaatcacactatctccgatctcgaatattttgcaaaactgcatgtcctcgtgcaaaaccatgtccacatgatgacaccgttctcgaatattctgtcgacacc

SEQ ID NO: 30413 - DNA, 630 bp, Zea Mays
gtggaaactttgaaatgtctactatcacttgtagcattgtccaggatatggaacagtcaaggtgttacagaagataatgggttaattacatcttttgatgaagttagagtttaccccattcctgtaatgctttacctggtcaagaacttattgcagtattatatctttgaatatgtggatgcaccagcttaccagattctgaagaacttgaatattatcagcactggtgtcctgtaccgtataattctcaagaaaaagtcagaccatgttcttcagacccctattcgaggttgggtgatggcaattgtgatggctcttttaagtggttttgcaggagtatatactgaagttatcatcaagaaaaatccttcaagaaatatcaatgcacagaatttttggctgtacatatttgggatgctcttcaatttggttgcaatttgtgtccaggacttcgatgctgtcatgaacaaaggctttttccatggcgaggtttacatgagcacaaccattatttggataaaaaatatatctaagatgctaccagctcagacaatgatgcaagaagagcttttaccatcgctaaaaatgcagaaatctgaatgccttttaacaaatctaaaaactccttaa

SEQ ID NO: 30414 - DNA, 2397 bp, Zea Mays
atatgtccccgttgcaacgcacggacactcacctagtttacggatcgatcgtccttttcacccctaatctgggccgctaccaaacaagcacagttggctggagagcggagacactggtcgagccagcgagcgtgtgcgcttgctctgacagtttgccttcttcccaacccaacagaagcgaagcatctcttctccccccttcccaatcgggctgcggcatatccccttctccgtcctcccgcctgccgccatgtcttcgccttcgccctcgccgccggcgccggcggaagaggagggccgggcgccgaccaagtacgtgctgatcaccggcggcgtcgtcagcggcctcggcaagggcgtcaccgccagcagcatcggcgtcgtcctcaaggcctgcgggctccgcgtcacttgcatcaagatcgatccatacttgaacacagatgctggtacaatgtccccctttgagcatggcgaggtgtttgttcttgatgatggtggagaggttgacttggatttggggaattatgagcgtttcatagatgttactctgacaagggataacaacattaccactggaaagatataccagtctgtcattgagaaggagagaaggggtgattatcttggaaagactgtacaggttattcctcatgtcactgatgaaataaaacagtggatacagtcagtgtcttcggttcctgtggatgggcagactcgtccagctgatgtttgtgttattgaattgggaggcactgtaggtgatattgagtcgatgccattcattgaagctttgcgccaattatccttttctcttggcaaggaaaatttctgcctcatacacgttagccttgttccagtattgggtgtagttggtgagcagaaaactaaaccaacacaacatagtgtacgagaactgagagccttgggtctgactcctgatcttctagcatgccggtcagcacagccactaataggatctgttaaagagaagctttcacaattttgccatgtcccggtcgagaacatacttaacatccatgatgttccaaatttatgaaccaaaaggctcatgaagctataatcaaacaactaaaccttgctagatctgctggaccacctgaattacgagattggacagatatggctgagtcgtatgacaacctcaataactctgttaaagttgctttggttgggaagtatactaatctgacagattcttacctatcagtggtgaaggctctcctacatgccagtgttgcctgttcgttaaagccatctatccagtggattgcagcttcggatcttgaagatgcaactgcaatatctgcaccagatgcccatgctgaagcctgggaaactcttaaaggttcatcatgcattttgatacctggaggatttggggatcgtggaatttcagggatgatattggctgcaaaatatgctcgtgagaatagagttccatatcttggtatttgcttgggcatgcagatatcagtgattgagatttccagacatgtcctgggcctggaagatgcagacagtgaggagtttaacaaggatacaccgaatcatgttgttatgtacatgcctgaggtttcaaaaacacatatgggaaacacgatgaggttgggctgcaggagaacattcttcagcaaacctgattgtcttacatcaaaattgtacggaagtcctccacatgtagatgagcgtcatcgtcatagatacgaggtcaatccctcttttgttcccatgcttgaaagtgctggtcttcattttgttggttgtgacgaaagtcgaaaccggatggagattgtggagctacaagatcatcccttctatgtaggtgttcagttccacccggagttcaaatcaaggcctcgaagaccttcacctccttttacaggtctaataatggcggccactaaacaactgggagcaaattcgaatagctcgaatggcttcgttggagcttctgactaatgtaaggtaaagcgttccgaaacttggtgattccccaaagatggggatctcccgttgctgcagacacccaagttatttcttgtgcacattagatgtacaggaaaacaatctaagcctgaagcagagtgtttctctctctcgaccacctgagtggcgtaagctaacggtcttacagtgtattggggccgaaccgtcatggttttgttgactgtcatttcaattgagcttaacagcagtcagtgctcccatccttgtgattccaattgagattaacagtagtaagtgattatgatctctcttgccgtttgagtggaagtgaaagacactaccatccagtttttggttgttatttgttctgatttttttgtgtttgttttctatacaaatgtgaaaaacatagaatataaaaaacaa

SEQ ID NO: 30415 - DNA, 2021 bp, Zea Mays
cttggcttctagtgagatgaaaattgttgctacaccatgaattcgtcagcccgtgctcgttgtcagatccatacttgaacacagatgctggtacaatgtccccctttgagcatggcgaggtgtttgttcttgatgatggtggagaggttgacttggatttggggaattatgagcgtttcatagatgttactctgacaagggataacaacattaccactggaaagatataccagtctgtcattgagaaggagagaaggggtgattatcttggaaagactgtacaggttattcctcatgtcactgatgaaataaaacagtggatacagtcagtgtcttcggttcctgtggatgggcagactcgtccagctgatgtttgtgttattgaattgggaggcactgtaggtgatattgagtcgatgccattcattgaagctttgcgccaattatccttttctcttggcaaggaaaatttctgcctcatacacgttagccttgttccagtattgggtgtagttggtgagcagaaaactaaaccaacacaacatagtgtacgagaactgagagccttgggtctgactcctgatcttctagcatgccggtcagcacagccactaataggatctgttaaagagaagctttcacaattttgccatgtcccggtcgagaacatacttaacatccatgatgttccaaatttatggcatgtcccacttattcttagaaaccaaaaggctcatgaagctataatcaaacaactaaaccttgctagatctgctggaccacctgaattacgagattggacagatatggctgagtcgtatgacaacctcaataactctgttaaagttgctttggttgggaagtatactaatctgacagattcttacctatcagtggtgaaggctctcctacatgccagtgttgcctgttcgttaaagccatctatccagtggattgcagcttcggatcttgaagatgcaactgcaatatctgcaccagatgcccatgctgaagcctgggaaactcttaaaggttcatcatgcattttgatacctggaggatttggggatcgtggaatttcagggatgatattggctgcaaaatatgctcgtgagaatagagttccatatcttggtatttgcttgggcatgcagatatcagtgattgagatttccagacatgtcctgggcctggaagatgcagacagtgaggagtttaacaaggatacaccgaatcatgttgttatgtacatgcctgaggtttcaaaaacacatatgggaaacacgatgaggttgggctgcaggagaacattcttcagcaaacctgattgtcttacatcaaaattgtacggaagtcctccacatgtagatgagcgtcatcgtcatagatacgaggtcaatccctcttttgttcccatgcttgaaagtgctggtcttcattttgttggttgtgacgaaagtcgaaaccggatggagattgtggagctacaagatcatcccttctatgtaggtgttcagttccacccggagttcaaatcaaggcctcgaagaccttcacctccttttacaggtctaataatggcggccactaaacaactgggagcaaattcgaatagctcgaatggcttcgttggagcttctgactaatatggggatctcccgttgctgcagacacccaagttatttcttgtgcacattagatgtacaggaaaacaatctaagcctgaagcagagtgtttctctctctcgaccacctgagtggcgtaagctaacggtcttacagtgtattggggccgaaccgtcatggttttgttgactgtcatttcaattgagcttaacagcagtcagtgctcccatccttgtgattccaattgagattaacagtagtaagtgattatgatctctcttgccgtttgagtggaagtgaaagacactaccatccagtttttggttgttatttgttctgatttttttgtgtttgttttctatacaaatgtgaaaaacatagaatataaaaaacaa

SEQ ID NO: 30416 - DNA, 1992 bp, Zea Mays
cttcgattgtcgtttaattggcatggtgcactatccatacttgaacacagatgctggtacaatgtccccctttgagcatggcgaggtgtttgttcttgatgatggtggagaggttgacttggatttggggaattatgagcgtttcatagatgttactctgacaagggataacaacattaccactggaaagatataccagtctgtcattgagaaggagagaaggggtgattatcttggaaagactgtacaggttattcctcatgtcactgatgaaataaaacagtggatacagtcagtgtcttcggttcctgtggatgggcagactcgtccagctgatgtttgtgttattgaattgggaggcactgtaggtgatattgagtcgatgccattcattgaagctttgcgccaattatccttttctcttggcaaggaaaatttctgcctcatacacgttagccttgttccagtattgggtgtagttggtgagcagaaaactaaaccaacacaacatagtgtacgagaactgagagccttgggtctgactcctgatcttctagcatgccggtcagcacagccactaataggatctgttaaagagaagctttcacaattttgccatgtcccggtcgagaacatacttaacatccatgatgttccaaatttatggcatgtcccacttattcttagaaaccaaaaggctcatgaagctataatcaaacaactaaaccttgctagatctgctggaccacctgaattacgagattggacagatatggctgagtcgtatgacaacctcaataactctgttaaagttgctttggttgggaagtatactaatctgacagattcttacctatcagtggtgaaggctctcctacatgccagtgttgcctgttcgttaaagccatctatccagtggattgcagcttcggatcttgaagatgcaactgcaatatctgcaccagatgcccatgctgaagcctgggaaactcttaaaggttcatcatgcattttgatacctggaggatttggggatcgtggaatttcagggatgatattggctgcaaaatatgctcgtgagaatagagttccatatcttggtatttgcttgggcatgcagatatcagtgattgagatttccagacatgtcctgggcctggaagatgcagacagtgaggagtttaacaaggatacaccgaatcatgttgttatgtacatgcctgaggtttcaaaaacacatatgggaaacacgatgaggttgggctgcaggagaacattcttcagcaaacctgattgtcttacatcaaaattgtacggaagtcctccacatgtagatgagcgtcatcgtcatagatacgaggtcaatccctcttttgttcccatgcttgaaagtgctggtcttcattttgttggttgtgacgaaagtcgaaaccggatggagattgtggagctacaagatcatcccttctatgtaggtgttcagttccacccggagttcaaatcaaggcctcgaagaccttcacctccttttacaggtctaataatggcggccactaaacaactgggagcaaattcgaatagctcgaatggcttcgttggagcttctgactaatgtaagatggggatctcccgttgctgcagacacccaagttatttcttgtgcacattagatgtacaggaaaacaatctaagcctgaagcagagtgtttctctctctcgaccacctgagtggcgtaagctaacggtcttacagtgtattggggccgaaccgtcatggttttgttgactgtcatttcaattgagcttaacagcagtcagtgctcccatccttgtgattccaattgagattaacagtagtaagtgattatgatctctcttgccgtttgagtggaagtgaaagacactaccatccagtttttggttgttatttgttctgatttttttgtgtttgttttctatacaaatgtgaaaaacatagaatataaaaaacaa

SEQ ID NO: 30417 - DNA, 2279 bp, Zea Mays
gccgaccccccagagcggcagagcccgccccctcttccgtcccaagtcccaactcccaagtggccaagtcccaacccgacgtccgacgacccccacctctccttctcctcgctccgacacctacgcacatacagtacgtacgtgctaaccgtgcttttaccgcgcgggatgggcgcgaaggggatggcgacggcggcggggacggcggtgctgctgtacctggtgctgtcaggccggctctgcggggacgccgccggcgacggcggcgccctggaggaccagctgatatcgtcggccctggaggctcggcgacgaaggaaagaggacaccagggcgcggcgggagcagcggcgtgctccgcctccgtgcaccaagcggcggtggccggagcgccccccggacgggtggggcgaggcggccgccttgaccgcgcgcactgtgggcttcacctgggccgagacgctcggcaagtggaccctcggggaggtcgccttcgggatcaagtactatatgcggcagcagggtaatctgcagcatgagtatgctggaagtgattctgtgctactggatggggctgaggtgaggcaggtactgatttcgctgctcagatatctgaagcagtgcatgtatttctcgaagaagccatacaacgtgtttttggagtatggtggttatggccataatgacgtgcttataagaaagcctaaggcgagggtgcctcttgaagccagctttcacaattgttcgagacagaagtagccaatgctttctccttttcatcaggggggctatcagtgttaaggagcggttgacagcagcaacaggcacagaggttccattccatcacgttgtggtccaggaaggtcgtgtttccaacctagtgttgggctacgcccactgtggaatggttgtagcagctcgatggattgcaaggcaagccattcctggcctgagtaaagcaatcgagcaattcccagaatatgaggttaaggtcattggccattcaatgggagctgggattgcaacaatactaacatacatcctacgcgagaatgagaagctgtcatcatctacttgtattgcatttgggccagctgcttgcatgacatgggacttggctgagtcgggtaaagactttgttaccaccatagttaacagaaacgacctagtgccatctcttggcatagtttctgctgccaagcttcgtatagaggttatgtcatcgtcttgggcacatgaccttggcagacaaattcagcagactaggttcttaggttttgtgaaccgttctgtgagtttcataagatcccatgtgccctttgtctctgatccaagatctaaggttgtggatgtagacatgctgcaatcccagagtcccgaggctgggagtaagccttcagcagatactcatgctgtggtgaagaaacgccctgcactagtttgctggtcatatgtggctacacccaatcccaaacagagtatggaatcgtcaatacaaatgcagggcacggaagtccaaaccgacactgctgtcgaaactgagaaaaattctgaagcggcagctgctgagctagtctcaatccatcttggtgaactgaacattcaagaatcagacaaggacgatgacaagagaggggaaaagggttcagaaacagatgaagaagagaccatggagattctagagtccttggccgacgagaagcacatgccatcatcgtcaagctttgctcaagagccacagcagctgtaccccccagggaaaatactgcacatggttggattggcagcagcggaagtggcaaccacaagtcagcaaggagcccaggaggaggtcgtcgccctgtatgagacaccccggcatttgtacagtaagattcgcctggcgaggtccatgataggagaacattacatgcccaagtacatcaagacaatggagaagctgatacacaagcttgcagaggaccagctggactctttgtagcatcaacagtgtgtataggataattattgtacagatcatgaaaatgaaaatcattctttcagattgcttgtgcgtaatggtggtttggaattggtctgtttatctgctgtcatttcactttggtaggcaccccaccccaggaagagctcaaagagctgaccctggtgatggtctctgtaattttaacagaagcagttttcttacatgtgaatattattatctggtatcattaggtgaggactaacaatgtttatatgttgaacctcgtgacatagtgagggaaacctttgaaagtgct

SEQ ID NO: 30418 - DNA, 2116 bp, Zea Mays
cccaagtcccaactcccaagtggccaagtcccaacccgacgtccgacgacccccacctctccttctcctcgctccgacacctacgcacatacagtacgtacgtgctaaccgtgcttttaccgcgcgggatgggcgcgaaggggatggcgacggcggcggggacggcggtgctgctgtacctggtgctgtcaggccggctctgcggggacgccgccggcgacggcggcgccctggaggaccagctgatatcgtcggccctggaggctcggcgacgaaggaaagaggacaccagggcgcggcgggagcagcggcgtgctccgcctccgtgcaccaagcggcggtggccggagcgccccccggacgggtggggcgaggcggccgccttgaccgcgcgcactgtgggcttcacctgggccgagacgctcggcaagtggaccctcggggaggtcgccttcgggatcaagtactatatgcggcagcagggtaatctgcagcatgagtatgctggaagtgattctgtgctactggatggggctgaggtgaggcaggtactgatttcgctgctcagatatctgaagcagtgcatgtatttctcgaagaagccatacaacgtgtttttggagtatggtggttatggccataatgacgtgcttataagaaagcctaaggcgaggctcttgaagccagctttcacaattgttcgagacagaagtagccaatgctttctccttttcatcaggggggctatcagtgttaaggagcggttgacagcagcaacaggcacagaggttccattccatcacgttgtggtccaggaaggtcgtgtttccaacctagtgttgggctacgcccactgtggaatggttgtagcagctcgatggattgcaaggcaagccattcctggcctgagtaaagcaatcgagcaattcccagaatatgaggttaaggtcattggccattcaatgggagctgggattgcaacaatactaacatacatcctacgcgagaatgagaagctgtcatcatctacttgtattgcatttgggccaggttatgtcatcgtcttgggcacatgaccttggcagacaaattcagcagactaggttcttaggttttgtgaaccgttctgtgagtttcataagatcccatgtgccctttgtctctgatccaagatctaaggttgtggatgtagacatgctgcaatcccagagtcccgaggctgggagtaagccttcagcagatactcatgctgtggtgaagaaacgccctgcactagtttgctggtcatatgtggctacacccaatcccaaacagagtatggaatcgtcaatacaaatgcagggcacggaagtccaaaccgacactgctgtcgaaactgagaaaaattctgaagcggcagctgctgagctagtctcaatccatcttggtgaactgaacattcaagaatcagacaaggacgatgacaagagaggggaaaagggttcagaaacagatgaagaagagaccatggagattctagagtccttggccgacgagaagcacatgccatcatcgtcaagctttgctcaagagccacagcagctgtaccccccagggaaaatactgcacatggttggattggcagcagcggaagtggcaaccacaagtcagcaaggagcccaggaggaggtcgtcgccctgtatgagacaccccggcatttgtacagtaagattcgcctggcgaggtccatgataggagaacattacatgcccaagtacatcaagacaatggagaagctgatacacaagcttgcagaggaccagctggactctttgtagcatcaacagtgtgtataggataattattgtacagatcatgaaaatgaaaatcattctttcagattgcttgtgcgtaatggtggtttggaattggtctgtttatctgctgtcatttcactttggtaggcaccccaccccaggaagagctcaaagagctgaccctggtgatggtctctgtaattttaacagaagcagttttcttacatgtgaatattattatctggtatcattaggtgaggactaacaatgtttatatgttgaacctcgtgacatagtgagggaaacctttgaaagtgct

SEQ ID NO: 30419 - DNA, 1921 bp, Zea Mays
ccctcttctagattggtcgacagtccggcgggcccatggctctttgaaagaaaatatcgtggactaggaattcgatcaaatattggactgttctgagttgctcgcagaatttgctgaaaatcttttcggtccagtttgaactgctgggaccatagtacctagtagtagggtaatctgcagcatgagtatgctggaagtgattctgtgctactggatggggctgaggtgaggcaggtactgatttcgctgctcagatatctgaagcagtgcatgtatttctcgaagaagccatacaacgtgtttttggagtatggtggttatggccataatgacgtgcttataagaaagcctaaggcgaggctcttgaagccagctttcacaattgttcgagacagaagtagccaatgctttctccttttcatcaggggggctatcagtgttaaggagcggttgacagcagcaacaggcacagaggttccattccatcacgttgtggtccaggaaggtcgtgtttccaacctagtgttgggctacgcccactgtggaatggttgtagcagctcgatggattgcaaggcaagccattcctggcctgagtaaagcaatcgagcaattcccagaatatgaggttaaggtcattggccattcaatgggagctgggattgcaacaatactaacatacatcctacgcgagaatgagaagctgtcatcatctacttgtattgcatttgggccagctgcttgcatgacatgggacttggctgagtcgggtaaagactttgttaccaccatagttaacagaaacgacctagtgccatctcttggcatagtttctgctgccaagcttcgtatagaggttatgtcatcgtcttgggcacatgaccttggcagacaaattcagcagactaggttcttaggttttgtgaaccgttctgtgagtttcataagatcccatgtgccctttgtctctgatccaagatctaaggttgtggatgtagacatgctgcaatcccagagtcccgaggctgggagtaagccttcagcagatactcatgctgtggtgaagaaacgccctgcactagtttgctggtcatatgtggctacacccaatcccaaacagagtatggaatcgtcaatacaaatgcagggcacggaagtccaaaccgacactgctgtcgaaactgagaaaaattctgaagcggcagctgctgagctagtctcaatccatcttggtgaactgaacattcaagaatcagacaaggacgatgacaagagaggggaaaagggttcagaaacagatgaagaagagaccatggagattctagagtccttggccgacgagaagcacatgccatcatcgtcaagctttgctcaagagccacagcagctgtaccccccagggaaaatactgcacatggttggattggcagcagcggaagtggcaaccacaagtcagcaaggagcccaggaggaggtcgtcgccctgtatgagacaccccggcatttgtacagtaagattcgcctggcgaggtccatgataggagaacattacatgcccaagtacatcaagacaatggagaagctgatacacaagcttgcagaggaccagctggactctttgtagcatcaacagtgtgtataggataattattgtacagatcatgaaaatgaaaatcattctttcagattgcttgtgcgtaatggtggtttggaattggtctgtttatctgctgtcatttcactttggtaggcaccccaccccaggaagagctcaaagagctgaccctggtgatggtctctgtaattttaacagaagcagttttcttacatgtgaatattattatctggtatcattaggtgaggactaacaatgtttatatgttgaacctcgtgacatagtgagggaaacctttgaaagtgct

SEQ ID NO: 30420 - DNA, 1791 bp, Zea Mays
ctagtttgagaacaatctgccgatgggtacatgaatgcggtaatctgcagcatgagtatgctggaagtgattctgtgctactggatggggctgaggtgaggcaggtactgatttcgctgctcagatatctgaagcagtgcatgtatttctcgaagaagccatacaacgtgtttttggagtatggtggttatggccataatgacgtgcttataagaaagcctaaggcgaggctcttgaagccagctttcacaattgttcgagacagaagtagccaatgctttctccttttcatcaggggggctatcagtgttaaggagcggttgacagcagcaacaggcacagaggttccattccatcacgttgtggtccaggaaggtcgtgtttccaacctagtgttgggctacgcccactgtggaatggttgtagcagctcgatggattgcaaggcaagccattcctggcctgagtaaagcaatcgagcaattcccagaatatgaggttaaggtcattggccattcaatgggagctgggattgcaacaatactaacatacatcctacgcgagaatgagaagctgtcatcatctacttgtattgcatttgggccagctgcttgcatgacatgggacttggctgagtcgggtaaagactttgttaccaccatagttaacagaaacgacctagtgccatctcttggcatagtttctgctgccaagcttcgtatagaggttatgtcatcgtcttgggcacatgaccttggcagacaaattcagcagactaggttcttaggttttgtgaaccgttctgtgagtttcataagatcccatgtgccctttgtctctgatccaagatctaaggttgtggatgtagacatgctgcaatcccagagtcccgaggctgggagtaagccttcagcagatactcatgctgtggtgaagaaacgccctgcactagtttgctggtcatatgtggctacacccaatcccaaacagagtatggaatcgtcaatacaaatgcagggcacggaagtccaaaccgacactgctgtcgaaactgagaaaaattctgaagcggcagctgctgagctagtctcaatccatcttggtgaactgaacattcaagaatcagacaaggacgatgacaagagaggggaaaagggttcagaaacagatgaagaagagaccatggagattctagagtccttggccgacgagaagcacatgccatcatcgtcaagctttgctcaagagccacagcagctgtaccccccagggaaaatactgcacatggttggattggcagcagcggaagtggcaaccacaagtcagcaaggagcccaggaggaggtcgtcgccctgtatgagacaccccggcatttgtacagtaagattcgcctggcgaggtccatgataggagaacattacatgcccaagtacatcaagacaatggagaagctgatacacaagcttgcagaggaccagctggactctttgtagcatcaacagtgtgtataggataattattgtacagatcatgaaaatgaaaatcattctttcagattgcttgtgcgtaatggtggtttggaattggtctgtttatctgctgtcatttcactttggtaggcaccccaccccaggaagagctcaaagagctgaccctggtgatggtctctgtaattttaacagaagcagttttcttacatgtgaatattattatctggtatcattaggtgaggactaacaatgtttatatgttgaacctcgtgacatagtgagggaaacctttgaaagtgct

SEQ ID NO: 30421 - DNA, 2045 bp, Zea Mays
aacagttcaatgagcttcaattattttccagtactattttgctgacatctgtcttgacggaattgctcatatgcagttagctatgcacctcaccatccatccatatataagtagtgtgttttctttaacaatttcatgatttcggtgcatcatggactgggactctattaaatttgactcattttgattgtttaagaagattgtttatatataagcaaccctactttcggtttttttttctccctcccaggcgaactccactttgattaatttaggctccagaaattgtaaaggtaatctgcagcatgagtatgctggaagtgattctgtgctactggatggggctgaggtgaggcaggtactgatttcgctgctcagatatctgaagcagtgcatgtatttctcgaagaagccatacaacgtgtttttggagtatggtggttatggccataatgacgtgcttataagaaagcctaaggcgaggctcttgaagccagctttcacaattgttcgagacagaagtagccaatgctttctccttttcatcaggggggctatcagtgttaaggagcggttgacagcagcaacaggcacagaggttccattccatcacgttgtggtccaggaaggtcgtgtttccaacctagtgttgggctacgcccactgtggaatggttgtagcagctcgatggattgcaaggcaagccattcctggcctgagtaaagcaatcgagcaattcccagaatatgaggttaaggtcattggccattcaatgggagctgggattgcaacaatactaacatacatcctacgcgagaatgagaagctgtcatcatctacttgtattgcatttgggccagctgcttgcatgacatgggacttggctgagtcgggtaaagactttgttaccaccatagttaacagaaacgacctagtgccatctcttggcatagtttctgctgccaagcttcgtatagaggttatgtcatcgtcttgggcacatgaccttggcagacaaattcagcagactaggttcttaggttttgtgaaccgttctgtgagtttcataagatcccatgtgccctttgtctctgatccaagatctaaggttgtggatgtagacatgctgcaatcccagagtcccgaggctgggagtaagccttcagcagatactcatgctgtggtgaagaaacgccctgcactagtttgctggtcatatgtggctacacccaatcccaaacagagtatggaatcgtcaatacaaatgcagggcacggaagtccaaaccgacactgctgtcgaaactgagaaaaattctgaagcggcagctgctgagctagtctcaatccatcttggtgaactgaacattcaagaatcagacaaggacgatgacaagagaggggaaaagggttcagaaacagatgaagaagagaccatggagattctagagtccttggccgacgagaagcacatgccatcatcgtcaagctttgctcaagagccacagcagctgtaccccccagggaaaatactgcacatggttggattggcagcagcggaagtggcaaccacaagtcagcaaggagcccaggaggaggtcgtcgccctgtatgagacaccccggcatttgtacagtaagattcgcctggcgaggtccatgataggagaacattacatgcccaagtacatcaagacaatggagaagctgatacacaagcttgcagaggaccagctggactctttgtagcatcaacagtgtgtataggataattattgtacagatcatgaaaatgaaaatcattctttcagattgcttgtgcgtaatggtggtttggaattggtctgtttatctgctgtcatttcactttggtaggcaccccaccccaggaagagctcaaagagctgaccctggtgatggtctctgtaattttaacagaagcagttttcttacatgtgaatattattatctggtatcattaggtgaggactaacaatgtttatatgttgaacctcgtgacatagtgagggaaacctttgaaagtgct

SEQ ID NO: 30422 - DNA, 3164 bp, Zea Mays
atttaaaatgcttgcatattttaattttgttatggtttaccttttcccaattcagaatgctttttccattttctttccgtgaagtatgggtgataaattgcatgtttgggtttgataaagtctacaagtttgcattatgatgatggaatcctgttgctattgactcagagaaagagttctatcgctttcaggggtgatcttttattccctctgtcgtgttaagtttatgaggcttgcttacttgattggttatggggctgagatagaaaagagtccagtcaacagtgcatctttaagcatgctaccatggccaaagccagctacatggccttcaatccctcctgattcgtcagcagaaataatggaaaaagagaagatggttcttcaagtcaattcaagagaaaagctcttcagcattcacaggaaacctctgccattagaaccttctttacttctacgtgaggctaataggcgcagggcttttctctctgctggaaatttatctgagctttatgattcatctgatggttcaggtttagatgcaaattcaaaacttcctcccaacagatctgcttctaacttaatgacaagaacaatgtcaggtccagcaacgtccgagacttcactgccagttgatcgtcccatgaggttgtcagaaattcatgttgcagctgagcatgcactgaaacaaacgatatcagatcctgattttatgacatcactttcatcactagaagaatttgagaaaagatatatggagcttactaaaggtgcagctgacaattaccaccgatcttggtggaaaagacatggagttgttcttgatggagagatcgcagctctgttctttaagcatggaaattatgacctggctgtgaaatcctatgagaaagtttgtgctctctattctgcagaaggctgggaagagctgttggcagatgttcttcctgatcttgcagaatgccagaagattcttaatgatgaagctggttatttggcttcttgtgtaaagttactatcgctggacagtggcttgttttcatctaaagagcggcaaggtttccagtcagaagttgttcgacttgctcacagtgaaatgaaacatcttgtgcccctagatgtctcgtcactaattacatttgctggaaatgctggtccaccactagaattatgtgatggagatcctggtacactatctgtagcagtttggaatggcttcccagatgacatcacactggagtctctcagtttaaggttgtcagcttcttctagtgcagatgaaggtatcaaggcaattaaaagttcagattctcatgttctagtaccaggtagaaatatcatctcttttgacattcctcgtcaaaagcctggctcctatgtgttgggtgctctcactggacagattggcaagctgtcattcagatcacatggattttcccaagatggtccagttgaaactgatgaatttatgagctttgagaaaccgacaagacctgttttgaaggtgagaaaaccaagggctttagttgatattacacctgctgtgtcctctgctttgcttatgaatgagctccaatggattggattaatcgttaagcctatagactattctttaaaaggtggaatattgcatatcgatgctggcgctgaactgaaaattgaggagtctcagatgattgaaatagaaatttacgtaagtgatatggagtgtgctaattctgccaacagctccatcaaagctggaaaggttgaaaaggtacctattgaaaatggaaagatagaacttcctgattgggctagtgatgtgactactcttgtttggtttcctgttcgtgctattgatgacacaattgcaagaggagaatccctagtgtctcagaaacagagcgttgtagatgggatgagaatgattgctctcaagcttgagtttggagttttccgtaaccaagtgtttgaaaggaccattgcagttcattttactaacccattccatgtaagcacacgcgtcgtggacaagtgcaatgatggagctctacttctacaggtgatattgagttccggagtgaaggccacactgcatgtaaaggatgtacggttagatcttcaatctggatttgatcacttgggcaaaggagatggacggccagctttgagtttattccctctggttattgctccttcttccaaagctggaattttattcatgttacggttaagtggtacaaaggatgtggacgacgcagaaaatgcagacagcacgctgaatatcacctacgggatatctggtgacagaaaaactggagcacattctcctatacctgtcaaatctggtgattctgaagaacttgtgttcaagattgcactcagactgaagcgacctgtcctggatccatgtgtagcagttggattccttccattttcaactgactgcctgagggttgggcagttagttaatatgaggtggagggtcgaaaggctgaaaaccccggaggatgcatccatatccattgacgaaatactttatcaggttgaggcaaacccgcagaactggatggttgctgggaggaaatgtggtcacgtatcgttgtcaaatgagcaaggatggagatcacggtgacatgtgtgccactggtgtctgggtacgtccacccaccgcagctggacctgccggaggtgggtgaggcaaacattagctgcaacccagcagggcctcacctggtgtgtgtccttcctccagccatcagcacatcctactgtataccagcgatatgattcttcctgggctgacagtttgctgccatttacacatagatgagccatagtatgtttttgccgagacgtgttttttgtgtgtagacatgtttcactggaatgtgtttcttgtaattctgttgtgccatgatcagtgtacaattctgcattgactgatggtacatgaaactggttccccagtattccgtgaaactgcaagccggatttgctgtgttcagattgtgttgttgcagactggttgcctttcgtaaatcagccagattgtatccttattaggtcgttttcatatctctgaggaatggatgattctagaatgattcttagatcgtttgtgttttactccgtccgttccaaaatatagttctttgtagtcctcttttttcgtccatgtt

SEQ ID NO: 30423 - DNA, 1221 bp, Zea Mays
agagccttctggaccggggatgaatcgaccggagagaatgagagaagtcaggggacgaatcgaccggagagaatgagagaagtcaggggaggaatcgtctccgtcgtgccgccatcttctccactaagttgacgccggtcgctagtcgccgctctcgacgtcccccctcctccgtcgtccactgcccttggcactacaccagtgtcgtccgccgcatcatcgttcctgcttcgccgcatactcgccgcgccgtcgccgacaaggaccatccgggctgaggcctgctaaaatctccaccacttctctgactacttcgtcatctcctccacgttcgacatagatacaaatgtcttttcccccatcggagctgagtacatccgagtgtcctcactgataggattgttaatggcgtccggtcaaaaataagttagctataccatcctcaccctcggagctccgtacatgcgagtgtcctcgctgttagggtccacatgtacggatgtctttttccttatcagagctccatacacctgctcgaaattggtaatttctcattgcaagtatcagtcttccattgagttcgcgtacgaggtttttgtggttccacattgttaatggtggtcagtcacaaataagtttgctataccatcatcaacctcttgaactttagttacattttgtcggaaaacatacttttggtgtgtagtgatactaattttgttgtgtcgtgctacgtatagaccatatgcttgctacaattactctaaacaatacaagtggtagctacattttctgtatacatgatgttcatggtatctcatcattgaattatccatgcattcgcttcttatggtttccttctttttaattttccagtaaattctaatcttagttttggaaacacaggcttcatcaacttcaacatatttactcaagggaaaaaaggctgcttgattaagagtaaagaagaagacgaagaaagcgaagaaatgagaaaaggctgaagcttaggtgaaccattaggccgaagggactttcgtattttggaatgaacacttatgcagttaaactactgcttattgtaatatagcattttactctttgtagtgttttcccttttttactctaaatgcttttgttgtgtgtgaaaccaagtatttctagtattttgaggcgaaggcgaaaaacaccttgccttcttttcactcgaaaaaagccccc

SEQ ID NO: 30424 - DNA, 846 bp, Zea Mays
agagccttctggaccggggatgaatcgaccggagagaatgagagaagtcaggggacgaatcgaccggagagaatgagagaagtcaggggaggaatcgtctccgtcgtgccgccatcttctccactaagttgacgccggtcgctagtcgccgctctcgacgtcccccctcctccgtcgtccactgcccttggcactacaccagtgtcgtccgccgcatcatcgttcctgcttcgccgcatactcgccgcgccgtcgccgacaaggaccatccgggctgaggcctgctaaaatctccaccacttctctgactacttcgtcatctcctccacgttcgacatagatacaaatgtcttttcccccatcggagctgagtacatccgagtgtcctcactgatagggtttgcaaatacatatgccttttctcaattggaactccattgttaatggcgtccggtcaaaaataagttagctataccatcctcaccctcggagctccgtacatgcgagtgtcctcgctgttagggtccacatgcttcatcaacttcaacatatttactcaagggaaaaaaggctgcttgattaagagtaaagaagaagacgaagaaagcgaagaaatgagaaaaggctgaagcttaggtgaaccattaggccgaagggactttcgtattttggaatgaacacttatgcagttaaactactgcttattgtaatatagcattttactctttgtagtgttttcccttttttactctaaatgcttttgttgtgtgtgaaaccaagtatttctagtattttgaggcgaaggcgaaaaacaccttgccttcttttcactcgaaaaaagccccc

SEQ ID NO: 30425 - DNA, 877 bp, Zea Mays
agagccttctggaccggggatgaatcgaccggagagaatgagagaagtcaggggacgaatcgaccggagagaatgagagaagtcaggggaggaatcgtctccgtcgtgccgccatcttctccactaagttgacgccggtcgctagtcgccgctctcgacgtcccccctcctccgtcgtccactgcccttggcactacaccagtgtcgtccgccgcatcatcgttcctgcttcgccgcatactcgccgcgccgtcgccgacaaggaccatccgggctgaggcctgctaaaatctccaccacttctctgactacttcgtcatctcctccacgttcgacatagatacaaatgtcttttcccccatcggagctgagtacatccgagtgtcctcactgatagggaccttcctgtgcttccagattgttaatggcgtccggtcaaaaataagttagctataccatcctcaccctcggagctccgtacatgcgagtgtcctcgctgttagggtccacatgtacggatgtctttttccttatcagagctccatacacctgctcgaaattggcttcatcaacttcaacatatttactcaagggaaaaaaggctgcttgattaagagtaaagaagaagacgaagaaagcgaagaaatgagaaaaggctgaagcttaggtgaaccattaggccgaagggactttcgtattttggaatgaacacttatgcagttaaactactgcttattgtaatatagcattttactctttgtagtgttttcccttttttactctaaatgcttttgttgtgtgtgaaaccaagtatttctagtattttgaggcgaaggcgaaaaacaccttgccttcttttcactcgaaaaaagccccc

SEQ ID NO: 30426 - DNA, 858 bp, Zea Mays
agagccttctggaccggggatgaatcgaccggagagaatgagagaagtcaggggacgaatcgaccggagagaatgagagaagtcaggggaggaatcgtctccgtcgtgccgccatcttctccactaagttgacgccggtcgctagtcgccgctctcgacgtcccccctcctccgtcgtccactgcccttggcactacaccagtgtcgtccgccgcatcatcgttcctgcttcgccgcatactcgccgcgccgtcgccgacaaggaccatccgggctgaggcctgctaaaatctccaccacttctctgactacttcgtcatctcctccacgttcgacatagatacaaatgtcttttcccccatcggagctgagtacatccgagtgtcctcactgataggattgttaatggcgtccggtcaaaaataagttagctataccatcctcaccctcggagctccgtacatgcgagtgtcctcgctgttagggtccacatgtacggatgtctttttccttatcagagctccatacacctgctcgaaattggcttcatcaacttcaacatatttactcaagggaaaaaaggctgcttgattaagagtaaagaagaagacgaagaaagcgaagaaatgagaaaaggctgaagcttaggtgaaccattaggccgaagggactttcgtattttggaatgaacacttatgcagttaaactactgcttattgtaatatagcattttactctttgtagtgttttcccttttttactctaaatgcttttgttgtgtgtgaaaccaagtatttctagtattttgaggcgaaggcgaaaaacaccttgccttcttttcactcgaaaaaagccccc

SEQ ID NO: 30427 - DNA, 954 bp, Zea Mays
cggagagaatgagagaagtcaggggacgaatcgaccggagagaatgagagaagtcaggggaggaatcgtctccgtcgtgccgccatcttctccactaagttgacgccggtcgctagtcgccgctctcgacgtcccccctcctccgtcgtccactgcccttggcactacaccagtgtcgtccgccgcatcatcgttcctgcttcgccgcatactcgccgcgccgtcgccgacaaggaccatccgggctgaggcctgctaaaatctccaccacttctctgactacttcgtcatctcctccacgttcgacatagatacaaatgtcttttcccccatcggagctgagtacatccgagtgtcctcactgatagggtttgcaaatacatatgccttttctcaattggaactccgtacacctgctcgcacttgattatttctcattgcagctatcagtcgtccgttcatttcacgtaggaccttcctgtgcttccagattgttaatggcgtccggtcaaaaataagttagctataccatcctcaccctcggagctccgtacatgcgagtgtcctcgctgttagggtccacatgtacggatgtctttttccttatcagagctccatacacctgctcgaaattgacaggcttcatcaacttcaacatatttactcaagggaaaaaaggctgcttgattaagagtaaagaagaagacgaagaaagcgaagaaatgagaaaaggctgaagcttaggtgaaccattaggccgaagggactttcgtattttggaatgaacacttatgcagttaaactactgcttattgtaatatagcattttactctttgtagtgttttcccttttttactctaaatgcttttgttgtgtgtgaaaccaagtatttctagtattttgaggcgaaggcgaaaaacaccttgccttcttttcactcgaaaaaagccccc

SEQ ID NO: 30428 - DNA, 749 bp, Zea Mays
agagaatgagagaagtcaggggacgaatcgaccggagagaatgagagaagtcaggggaggaatcgtctccgtcgtgccgccatcttctccactaagttgacgccggtcgctagtcgccgctctcgacgtcccccctcctccgtcgtccactgcccttggcactacaccagtgtcgtccgccgcatcatcgttcctgcttcgccgcatactcgccgcgccgtcgccgacaaggaccatccgggctgaggcctgctaaaatctccaccacttctctgactacttcgtcatctcctccacgttcgacatagatacaaatgtcttttcccccatcggagctgaattgttaatggcgtccggtcaaaaataagttagctataccatcctcaccctcggagctccgtacatgcgagtgtcctcgctgttagggtccacatgcttcatcaacttcaacatatttactcaagggaaaaaaggctgcttgattaagagtaaagaagaagacgaagaaagcgaagaaatgagaaaaggctgaagcttaggtgaaccattaggccgaagggactttcgtattttggaatgaacacttatgcagttaaactactgcttattgtaatatagcattttactctttgtagtgttttcccttttttactctaaatgcttttgttgtgtgtgaaaccaagtatttctagtattttgaggcgaaggcgaaaaacaccttgccttcttttcactcgaaaaaagccccc

SEQ ID NO: 30429 - DNA, 954 bp, Zea Mays
cgaatcgaccggagagaatgagagaagtcaggggaggaatcgtctccgtcgtgccgccatcttctccactaagttgacgccggtcgctagtcgccgctctcgacgtcccccctcctccgtcgtccactgcccttggcactacaccagtgtcgtccgccgcatcatcgttcctgcttcgccgcatactcgccgcgccgtcgccgacaaggaccatccgggctgaggcctgctaaaatctccaccacttctctgactacttcgtcatctcctccacgttcgacatagatacaaatgtcttttcccccatcggagctgagtacatccgagtgtcctcactgatagggtttgcaaatacatatgccttttctcaattggaactccgtacacctgctcgcacttgattatttctcattgcagctatcagtcgtccgttcatttcacgtaggaccttcctgtgcttccagattgttaatggcgtccggtcaaaaataagttagctataccatcctcaccctcggagctccgtacatgcgagtgtcctcgctgttagggtccacatgtacggatgtctttttccttatcagagctccatacacctgctcgaaattgtaaattctaatcttagttttggaaacacaggcttcatcaacttcaacatatttactcaagggaaaaaaggctgcttgattaagagtaaagaagaagacgaagaaagcgaagaaatgagaaaaggctgaagcttaggtgaaccattaggccgaagggactttcgtattttggaatgaacacttatgcagttaaactactgcttattgtaatatagcattttactctttgtagtgttttcccttttttactctaaatgcttttgttgtgtgtgaaaccaagtatttctagtattttgaggcgaaggcgaaaaacaccttgccttcttttcactcgaaaaaagccccc

SEQ ID NO: 30430 - DNA, 1341 bp, Zea Mays
tgactgtagaggcactatctcttcaccagtgcctagccatagtgctgctagagctcgtcagcgcactctgctcccctggcgctgctctaggttcagtcggcgtcttcctcacgttgctggtcggcagagctcgcctggcttcaacctccgccctgccctgcttgaccccactcgcccatccctgttcccgacgcccgagctcacctcagctccgttgtgcccctgtgttcagcctccttcctccatcagcggacgtgctcggtctcagccgcgcccctgcacccacccttgccggtgacggctgctgcgagcgccccttcattctccccagcctcgctgtggccagcaacttcaaatccatgggtgagccagcctcttcaccttgccgcgcgctgggagcctctctctgctcgacccggtgtggtgctctggccgtgcgtccactccactacgacgtcgagcctccctgctgcccgcaactatcacattagccatcgtggcgtcattatttcctgctgcgccgcgacatcgtcaagctccggtgcttagcgtcgaagtcgctgcgcccttgtcgctctggcttcctttgtcttcacgtggtgtgtggcggtcgtgtccaaatccatggcatcaatgtctgcatccctagcatcgtcgtcatttcagcagcttgttgcaccttgcgttcacgccggaagatgaaaggaaagcgccagtgcaacgctcgtcaagtataaatgcgtcgtcgatttcgtggtttcaaattggatttagctttggtacgctagctgagaatcgtacgaagcaaaggacatggaccaaagcagaccacaagacgatgtcggccggtgaattggaaaaaatggacagactgaacgagtgccaagacaaaggatgatcgtcaagtgatcgtcatctaacaaacactaacctagtgttattctagacaagccccggtgcattcacctctttccttattgtttacaatattttatcaccttgaatgatgcattaggtgataggagttgtgtgatcaaacagttgatgcatttccttccttaattaaacaaccctaataactgttttatgaaaatttagtgatgcttagccctgcttattaatttaggattgtttttaaaagatgatgtgtaacacgggatatgagagtttgtgaaataaaagggcttgtgatgatgaagccattgcggccgcgatgatttcatcattcaattagggtacctctctcaggtatcaagttttgggaaataatatgaaatgtagaccagacgttgagcaggaaagttcacccgtctgtgtcgattaaataccgttcaatgtaag

SEQ ID NO: 30431 - DNA, 115 bp, Zea Mays
ctggaattcaacactcagatagtgtctgctagatgacactcgcttggcgagcatccactggttaagtccatcagtcttcaggtcgtccaccaactgcatcttgtggttggcacca

SEQ ID NO: 30432 - DNA, 1442 bp, Zea Mays
acctggccgactcgtgtcgcgcatgcctccacggtttaggtgcttcatcgaatcatgcatcgcgcgaggcgcaacgacaacatctagctgcgattaacaacaccaaaggttcaaacatttttatcaagcacttgagatccaaaaacaatgggatactagcgaggggctcaccgaggattttgacgacgatgcgcaagcgctgcgcaaatccggcgaagcgagacgcggagacgtcgtgcctgcacggatcgacgacgcggctgctcttgacgaactctcgcgcaggtgacacaacatgggggcagcagcgtgcactgaggggcattttgtcgagcagattgagcgaagaggagagtggcttggggcttgctgttgtggttagaatggtgagtagagcaccaccatggctacatatgggggaactgatgcacgagctgctgctaggattcaggtggggaggacagcgaggtagaacatgttggcaacggtgcgcagggcgcgccatgaggggaaaagcaggggcgcacgtgatctaggcgagctcagcatcccaggccacaatcttcttgcggaggaggagctcgctgggtgtcggcgcccagtcgggctaaggtgaggcgagccgatgtggggctaggcgagggaggaacacatggtctagacactgcaggagccatggctgaacctacagttgagctcgctggtgcgaacccaaggtccgtggcgaggcgtagcattgctctgttgacagatctcgccatggcatcgatgaaggagcatatggcgtgaaatctagatggagcaaggtccggcgatctgctggtgcgcagggaaaaagacgcaggggaaagccggctggaggccgacgcggagagcgcgggccgagcaccatgggcagttgagggagctcgggcgtcggttggggagaggagacgaggctgcatgctagtggaagaagtggctggagcagggaggaggatggcgttcaaggagctaggtgccatggagagagggaagagatccctgctgctggcgcccatgggaggaggggttgtgcatccctggaggccaagcaccaaggagggaggagcccggtgtgctggtgaagattcgtaggggcttgcctgtcgccatgccgcgcggagaagatgtcgctgggggaaggcgccggcttggggagatcacgagaagggcgctgggaaggcagaggccgacgacctaggggagagcaggggcgagagggcgccagggagctggccatgggagaagaaactcctgcgcgttgggggagaagggctctgcgcttgggagcttctgcagaaagctgggcgtcgagtggaggaatggagcagagaatggagatggcgccctggctccttttattaacaggcgacgaccgcatgcgacattggcgccttggccggctgctgttggttggctag

SEQ ID NO: 30433 - DNA, 3646 bp, Zea Mays
caatgatatgacatccctcgtgccattcgggcccgctcgccagtcacccgcgtctgagagaggagagaggagagagagagaccacctcctccgcttccgctctcctctctttctgactcttgactcgaccgctcctgttcgccgctccgccatcgccggcgaccactccggcgacgctgcgtctccggcgaccccaccgacgcctgtcccagcgaccccattcctccgatccccgcctcacgccctgcgctctcccggctagggttcgtgctcctgcccggatccaccccgcctcctcgcgcccccgttcgcgcgcgccgatcggcaggctgcgggccgccgccgctgcgcgagctagcgggcgtcggatccatcgatccgcgcggcctccgcggccgtcatggacgacttcgagggcctgctggcccgcgacttcggcctccgcccgcaggggaaggccgcgcccatgtcggccgcccgctcctcggggccctccggatctgcctgggccaataccagatccgccgccgccccctcctacgacgagctcttcgggtccgccccgccactgcccaaggccacgccgtcgccgtcgccgtcgctcgaccacatcttcgactcgttcaaggagcccgcttccaccgcgccgccgcctaagccgaagcactcgtccatgccggtgttcgacaagccggtctacgacgacgacatctttgtcggggtccctggggtcaagagctcctcggcgcgctacgacgatgtgttcgggggaagccatagccgcgaggcgcctccagcgttcgatgacctgctcggtggatttggtaagagctcacaggtgagggaagaggtggatgacaagaggaaacaagaggcagctatggggccagcggcgggtactgggtttgattatttgatcccaggctttggcgggaggagctccccgcggcaaagggatactgttggtgcaaaacaacagaagatttccatgtcaacatctaagcaaccagctagcttaagcgacccctttgttgttctcgaaacaacttcatcctcagcccatccattcgcagatcccttggatgaatttggtaaagctgcaaaatatcaagggaaaagccgtgaaagtactaacgttgggagcaatctgtttgaggattcaagcacttccatccaggctccaaaatctgaacctatttttacctcagaggtggacaatggcttgaaagataagaatgagtctagcagagcccgagacgcaaatcctgtacagagtttttctaaaggaaactcctcccaacaaccttctgtagaggattttgaaaatatcttttctaagccgcagtctgccagatatgctgatgtccatgttgacattggctcagataaatatagtgggaatggtataaacgaccagtcacctagatctgatgaatccgaagatgagatatggcttacagcttctgagattcccctcttcacacagccaactagtgccccaccaccttcaaggccaccaccacctcttgcagctaagcaaaaaaaacatggatcaaaatcaaaaagaaaagatgatgaacatctaaagcagtctaggaaaaacaatgatcatcaaagaagttcgtcaaatcatgctggtgtttctacagtagatgaactagaagattttgccatgggtaagcctcagagtgtgcatgctttaaatgcggaagaatttgagagaagtacagcagcagcagcatctgcagctgctatgaaagaggccatggataaagcagaggcaaagttcaaacatgcaaaggaggtacgagagagagagcgtgatgcgaagattagaaatagagaacaacgggaacaagatagtgtaacaaggtcgtatgcccaggatcgtgaggacaaagagagaaaggaaagactagaacaagaaagagagatgaagcaaaatgaggaaaaggaaagagagcaaagaagacttgaagaggaaagagaacttgagcgacataaagaaagagaaagagctaggcaagcagtggagagggctacaaaggaggcacgggaaagagcagctgttgaagctcgtgcaaaagcggagagagaggcacgccaacgttcagaacgtgctgctgtgcaaagagcccaacaggaagcacgtgagagggcagcagtggaggctaaagagcgagcagagagggctactgcagaagcaaaggaaagggctgctgctgaaggtaaggaaaaagctgctagtcaagccagggatagggctgcagcagaaagagctgctgtggagagagctcagcaagaagcgaggaagagagctgaacgagcagcagtggaaagggctgctgctgaggctcgggaaagacaggctgctgctgcaagagataaaacgagcaaaccagatgatctagagtccttctttggtatgggtgctcgagctaatagtgctccgaagcaaagggctccgactgtggactctatgtttcattctcaaacgcaaaatagagggagttccacttcgacatcaatgaaaaaggcatcatcaacaacaaatattgctgatgacttgtctgcgatatttggaggagctcctacatcagaagaatttcaagaagtagatggggagagcgaagaaagaagacgcgctaggatggaacggcatcaaagaactcgtgaacgagcggcaaaggctttggctgagaagaatgaacgcgacatgcagcaacaaagagagcaggctgaaagacatgcttgcggaaacactggactttgagattaagcgctgggctgctggaaaagaaggcaatttgcgtgcattgctatcaactttacaatatgttctttggccagaatgtgggtggcaacctgtatccctcactgatttgatcactgctgctgctgttaaaaaagtgtacagaaaagcaacactgtgtatccatcctgacaaggtgcagcaaaagggtgcaaatctccaacagaaatatatcgctgagaaggtttttgatctccttaaggaggcgtggaacaaactcaactctgaagagctcttctaaacagcctcacgactgaacatagggtcgcccctcagggtctgcacaaggtactctcggaagaaactcacaagctggagtggcttgaggttggtcggggggaaccatgaagcgaccaagcgaaacctgagctatggttgttgtaatcaccgatgtttgtttcactcccccaattttctttcccaactgtatgctgattcaatcacaactcacagagacatgtggcagctgcccaagctggacctcatccagtaggccagaaggtgtagtatttatcctgggctgtatgcaccgtcagagcgggggttttcttaggccagtgttgtggttatagattaggtacaggttttttttaagcatggagagacgttttactagataatgatgaatgttgcttgtctgatgccattggcatcgtggcaagttcggttgtcttgtttatagtcaatttctggaacatcacttgacctatactctgattcctgttttcttttactcttgtacaaagttgctggtcgattttgattgcttgtattgtaatcatgtttggacgtttacgggttcagtggaatagtttccgggttcgtcattttcat

SEQ ID NO: 30434 - DNA, 3569 bp, Zea Mays
caatgatatgacatccctcgtgccattcgggcccgctcgccagtcacccgcgtctgagagaggagagaggagagagagagaccacctcctccgcttccgctctcctctctttctgactcttgactcgaccgctcctgttcgccgctccgccatcgccggcgaccactccggcgacgctgcgtctccggcgaccccaccgacgcctgtcccagcgaccccattcctccgatccccgcctcacgccctgcgctctcccggctagggttcgtgctcctgcccggatccaccccgcctcctcgcgcccccgttcgcgcgcgccgatcggcaggctgcgggccgccgccgctgcgcgagctagcgggcgtcggatccatcgatccgcgcggcctccgcggccgtcatggacgacttcgagggcctgctggcccgcgacttcggcctccgcccgcaggggaaggccgcgcccatgtcggccgcccgctcctcggggccctccggatctgcctgggccaataccagatccgccgccgccccctcctacgacgagctcttcgggtccgccccgccactgcccaaggccacgccgtcgccgtcgccgtcgctcgaccacatcttcgactcgttcaaggagcccgcttccaccgcgccgccgcctaagccgaagcactcgtccatgccggtgttcgacaagccggtctacgacgacgacatctttgtcggggtccctggggtcaagagctcctcggcgcgctacgacgatgtgttcgggggaagccatagccgcgaggcgcctccagcgttcgatgacctgctcggtggatttggtaagagctcacaggtgagggaagaggtggatgacaagaggaaacaagaggcagctatggggccagcggcgggtactgggtttgattatttgatcccaggctttggcgggaggagctccccgcggcaaagggatactgttggtgcaaaacaacagaagatttccatgtcaacatctaagcaaccagctagcttaagcgacccctttgttgttctcgaaacaacttcatcctcagcccatccattcgcagatcccttggatgaatttggtaaagctgcaaaatatcaagggaaaagccgtgaaagtactaacgttgggagcaatctgtttgaggattcaagcacttccatccaggctccaaaatctgaacctatttttacctcagaggtggacaatggcttgaaagataagaatgagtctagcagagcccgagacgcaaatcctgtacagagtttttctaaaggaaactcctcccaacaaccttctgtagaggattttgaaaatatcttttctaagccgcagtctgccagatatgctgatgtccatgttgacattggctcagataaatatagtgggaatggtataaacgaccagtcacctagatctgatgaatccgaagatgagatatggcttacagcttctgagattcccctcttcacacagccaactagtgccccaccaccttcaaggccaccaccacctcttgcagctaagcaaaaaaaacatggatcaaaatcaaaaagaaaagatgatgaacatctaaagcagtctaggaaaaacaatgatcatcaaagaagttcgtcaaatcatgctggtgtttctacagtagatgaactagaagattttgccatgggtaagcctcagagtgtgcatgctttaaatgcggaagaatttgagagaagtacagcagcagcagcatctgcagctgctatgaaagaggccatggataaagcagaggcaaagttcaaacatgcaaaggaggtacgagagagagagcgtgatgcgaagattagaaatagagaacaacgggaacaagatagtgtaacaaggtcgtatgcccaggatcgtgaggacaaagagagaaaggaaagactagaacaagaaagagagatgaagcaaaatgaggaaaaggaaagagagcaaagaagacttgaagaggaaagagaacttgagcgacataaagaaagagaaagagctaggcaagcagtggagagggctacaaaggaggcacgggaaagagcagctgttgaagctcgtgcaaaagcggagagagaggcacgccaacgttcagaacgtgctgctgtgcaaagagcccaacaggaagcacgtgagagggcagcagtggaggctaaagagcgagcagagagggctactgcagaagcaaaggaaagggctgctgctgaaggtaaggaaaaagctgctagtcaagccagggatagggctgcagcagaaagagctgctgtggagagagctcagcaagaagcgaggaagagagctgaacgagcagcagtggaaagggctgctgctgaggctcgggaaagacaggctgctgctgcaagagataaaacgagcaaaccagatgatctagagtccttctttggtatgggtgctcgagctaatagtgctccgaagcaaagggctccgactgtggactctatgtttcattctcaaacgcaaaatagagggagttccacttcgacatcaatgaaaaaggcatcatcaacaacaaatattgctgatgacttgtctgcgatatttggaggagctcctacatcagaagaatttcaagaagtagatggggagagcgaagaaagaagacgcgctaggatggaacggcatcaaagaactcgtgaacgagcggcaaaggctttggctgagaagaatgaacgcgacatgcagcaacaaagagagcaggctgaaagacataggcttgcggaaacactggactttgagattaagcgctgggctgctggaaaagaaggcaatttgcgtgcattgctatcaactttacaatatgttctttggccagaatgtgggtggcaacctgtatccctcactgatttgatcactgctgctgctgttaaaaaagtgtacagaaaagcaacactgtgtatccatcctgacaaggtgcagcaaaagggtgcaaatctccaacagaaatatatcgctgagaaggtttttgatctccttaaggaggcgtggaacaaactcaactctgaagagctcttctaaacagcctcacgactgaacatagggtcgcccctcagggtctgcacaaggtactctcggaagaaactcacaagctggagtggcttgaggttggtcggggggaaccatgaagcgaccaagcgaaacctgagctatgagacatgtggcagctgcccaagctggacctcatccagtaggccagaaggtgtagtatttatcctgggctgtatgcaccgtcagagcgggggttttcttaggccagtgttgtggttatagattaggtacaggttttttttaagcatggagagacgttttactagataatgatgaatgttgcttgtctgatgccattggcatcgtggcaagttcggttgtcttgtttatagtcaatttctggaacatcacttgacctatactctgattcctgttttcttttactcttgtacaaagttgctggtcgattttgattgcttgtattgtaatcatgtttggacgtttacgggttcagtggaatagtttccgggttcgtcattttcat

SEQ ID NO: 30435 - DNA, 531 bp, Zea Mays
gatctagatagaaggttgggatatttttcacaactgcaaaatcattcacagcagaatatcttcgcattattataagacgaaaacatattttagtagaagattggacgatatcgaagtttcatctcgagatatcaagcaattaatgtaggacacatacaatagatttgcctaaccatcaccttctatcagtccatccatctatatatatctgcacacaccaccacagcaggttggtaaaagcacctcatccccctgcatatactaacactgcaaaactgaaaagggtgatagcaaactacaatgaggattgtgtacatggcagctgttatgtttttggttcttgcaaccatgtcttctacctccccatcattctgccaagctgggggctgcatcggctgcccacgggctccaccaccgccgtccgatgagacatgctacgaggacctcaagtgttcggcttcgaggtgccacctgggttgcatacacaggggctacaaggctttgcgccgacggccatggacccccgcgctc

SEQ ID NO: 30436 - DNA, 1109 bp, Zea Mays
agcagatcacatccattacatttttttcagaactgctaatcataatcctccgttaacatcagcacatagcaagaagctacctcttgaaaacaacaacgcacacctataacacaaccatgacgtgctaaactaagcacctccatcagtagcgagcaggcgccgcaaccgaaccgcctaggcgcgctcgccgcggatgcggcgcgcgagctggatgtccttgggcatgatggtgacgcgcttggcgtggatggcacagaggttggtgtcctcgaagaggcccaccaggtaggcctcggcggcctcctgcagcgcggcgacggcggaggactggaaccggaggtccgtcttgaagtcctgcgcgatctcgcggaccagacgctggaacgggagcttgcggatcagcaactccgtgctcttctggtacttgcggatctcgcgcagcgcgacggtgcccgggcggaagcggtgcggcttcttcacgccgcccgtcgccggcgccgacttgcgcgccgccttcgtcgccagctgcttccgcggcgccttgccgcccgtcgacttgcgcgccgtctgcttcgtgcgggccatcggggaaggctggggacagggaggccgaggaggctttgctctgttctggggttcggagttcggacggggcgtggggctctggcttcgcggtggccggtgaggagttgcgggcaggcgggaaggggttaaagtaggaggcggcgggtggatttggtgctgcgcgcgcggagggttgggaatttggccgtgcgcgggaggagggaggagaagggagggtgggatgcgcgccgttcgattgcgtttgaacgaagggtggagattggttttagaggggtcacgcggataccgatccgtgggtggtgagcgcggccattggcggagcgccatctggcagccacctgaggccaatagtcacacatacagtactgccgcatcatagtttgtttggcgctacgggacattcctttccctccatggaagatggaacggcattgcacttgcggtgcggaaatcaactttttatggctagtttggaagaagggggtagagagaaaattagagggctaagagcatctccaagagac

SEQ ID NO: 30437 - DNA, 854 bp, Zea Mays
ctagctgctactgttgccttttgattgagtactccttccgtccaaaatgctttacaataacattaatcaccctagcaaattgatcgtgggagctgatttccattgcttcaagaacaagatcgagccaaaatgggaagaccctatttgtgcgaatggtggtaaatggaccatcagctgtggaagaggaaaatctgatacattttggctgcacactctgctggctatgattggtgaacaattcgactatggtgatgaaatttgtggcgcagttgtcagtgtgcgtgggaagcaggaaagaattgctatttggacaaaaaatgctgccaatgaagccgctcaggtaagcatcgggaagcagtggaaggaacttctggactacaaggactccattggattcattgttcatgacgatgcaaagaagatggacaaaggcctgaagaaccgttacacggtttgatcctgatgctggaatcccagagagttgtagcagtagctggcccaaatgcatgctgggtggttttatctattgctgatgagttgtttaagcaagatccattcctgtattgtactccataagccacttgggtgttgctttgtattgttcactgctgtgttttttctgtggcaccgcatctacagtactagttgcttgtcgttgttcagttgcgcttgaatctgaactaacggagtctgagcaaaacacagcatattcaaacacggcgagcagcaccgtagccaaggcgacaggaactcaggaagtgcggtgaattagatttgttagatataatcaagttgaatttgtatttagactctgatgggcctgtttgtttcagattatataattaggcttaaat

SEQ ID NO: 30438 - DNA, 1783 bp, Zea Mays
gcacgaatcttatcgtagtccactcgaagtcgcctcccatttcgcgggtcaccggctcgccgctgcgtcaagcgagcgcttccccccagatctcgacttctcgagcctgtcctccgccccccacaggctctgctggatccagaaccttctagaacccctgcactgcgcggctgccaaagaatcagtggccatgggatctgctatcctcaacagcattgcccccgaggagcctaaagtggtcgtgccagagtacggtgagacggctgatatccaggacaaggaagttagtatggaacagctctgctccataagcacctatgatcagtggacgccactctctgtttctggccagcttcccaaaccacgctataagcatggagctgtggtgattcagcagaagatgtatgtctttggtggaaaccacaatggccgttaccttggcgacattcaggttttggacttcaaaactttgtcatggtcaaagctggaagctaaatcacaagcagaaccatcagaatcagctggagcagttccgttttctgcatgtgctggccattcagtgattcaatggggaaataagatcctatgtcttgcaggacataccagagaacctgcagaaagtctcagtgttaaggagtttgatccacaaacctgcacttggtctaccttgcgtacttatggaaggtcacctgtatgattatgcttttctgtgttttattgccaaagcttctatagtatttatacaaattagcttgttacctgaagcttgcttttgtttttcgttgttttcccccaaatctgtgatgaattttcctatttcctttagagttcacgtggtggtcagtcagtgacccttgttggagacactctagtggtctttggcggtgaaggtcatgggagatctcttctgaatgatctgcacattcttgatcttgagaccatgacttgggatgaatttgagaccacaggcactcccccttccccaaggtcagagcatgctgctgcttgctttgcagagcggtatcttctgatatttggcgggggttctcattctacatgtttcagtgacctacacctccttgacactcagacaatggaatggtcaagaccaaagcaacaaggtgttactccagaatcaagagcaggacatgcaggtgtaactattggagaatattggtttattactggtggtggaaatagtaggaaaggtgtctcagatactcttgtactcaacctgtctacgtatgaatggtcagttctcactaatcttgaggcccgtgcaccccctgtaagtgagggctcaagtttagtaatgcacacaattaatggagaaaattttctggtgtcatttggaggatatagtggccgttatagtaatcaggcttatgctctcaaggcaagtctcaaaccaagtgtcccatctcaacaaataaatgaatcagatacaaatggcttttctcccttatctgtggcagaaaattctagcaggaaagtcatatttgaaattgaggaacttaaagatgaaaagcctggcaatagggcagataacagcaaaaccttgggacaagtagttatggttgaacaaaacgaaatagaaaacagacttaatcaagagcacttgcagagtctccgcctgaagcaggaactaactggtcttgagaacagaaatgcagaacttactgaggaactccacttagttcaagatcaactttctatcgaacaaaccagggcttccaaatttgagtggggagctgccgcagcaaggctaatagggaatcgtgct

SEQ ID NO: 30439 - DNA, 2296 bp, Zea Mays
gcacgaatcttatcgtagtccactcgaagtcgcctcccatttcgcgggtcaccggctcgccgctgcgtcaagcgagcgcttccccccagatctcgacttctcgagcctgtcctccgccccccacaggctctgctggatccagaaccttctagaacccctgcactgcgcggtgcgcgccatcctcctccttccttccatccagatctcgacacccctcgccggcccagacctccggtcctgtcgtggccccggggttcgggcggctgccaaagaatcagtggccatgggatctgctatcctcaacagcattgcccccgaggagcctaaagtggtcgtgccagagtacggtgagacggctgatatccaggacaaggaagttagtatggaacagctctgctccataagcacctatgatcagtggacgccactctctgtttctggccagcttcccaaaccacgctataagcatggagctgtggtgattcagcagaagatgtatgtctttggtggaaaccacaatggccgttaccttggcgacattcaggttttggacttcaaaactttgtcatggtcaaagctggaagctaaatcacaagcagaaccatcagaatcagctggagcagttccgttttctgcatgtgctggccattcagtgattcaatggggaaataagatcctatgtcttgcaggacataccagagaacctgcagaaagtctcagtggagtttgatccacaaacctgcacttggtctaccttgcgtacttatggaaggtcacctgtatgattatgcttttctgtgttttattgccaaagcttctatagtatttatacaaattagcttgttacctgaagcttgcttttgtttttcgttgttttcccccaaatctgtgatgaattttcctatttcctttagagttcacgtggtggtcagtcagtgacccttgttggagacactctagtggtctttggcggtgaaggtcatgggagatctcttctgaatgatctgcacattcttgatcttgagaccatgacttgggatgaatttgagaccacaggcactcccccttccccaaggtcagagcatgctgctgcttgctttgcagagcggtatcttctgatatttggcgggggttctcattctacatgtttcagtgacctacacctccttgacactcagacaatggaatggtcaagaccaaagcaacaaggtgttactccagaatcaagagcaggacatgcaggtgtaactattggagaatattggtttattactggtggtggaaatagtaggaaaggtgtctcagatactcttgtactcaacctgtctacgtatgaatggtcagttctcactaatcttgaggcccgtgcaccccctgtaagtgagggctcaagtttagtaatgcacacaattaatggagaaaattttctggtgtcatttggaggatatagtggccgttatagtaatcaggcttatgctctcaaggcaagtctcaaaccaagtgtcccatctcaacaaataaatgaatcagatacaaatggcttttctcccttatctgtggcagaaaattctagcaggaaagtcatatttgaaattgaggaacttaaagatgaaaagcctggcaatagggcagataacagcaaaaccttgggacaagtagttatggttgaacaaaacgaaatagaaaacagacttaatcaagagcacttgcagagtctccgcctgaagcaggaactaactggtcttgagaacagaaatgcagaacttactgaggaactccacttagttcaagatcaactttctatcgaacaaaccagggcttccaaatttgagaatgaaatttcagatattcaacaacgactacagaagatggataccctagaaaaggagattgaatcacttcgctatgaactggacagcactgtatccgaagaagaatcttcaagtggcaacgagttgcaccgcagtcggggcttttggaggtggaatgggtgaactcctcgagactcaaggagtgagtattgaagagaatactcttccaaatagttgtcattattttaatttttatgtctttcacaaaaatatatgaattcgtggatggtactagttcggaagcatatagaggatctaagcaaactgcagcaacatcaactgtgaaaagcatcttacagaaagtaaaacgagtatcatgtggcccagaatttcctatgttagaatagtttcttatctgataatgacaccgacaatgatcaccataacgaattattttttttcatacatatgtggtgggatattaa

SEQ ID NO: 30440 - DNA, 2066 bp, Zea Mays
gcacgaatcttatcgtagtccactcgaagtcgcctcccatttcgcgggtcaccggctcgccgctgcgtcaagcgagcgcttccccccagatctcgacttctcgagcctgtcctccgccccccacaggctctgctggatccagaaccttctagaacccctgcactgcgcggtgcgcgccatcctcctccttccttccatccagatctcgacacccctcgccggcccagacctccggtcctgtcgtggccccggggttcgggcggctgccaaagaatcagtggccatgggatctgctatcctcaacagcattgcccccgaggagcctaaagtggtcgtgccagagtacggtgagacggctgatatccaggacaaggaagttagtatggaacagctctgctccataagcacctatgatcagtggacgccactctctgtttctggccagcttcccaaaccacgctataagcatggagctgtggtgattcagcagaagatgtatgtctttggtggaaaccacaatggccgttaccttggcgacattcaggttttggacttcaaaactttgtcatggtcaaagctggaagctaaatcacaagcagaaccatcagaatcagctggagcagttccgttttctgcatgtgctggccattcagtgattcaatggggaaataagatcctatgtcttgcaggacataccagagaacctgcagaaagtctcagtgttaaggagtttgatccacaaacctgcacttggtctaccttgcgtacttatggaagagttcacgtggtggtcagtcagtgacccttgttggagacactctagtggtctttggcggtgaaggtcatgggagatctcttctgaatgatctgcacattcttgatcttgagaccatgacttgggatgaatttgagaccacaggcactcccccttccccaaggtcagagcatgctgctgcttgctttgcagagcggtatcttctgatatttggcgggggttctcattctacatgtttcagtgacctacacctccttgacactcagacaatggaatggtcaagaccaaagcaacaaggtgttactccagaatcaagagcaggacatgcaggtgtaactattggagaatattggtttattactggtggtggaaatagtaggaaaggtgtctcagatactcttgtactcaacctgtctacgtatgaatggtcagttctcactaatcttgaggcccgtgcaccccctgtaagtgagggctcaagtttagtaatgcacacaattaatggagaaaattttctggtgtcatttggaggatatagtggccgttatagtaatcaggcttatgctctcaaggcaagtctcaaaccaagtgtcccatctcaacaaataaatgaatcagatacaaatggcttttctcccttatctgtggcagaaaattctagcaggaaagtcatatttgaaattgaggaacttaaagatgaaaagcctggcaatagggcagataacagcaaaaccttgggacaagtagttatggttgaacaaaacgaaatagaaaacagacttaatcaagagcacttgcagagtctccgcctgaagcaggaactaactggtcttgagaacagaaatgcagaacttactgaggaactccacttagttcaagatcaactttctatcgaacaaaccagggcttccaaatttgagaatgaaatttcagatattcaacaacgactacagaagatggataccctagaaaaggagattgaatcacttcgctatgaactggacagcactgtatccgaagaagaatcttcaagtggcaacgagttgcaccgcagtcggggcttttggaggtggaatgggtgaactcctcgagactcaaggattcggaagcatatagaggatctaagcaaactgcagcaacatcaactgtgaaaagcatcttacagaaagtaaaacgagtatcatgtggcccagaatttcctatgttagaatagtttcttatctgataatgacaccgacaatgatcaccataacgaattattttttttcatacatatgtggtgggatattaa

SEQ ID NO: 30441 - DNA, 2205 bp, Zea Mays
gcacgaatcttatcgtagtccactcgaagtcgcctcccatttcgcgggtcaccggctcgccgctgcgtcaagcgagcgcttccccccagatctcgacttctcgagcctgtcctccgccccccacaggctctgctggatccagaaccttctagaacccctgcactgcgcggtgcgcgccatcctcctccttccttccatccagatctcgacacccctcgccggcccagacctccggtcctgtcgtggccccggggttcgggcggctgccaaagaatcagtggccatgggatctgctatcctcaacagcattgcccccgaggagcctaaagtggtcgtgccagagtacggtgagacggctgatatccaggacaaggaagttagtatggaacagctctgctccataagcacctatgatcagtggacgccactctctgtttctggccagcttcccaaaccacgctataagcatggagctgtggtgattcagcagaagatgtatgtctttggtggaaaccacaatggccgttaccttggcgacattcaggttttggacttcaaaactttgtcatggtcaaagctggaagctaaatcacaagcagaaccatcagaatcagctggagcagttccgttttctgcatgtgctggccattcagtgattcaatggggaaataagatcctatgtcttgcaggacataccagagaacctgcagaaagtctcagtgttaaggagtttgatccacaaacctgcacttggtctaccttgcgtacttatggaaggtcacctgtatgattatgcttttctgtgttttattgccaaagcttctatagtatttatacaaattagcttgttacctgaagcttgcttttgtttttcgttgttttcccccaaatctgtgatgaattttcctatttcctttagagttcacgtggtggtcagtcagtgacccttgttggagacactctagtggtctttggcggtgaaggtcatgggagatctcttctgaatgatctgcacattcttgatcttgagaccatgacttgggatgaatttgagaccacaggcactcccccttccccaaggtcagagcatgctgctgcttgctttgcagagcggtatcttctgatatttggcgggggttctcattctacatgtttcagtgacctacacctccttgacactcagacaatggaatggtcaagaccaaagcaacaaggtgttactccagaatcaagagcaggacatgcaggtgtaactattggagaatattggtttattactggtggtggaaatagtaggaaaggtgtctcagatactcttgtactcaacctgtctacgtatgaatggtcagttctcactaatcttgaggcccgtgcaccccctgtaagtgagggctcaagtttagtaatgcacacaattaatggagaaaattttctggtgtcatttggaggatatagtggccgttatagtaatcaggcttatgctctcaaggcaagtctcaaaccaagtgtcccatctcaacaaataaatgaatcagatacaaatggcttttctcccttatctgtggcagaaaattctagcaggaaagtcatatttgaaattgaggaacttaaagatgaaaagagtctccgcctgaagcaggaactaactggtcttgagaacagaaatgcagaacttactgaggaactccacttagttcaagatcaactttctatcgaacaaaccagggcttccaaatttgagaatgaaatttcagatattcaacaacgactacagaagatggataccctagaaaaggagattgaatcacttcgctatgaactggacagcactgtatccgaagaagaatcttcaagtggcaacgagttgcaccgcagtcggggcttttggaggtggaatgggtgaactcctcgagactcaaggagtgagtattgaagagaatactcttccaaatagttgtcattattttaatttttatgtctttcacaaaaatatatgaattcgtggatggtactagttcggaagcatatagaggatctaagcaaactgcagcaacatcaactgtgaaaagcatcttacagaaagtaaaacgagtatcatgtggcccagaatttcctatgttagaatagtttcttatctgataatgacaccgacaatgatcaccataacgaattattttttttcatacatatgtggtgggatattaa

SEQ ID NO: 30442 - DNA, 2136 bp, Zea Mays
gcacgaatcttatcgtagtccactcgaagtcgcctcccatttcgcgggtcaccggctcgccgctgcgtcaagcgagcgcttccccccagatctcgacttctcgagcctgtcctccgccccccacaggctctgctggatccagaaccttctagaacccctgcactgcgcggtgcgcgccatcctcctccttccttccatccagatctcgacacccctcgccggcccagacctccggtcctgtcgtggccccggggttcgggcggctgccaaagaatcagtggccatgggatctgctatcctcaacagcattgcccccgaggagcctaaagtggtcgtgccagagtacggtgagacggctgatatccaggacaaggaagttagtatggaacagctctgctccataagcacctatgatcagtggacgccactctctgtttctggccagcttcccaaaccacgctataagcatggagctgtggtgattcagcagaagatgtatgtctttggtggaaaccacaatggccgttaccttggcgacattcaggttttggacttcaaaactttgtcatggtcaaagctggaagctaaatcacaagcagaaccatcagaatcagctggagcagttccgttttctgcatgtgctggccattcagtgattcaatggggaaataagatcctatgtcttgcaggacataccagagaacctgcagaaagtctcagtgttaaggagtttgatccacaaacctgcacttggtctaccttgcgtacttatggaaggtcacctgtatgattatgcttttctgtgttttattgccaaagcttctatagtatttatacaaattagcttgttacctgaagcttgcttttgtttttcgttgttttcccccaaatctgtgatgaattttcctatttcctttagagttcacgtggtggtcagtcagtgacccttgttggagacactctagtggtctttggcggtgaaggtcatgggagatctcttctgaatgatctgcacattcttgatcttgagaccatgacttgggatgaatttgagaccacaggcactcccccttccccaaggtcagagcatgctgctgcttgctttgcagagcggtatcttctgatatttggcgggggttctcattctacatgtttcagtgacctacacctccttgacactcagacaatggaatggtcaagaccaaagcaacaaggtgttactccagaatcaagagcaggacatgcaggtgtaactattggagaatattggtttattactggtggtggaaatagtaggaaaggtgtctcagatactcttgtactcaacctgtctacgtatgaatggtcagttctcactaatcttgaggcccgtgcaccccctggctcaagtttagtaatgcacacaattaatggagaaaattttctggtgtcatttggaggatatagtggccgttatagtaatcaggcttatgctctcaaggcaagtctcaaaccaagtgtcccatctcaacaaataaatgaatcagatacaaatggcttttctcccttatctgtggcagaaaattctagcaggaaagtcatatttgaaattgaggaacttaaagatgaaaaggaactccacttagttcaagatcaactttctatcgaacaaaccagggcttccaaatttgagaatgaaatttcagatattcaacaacgactacagaagatggataccctagaaaaggagattgaatcacttcgctatgaactggacagcactgtatccgaagaagaatcttcaagtggcaacgagttgcaccgcagtcggggcttttggaggtggaatgggtgaactcctcgagactcaaggagtgagtattgaagagaatactcttccaaatagttgtcattattttaatttttatgtctttcacaaaaatatatgaattcgtggatggtactagttcggaagcatatagaggatctaagcaaactgcagcaacatcaactgtgaaaagcatcttacagaaagtaaaacgagtatcatgtggcccagaatttcctatgttagaatagtttcttatctgataatgacaccgacaatgatcaccataacgaattattttttttcatacatatgtggtgggatattaa

SEQ ID NO: 30443 - DNA, 1910 bp, Zea Mays
gcacgaatcttatcgtagtccactcgaagtcgcctcccatttcgcgggtcaccggctcgccgctgcgtcaagcgagcgcttccccccagatctcgacttctcgagcctgtcctccgccccccacaggctctgctggatccagaaccttctagaacccctgcactgcgcggctgccaaagaatcagtggccatgggatctgctatcctcaacagcattgcccccgaggagcctaaagtggtcgtgccagagtacggtgagacggctgatatccaggacaaggaagttagtatggaacagctctgctccataagcacctatgatcagtggacgccactctctgtttctggccagcttcccaaaccacgctataagcatggagctgtggtgattcagcagaagatgtatgtctttggtggaaaccacaatggccgttaccttggcgacattcaggttttggacttcaaaactttgtcatggtcaaagctggaagctaaatcacaagcagaaccatcagaatcagctggagcagttccgttttctgcatgtgctggccattcagtgattcaatggggaaataagatcctatgtcttgcaggacataccagagaacctgcagaaagtctcagtgttaaggagtttgatccacaaacctgcacttggtctaccttgcgtacttatggaagagttcacgtggtggtcagtcagtgacccttgttggagacactctagtggtctttggcggtgaaggtcatgggagatctcttctgaatgatctgcacattcttgatcttgagaccatgacttgggatgaatttgagaccacaggcactcccccttccccaaggtcagagcatgctgctgcttgctttgcagagcggtatcttctgatatttggcgggggttctcattctacatgtttcagtgacctacacctccttgacactcagacaatggaatggtcaagaccaaagcaacaaggtgttactccagaatcaagagcaggacatgcaggtgtaactattggagaatattggtttattactggtggtggaaatagtaggaaaggtgtctcagatactcttgtactcaacctgtctacgtatgaatggtcagttctcactaatcttgaggcccgtgcaccccctgtaagtgagggctcaagtttagtaatgcacacaattaatggagaaaattttctggtgtcatttggaggatatagtggccgttatagtaatcaggcttatgctctcaaggcaagtctcaaaccaagtgtcccatctcaacaaataaatgaatcagatacaaatggcttttctcccttatctgtggcagaaaattctagcaggaaagtcatatttgaaattgaggaacttaaagatgaaaaggaactccacttagttcaagatcaactttctatcgaacaaaccagggcttccaaatttgagaatgaaatttcagatattcaacaacgactacagaagatggataccctagaaaaggagattgaatcacttcgctatgaactggacagcactgtatccgaagaagaatcttcaagtggcaacgagttgcaccgcagtcggggcttttggaggtggaatgggtgaactcctcgagactcaaggagtgagtattgaagagaatactcttccaaatagttgtcattattttaatttttatgtctttcacaaaaatatatgaattcgtggatggtactagttcggaagcatatagaggatctaagcaaactgcagcaacatcaactgtgaaaagcatcttacagaaagtaaaacgagtatcatgtggcccagaatttcctatgttagaatagtttcttatctgataatgacaccgacaatgatcaccataacgaattattttttttcatacatatgtggtgggatattaa

SEQ ID NO: 30444 - DNA, 1828 bp, Zea Mays
gcacgaatcttatcgtagtccactcgaagtcgcctcccatttcgcgggtcaccggctcgccgctgcgtcaagcgagcgcttccccccagatctcgacttctcgagcctgtcctccgccccccacaggctctgctggatccagaaccttctagaacccctgcactgcgcggtgcgcgccatcctcctccttccttccatccagatctcgacacccctcgccggcccagacctccggtcctgtcgtggccccggggttcgggcggctgccaaagaatcagtggccatgggatctgctatcctcaacagcattgcccccgaggagcctaaagtggtcgtgccagagtacggtgagacggctgatatccaggacaaggaagttagtatggaacagctctgctccataagcacctatgatcagtggacgccactctctgtttctggccagcttcccaaaccacgctataagcatggagctgtggtgattcagcagaagatgtatgtctttggtggaaaccacaatggccgttaccttggcgacattcaggttttggacttcaaaactttgtcatggtcaaagctggaagctaaatcacaagcagaaccatcagaatcagctggagcagttccgttttctgcatgtgctggccattcagtgattcaatggggaaataagatcctatgtcttgcaggacataccagagaacctgcagaaagtctcagtgttaaggagtttgatccacaaacctgcacttggtctaccttgcgtacttatggaaggtcacctagttcacgtggtggtcagtcagtgacccttgttggagacactctagtggtctttggcggtgaaggtcatgggagatctcttctgaatgatctgcacattcttgatcttgagaccatgacttgggatgaatttgagaccacaggcactcccccttccccaaggtcagagcatgctgctgcttgctttgcagagcggtatcttctgatatttggcgggggttctcattctacatgtttcagtgacctacacctccttgacactcagacagtaagaatattttttgctctaaaactgctatgtaatccttttgggagtccaaatgaatcacttggtcgttacagatggaatggtcaagaccaaagcaacaaggtgttactccagaatcaagagcaggacatgcaggtgtaactattggagaatattggtttattactggtggtggaaatagtaggaaaggtgtctcagatactcttgtactcaacctgtctacgtatgaatggtcagttctcactaatcttgaggcccgtgcaccccctgtaagtgagggctcaagtttagtaatgcacacaattaatggagaaaattttctggtgtcatttggaggatatagtggccgttatagtaatcaggcttatgctctcaaggcaagtctcaaaccaagtgtcccatctcaacaaataaatgaatcagatacaaatggcttttctcccttatctgtggcagaaaattctagcaggaaagtcatatttgaaattgaggaacttaaagatgaaaaggaactccacttagttcaagatcaactttctatcgaacaaaccagggcttccaaatttgagaatgaaatttcagatattcaacaacgactacagaagatggataccctagaaaaggagattgaatcacttcgctatgaactggacagcactgtatccgaagaagaatcttcaagtggcaacgagttgcaccgcagtcggggcttttggaggtggaatgggtgaactcctcgagactcaaggagacggaaggagtaaattgttaatctcg

SEQ ID NO: 30445 - DNA, 3298 bp, Zea Mays
tcgcagtgcatgttcacgtatctcatttgcttgaatctcggatgctcaactacaactttggctggtcgaatgcccatctacgactttggagccaagccaagctagcctgcccctagtccccttacccctgcggccctgcccctgcccccgctcccgattccgccgccgcatccgacccaacccgctgcgatcccctccgccgtggcgtcggcgactccctctcccgcgacgccctttcatcgctgcagttgatacgccacccgagcggttccttccctcctctcttcctccccttgtcgctctccgcatcgccgcaggccgtagggcgccaccgcgtcagaaggcgcgatccatggaccggtcgatcaacttccgcggcatcgccgggagcgccggcaacatcatgcagggaatggggaaattcgttttcggcaacgagggactcgactcaaaggaagatagctatgttgagagataccttgaccggataagcaatggcaccatacctgatgaccggagatctgccatgactgagctgcagtctctcgtggccgaaagtcgcttagcacagatgtcgtttggagcgatgggttttcctatcctcctcaatatttttaaagaagaccgcgaggatgtagagcttgtgagaggtgcactggagacctttgtgagcgcattgactcctattgagatgtcacaagggccaaagactgaggttcaaccagcatcagtgaattctgatctgctgtctcgagaaacggagaatatttctcttcttctgagcttattgtcagaggaagacttttatgtgagatactacacaatccaacttctaacagctctacttacaaactcgctgaaaaggttacaggaagcaattctattgattccccgtggtataacagttctaatggacatgcttatggatcgtgaggtcataaggaatgaagcactgttacttcttacttatttgactcgggatgcagaggaaattcaaaaaattgttgtatttgagggtgtgtttgagaagatatttagcattatcagagaggagggctattctgacggaggtgtagttgttcaggattgccttgaattgttaaataatttaattcgacacaacgcgtcaaatcagatgcttttgaaagagacaatgggctttgacccattgatatcaatactaaagattaggagaggcagtgcatttaattttacccaacagaagacagtaaatctcctcgctgctttaaatactgtggaattgcttttgatggtgggcccatccggtgaagcaggtaaagatgctaacaagaatgcaaatcaaactgcattggctcagaaaaacattctggaccatcttcttttgttgggtgttgagagtcagtgggcccctgtcgctctccgctgtatggcactgcgttgtattggcaatttggtgttaaggaatcctcagaatcttgattctcttgcaagaaagcaagttggagaagagcctcatgttcaacctgcactgaatgccatcttatctataatcttacggacatctatagcgcaggaatttgttgctgctgattatgtattcaagtgtttctgcgagagaaatcctaatggccaggcattattagcatcaactattgctccacatccaaaccaaggagatattcatgaacctgctagtgacatgccttttggaagtgtacttctgcaagctctggtttctagtgatgtcaatggagatatggaggcatgctgcagagcatctagcgttctttctcacattatcaaggacaacttgcaaagcaaggatcgtgtattgcaaattcagcttgagacatctacagcatccttggggcgtactgagccggtattgcatcgtattgttacatgtttgtccatcgcagcttcaatggagggagaaaatgaccaaaacaaccaactagaggaaccgtacattcaaccttttattcttcggctactcatcatatggcttgttgattgttcaaatgctgtcaactgccttttggaatcagcggtgcatctgaacttcataatagagcttgcttcgaataaacgttacgccgcttgtgtccgtggattggctgctgttgttctaggtgcttgcatcctgtacaatgctagccgtgagaagggtcgtgatgcctttgccgtggcagatgctataagtcaaaagattggcctcacaacatacttcttgaggtttgatgaactgaggaaaagcttggcacatccgttgtcagagcagcatcaccgcaaggagctttcccgatcaagtgcgaatagcatgtcagatttccaagagattgaagaggatgaaacaaataagggcgatcaacaccctgtgctttcagaaatatttgattcacagtttgttaatttacttactaagcttgaggctgatattagagaaaacataatggatatatttagtcggacaaaaactgcaacagcagtccttcctactgaattggagcagaagaacggggaggtcgatgaagagtatatcaagcgactaaagtcatttgtagaaaaacagtgcaatgagatgcaggacttgctggcacggaatgcaatgttagcagaagagttactgagaactggtggtggtacgaccacagatacttcacagaaaccgagcagtggccgagaaagggtccagattgaagctctcagacaagaactggagggggcaaaacgacagataggggcactcaaaagtgagaagtcccagattgaagctgaagctaacaaccaaagaaacctttcagtaaaactggagtctgatctcaagagcttgtcagaagcttacaacagcatagagcaggccaactaccgcttggatgccgaggagcaaacgaaggtcgagaagctgagcacaaggctggcagagctcggggaagatgtggatacccttctgcagggtattggcgatgacactgccattccggatgatgacgatgaagatgatgaagagtgattggtttatgtaacctgcaggtctgctggtgtaatctaccttcatgttgggtcatgatattgcgatggtaactggaaaatgtacagtggatgacaaatgcaccgttccaagtttaagttatttctagagaatgtgactaaatagcctcttgttaaatttgattgtctgaataactttttatattacctttgataaatagccccttgttgaatgggcctcagattcatcatcatatatactaaaaagaacgggtctgatctggtgtggaactcggcaacgtccgtagcccctagagtgctgctg

SEQ ID NO: 30446 - DNA, 867 bp, Zea Mays
gccaagccaagctagcctgcccctagtccccttacccctgcggccctgcccctgcccccgctcccgattccgccgccgcatccgacccaacccgctgcgatcccctccgccgtggcgtcggcgactccctctcccgcgacgccctttcatcgctgcagttgatacgccacccgagcggttccttccctcctctcttcctccccttgtcgctctccgcatcgccgcaggccgtagggcgccaccgcgtcagaaggcgcgatccatggaccggtcgatcaacttccgcggcatcgccgggagcgccggcaacatcatgcagggaatggggaaattcgttttcggcaacgagggactcgactcaaaggaagatagctatgttgagagataccttgaccggataagcaatggcaccatacctgatgaccggagatctgccatgactgagctgcagtctctcgtggccgaaagtcgcttagcacagatgtcgtttggagcgatgggttttcctatcctcctcaatatttttaaagaagaccgcgaggatgtagagcttgtgagaggtgcactggagacctttgtgagcgcattgactcctattgagatgtcacaagggccaaagactgaggttcaaccagcatcagtgaattctgatctgctgtctcgagaaacggagaatatttctcttcttctgagcttattgaggaagacttttatgtgagatactacacaatccaacttctaacagctctacttacaaactcgctgaaaaggttacaggaagcaattctattgattccccgtggtataacagttctaatggacatgcttatggatcgtgaggtctcaacattctctgcttattttctc

SEQ ID NO: 30447 - DNA, 3019 bp, Zea Mays
aagccaagctagcctgcccctagtccccttacccctgcggccctgcccctgcccccgctcccgattccgccgccgcatccgacccaacccgctgcgatcccctccgccgtggcgtcggcgactccctctcccgcgacgccctttcatcgctgcagttgatacgccacccgagcggttccttccctcctctcttcctccccttgtcgctctccgcatcgccgcaggccgtagggcgccaccgcgtcagaaggcgcgatccatggaccggtcgatcaacttccgcggcatcgccgggagcgccggcaacatcatgcagggaatggggaaattcgttttcggcaacgagggactcgactcaaaggaagatagctatgttgagagataccttgaccggataagcaatggcaccatacctgatgaccggagatctgccatgactgagctgcagtctctcgtggccgaaagtcgcttagcacagatgtcgtttggagcgatgggttttcctatcctcctcaatatttttaaagaagaccgcgaggatgtagagcttgtgagaggtgcactggagacctttgtgagcgcattgactcctattgagatgtcacaagggccaaagactgaggttcaaccagcatcagtgaattctgatctgctgtctcgagaaacggagaatatttctcttcttctgagcttattgtcagaggaagacttttatgtgagatactacacaatccaacttctaacagctctacttacaaactcgctgaaaaggttacaggaagcaattctattgattccccgtggtataacagttctaatggacatgcttatggatcgtgaggtcataaggaatgaagcactgttacttcttacttatttgactcgggatgcagaggaaattcaaaaaattgttgtatttgagggtgtgtttgagaagatatttagcattatcagagaggagggctattctgacggaggtgtagttgttcaggattgccttgaattgttaaataatttaattcgacacaacgcgtcaaatcagatgcttttgaaagagacaatgggctttgacccattgatatcaatactaaagattaggagaggcagtgcatttaattttacccaacagaagacagtaaatctcctcgctgctttaaatactgtggaattgcttttgatggtgggcccatccggtgaagcaggtaaagatgctaacaagaatgcaaatcaaactgcattggctcagaaaaacattctggaccatcttcttttgttgggtgttgagagtcagtgggcccctgtcgctctccgctgtatgagaaatcctaatggccaggcattattagcatcaactattgctccacatccaaaccaaggagatattcatgaacctgctagtgacatgccttttggaagtgtacttctgcaagctctggtttctagtgatgtcaatggagatatggaggcatgctgcagagcatctagcgttctttctcacattatcaaggacaacttgcaaagcaaggatcgtgtattgcaaattcagcttgagacatctacagcatccttggggcgtactgagccggtattgcatcgtattgttacatgtttgtccatcgcagcttcaatggagggagaaaatgaccaaaacaaccaactagaggaaccgtacattcaaccttttattcttcggctactcatcatatggcttgttgattgttcaaatgctgtcaactgccttttggaatcagcggtgcatctgaacttcataatagagcttgcttcgaataaacgttacgccgcttgtgtccgtggattggctgctgttgttctaggtgcttgcatcctgtacaatgctagccgtgagaagggtcgtgatgcctttgccgtggcagatgctataagtcaaaagattggcctcacaacatacttcttgaggtttgatgaactgaggaaaagcttggcacatccgttgtcagagcagcatcaccgcaaggagctttcccgatcaagtgcgaatagcatgtcagatttccaagagattgaagaggatgaaacaaataagggcgatcaacaccctgtgctttcagaaatatttgattcacagtttgttaatttacttactaagcttgaggctgatattagagaaaacataatggatatatttagtcggacaaaaactgcaacagcagtccttcctactgaattggagcagaagaacggggaggtcgatgaagagtatatcaagcgactaaagtcatttgtagaaaaacagtgcaatgagatgcaggacttgctggcacggaatgcaatgttagcagaagagttactgagaactggtggtggtacgaccacagatacttcacagaaaccgagcagtggccgagaaagggtccagattgaagctctcagacaagaactggagggggcaaaacgacagataggggcactcaaaagtgagaagtcccagattgaagctgaagctaacaaccaaagaaacctttcagtaaaactggagtctgatctcaagagcttgtcagaagcttacaacagcatagagcaggccaactaccgcttggatgccgaggagcaaacgaaggtcgagaagctgagcacaaggctggcagagctcggggaagatgtggatacccttctgcagggtattggcgatgacactgccattccggatgatgacgatgaagatgatgaagagtgattggtttatgtaacctgcaggtctgctggtgtaatctaccttcatgttgggtcatgatattgcgatggtaactggaaaatgtacagtggatgacaaatgcaccgttccaagtttaagttatttctagagaatgtgactaaatagcctcttgttaaatttgattgtctgaataactttttatattacctttgataaatagccccttgttgaatgggcctcagattcatcatcatatatactaaaaagaacgggtctgatctggtgtggaactcggcaacgtccgtagcccctagagtgctgctg

SEQ ID NO: 30448 - DNA, 3301 bp, Zea Mays
gccaagctagcctgcccctagtccccttacccctgcggccctgcccctgcccccgctcccgattccgccgccgcatccgacccaacccgctgcgatcccctccgccgtggcgtcggcgactccctctcccgcgacgccctttcatcgctgcagttgatacgccacccgagcggttccttccctcctctcttcctccccttgtcgctctccgcatcgccgcaggccgtagggcgccaccgcgtcagaaggcgcgatccatggaccggtcgatcaacttccgcggcatcgccgggagcgccggcaacatcatgcagggaatggggaaattcgttttcggcaacgagggactcgactcaaaggaagatagctatgttgagagataccttgaccggataagcaatggcaccatacctgatgaccggagatctgccatgactgagctgcagtctctcgtggccgaaagtcgcttagcacagatgtcgtttggagcgatgggttttcctatcctcctcaatatttttaaagaagaccgcgaggatgtagagcttgtgagaggtgcactggagacctttgtgagcgcattgactcctattgagatgtcacaagggccaaagactgaggttcaaccagcatcagtgaattctgatctgctgtctcgagaaacggagaatatttctcttcttctgagcttattgtcagaggaagacttttatgtgagatactacacaatccaacttctaacagctctacttacaaactcgctgaaaaggttacaggaagcaattctattgattccccgtggtataacagttctaatggacatgcttatggatcgtgagttcttgttcatatatggccgtggcggttggcgtgccgccctcttcatcatcgggacagtgtaaatataagaaggacgatacatcagcacctaaaggaggtcataaggaatgaagcactgttacttcttacttatttgactcgggatgcagaggaaattcaaaaaattgttgtatttgagggtgtgtttgagaagatatttagcattatcagagaggagggctattctgacggaggtgtagttgttcaggattgccttgaattgttaaataatttaattcgacacaacgcgtcaaatcagatgcttttgaaagagacaatgggctttgacccattgatatcaatactaaagattaggagaggcagtgcatttaattttacccaacagaagacagtaaatctcctcgctgctttaaatactgtggaattgcttttgatggtgggcccatccggtgaagcaggtaaagatgctaacaagaatgcaaatcaaactgcattggctcagaaaaacattctggaccatcttcttttgttgggtgttgagagtcagtgggcccctgtcgctctccgctgtatggcactgcgttgtattggcaatttggtgttaaggaatcctcagaatcttgattctcttgcaagaaagcaagttggagaagagcctcatgttcaacctgcactgaatgccatcttatctataatcttacggacatctatagcgcaggaatttgttgctgctgattatgtattcaagtgtttctgcgagagaaatcctaatggccaggcattattagcatcaactattgctccacatccaaaccaaggagatattcatgaacctgctagtgacatgccttttggaagtgtacttctgcaagctctggtttctagtgatgtcaatggagatatggaggcatgctgcagagcatctagcgttctttctcacattatcaaggacaacttgcaaagcaaggatcgtgtattgcaaattcagcttgagacatctacagcatccttggggcgtactgagccggtattgcatcgtattgttacatgtttgtccatcgcagcttcaatggagggagaaaatgaccaaaacaaccaactagaggaaccgtacattcaaccttttattcttcggctactcatcatatggcttgttgattgttcaaatgctgtcaactgccttttggaatcagcggtgcatctgaacttcataatagagcttgcttcgaataaacgttacgccgcttgtgtccgtggattggctgctgttgttctaggtgcttgcatcctgtacaatgctagccgtgagaagggtcgtgatgcctttgccgtggcagatgctataagtcaaaagattggcctcacaacatacttcttgaggtttgatgaactgaggaaaagcttggcacatccgttgtcagagcagcatcaccgcaaggagctttcccgatcaagtgcgaatagcatgtcagatttccaagagattgaagaggatgaaacaaataagggcgatcaacaccctgtgctttcagaaatatttgattcacagtttgttaatttacttactaagcttgaggctgatattagagaaaacataatggatatatttagtcggacaaaaactgcaacagcagtccttcctactgaattggagcagaagaacggggaggtcgatgaagagtatatcaagcgactaaagtcatttgtagaaaaacagtgcaatgagatgcaggacttgctggcacggaatgcaatgttagcagaagagttactgagaactggtggtggtacgaccacagatacttcacagaaaccgagcagtggccgagaaagggtccagattgaagctctcagacaagaactggagggggcaaaacgacagataggggcactcaaaagtgagaagtcccagattgaagctgaagctaacaaccaaagaaacctttcagtaaaactggagtctgatctcaagagcttgtcagaagcttacaacagcatagagcaggccaactaccgcttggatgccgaggagcaaacgaaggtcgagaagctgagcacaaggctggcagagctcggggaagatgtggatacccttctgcagggtattggcgatgacactgccattccggatgatgacgatgaagatgatgaagagtgattggtttatgtaacctgcaggtctgctggtgtaatctaccttcatgttgggtcatgatattgcgatggtaactggaaaatgtacagtggatgacaaatgcaccgttccaagtttaagttatttctagagaatgtgactaaatagcctcttgttaaatttgattgtctgaataactttttatattacctttgataaatagccccttgttgaatgggcctcagattcatcatcatatatactaaaaagaacgggtctgatctggtgtggaactcggcaacgtccgtagcccctagagtgctgctg

SEQ ID NO: 30449 - DNA, 3277 bp, Zea Mays
gccaagctagcctgcccctagtccccttacccctgcggccctgcccctgcccccgctcccgattccgccgccgcatccgacccaacccgctgcgatcccctccgccgtggcgtcggcgactccctctcccgcgacgccctttcatcgctgcagttgatacgccacccgagcggttccttccctcctctcttcctccccttgtcgctctccgcatcgccgcaggccgtagggcgccaccgcgtcagaaggcgcgatccatggaccggtcgatcaacttccgcggcatcgccgggagcgccggcaacatcatgcagggaatggggaaattcgttttcggcaacgagggactcgactcaaaggaagatagctatgttgagagataccttgaccggataagcaatggcaccatacctgatgaccggagatctgccatgactgagctgcagtctctcgtggccgaaagtcgcttagcacagatgtcgtttggagcgatgggttttcctatcctcctcaatatttttaaagaagaccgcgaggatgtagagcttgtgagaggtgcactggagacctttgtgagcgcattgactcctattgagatgtcacaagggccaaagactgaggttcaaccagcatcagtgaattctgatctgctgtctcgagaaacggagaatatttctcttcttctgagcttattgtcagaggaagacttttatgtgagatactacacaatccaacttctaacagctctacttacaaactcgctgaaaaggttacaggaagcaattctattgattccccgtggtataacagttctaatggacatgcttatggatcgtgagggctgttatgaattggatccaggctcaactccacaggagcttcttcatgtagtttcaccatcaggcgatgctaagtcataaggaatgaagcactgttacttcttacttatttgactcgggatgcagaggaaattcaaaaaattgttgtatttgagggtgtgtttgagaagatatttagcattatcagagaggagggctattctgacggaggtgtagttgttcaggattgccttgaattgttaaataatttaattcgacacaacgcgtcaaatcagatgcttttgaaagagacaatgggctttgacccattgatatcaatactaaagattaggagaggcagtgcatttaattttacccaacagaagacagtaaatctcctcgctgctttaaatactgtggaattgcttttgatggtgggcccatccggtgaagcaggtaaagatgctaacaagaatgcaaatcaaactgcattggctcagaaaaacattctggaccatcttcttttgttgggtgttgagagtcagtgggcccctgtcgctctccgctgtatggcactgcgttgtattggcaatttggtgttaaggaatcctcagaatcttgattctcttgcaagaaagcaagttggagaagagcctcatgttcaacctgcactgaatgccatcttatctataatcttacggacatctatagcgcaggaatttgttgctgctgattatgtattcaagtgtttctgcgagagaaatcctaatggccaggcattattagcatcaactattgctccacatccaaaccaaggagatattcatgaacctgctagtgacatgccttttggaagtgtacttctgcaagctctggtttctagtgatgtcaatggagatatggaggcatgctgcagagcatctagcgttctttctcacattatcaaggacaacttgcaaagcaaggatcgtgtattgcaaattcagcttgagacatctacagcatccttggggcgtactgagccggtattgcatcgtattgttacatgtttgtccatcgcagcttcaatggagggagaaaatgaccaaaacaaccaactagaggaaccgtacattcaaccttttattcttcggctactcatcatatggcttgttgattgttcaaatgctgtcaactgccttttggaatcagcggtgcatctgaacttcataatagagcttgcttcgaataaacgttacgccgcttgtgtccgtggattggctgctgttgttctaggtgcttgcatcctgtacaatgctagccgtgagaagggtcgtgatgcctttgccgtggcagatgctataagtcaaaagattggcctcacaacatacttcttgaggtttgatgaactgaggaaaagcttggcacatccgttgtcagagcagcatcaccgcaaggagctttcccgatcaagtgcgaatagcatgtcagatttccaagagattgaagaggatgaaacaaataagggcgatcaacaccctgtgctttcagaaatatttgattcacagtttgttaatttacttactaagcttgaggctgatattagagaaaacataatggatatatttagtcggacaaaaactgcaacagcagtccttcctactgaattggagcagaagaacggggaggtcgatgaagagtatatcaagcgactaaagtcatttgtagaaaaacagtgcaatgagatgcaggacttgctggcacggaatgcaatgttagcagaagagttactgagaactggtggtggtacgaccacagatacttcacagaaaccgagcagtggccgagaaagggtccagattgaagctctcagacaagaactggagggggcaaaacgacagataggggcactcaaaagtgagaagtcccagattgaagctgaagctaacaaccaaagaaacctttcagtaaaactggagtctgatctcaagagcttgtcagaagcttacaacagcatagagcaggccaactaccgcttggatgccgaggagcaaacgaaggtcgagaagctgagcacaaggctggcagagctcggggaagatgtggatacccttctgcagggtattggcgatgacactgccattccggatgatgacgatgaagatgatgaagagtgattggtttatgtaacctgcaggtctgctggtgtaatctaccttcatgttgggtcatgatattgcgatggtaactggaaaatgtacagtggatgacaaatgcaccgttccaagtttaagttatttctagagaatgtgactaaatagcctcttgttaaatttgattgtctgaataactttttatattacctttgataaatagccccttgttgaatgggcctcagattcatcatcatatatactaaaaagaacgggtctgatctggtgtggaactcggcaacgtccgtagcccctagagtgctgctg

SEQ ID NO: 30450 - DNA, 3210 bp, Zea Mays
gccaagctagcctgcccctagtccccttacccctgcggccctgcccctgcccccgctcccgattccgccgccgcatccgacccaacccgctgcgatcccctccgccgtggcgtcggcgactccctctcccgcgacgccctttcatcgctgcagttgatacgccacccgagcggttccttccctcctctcttcctccccttgtcgctctccgcatcgccgcaggccgtagggcgccaccgcgtcagaaggcgcgatccatggaccggtcgatcaacttccgcggcatcgccgggagcgccggcaacatcatgcagggaatggggaaattcgttttcggcaacgagggactcgactcaaaggaagatagctatgttgagagataccttgaccggataagcaatggcaccatacctgatgaccggagatctgccatgactgagctgcagtctctcgtggccgaaagtcgcttagcacagatgtcgtttggagcgatgggttttcctatcctcctcaatatttttaaagaagaccgcgaggatgtagagcttgtgagaggtgcactggagacctttgtgagcgcattgactcctattgagatgtcacaagggccaaagactgaggttcaaccagcatcagtgaattctgatctgctgtctcgagaaacggagaatatttctcttcttctgagcttattgtcagaggaagacttttatgtgagatactacacaatccaacttctaacagctctacttacaaactcgctgaaaaggtgcccagttacaggaagcaattctattgattccccgtggtataacagttctaatggacatgcttatggatcgtgaggtcataaggaatgaagcactgttacttcttacttatttgactcgggatgcagaggaaattcaaaaaattgttgtatttgagggtgtgtttgagaagatatttagcattatcagagaggagggctattctgacggaggtgtagttgttcaggattgccttgaattgttaaataatttaattcgacacaacgcgtcaaatcagatgcttttgaaagagacaatgggctttgacccattgatatcaatactaaagattaggagaggcagtgcatttaattttacccaacagaagacagtaaatctcctcgctgctttaaatactgtggaattgcttttgatggtgggcccatccggtgaagcaggtaaagatgctaacaagaatgcaaatcaaactgcattggctcagaaaaacattctggaccatcttcttttgttgggtgttgagagtcagtgggcccctgtcgctctccgctgtatggcactgcgttgtattggcaatttggtgttaaggaatcctcagaatcttgattctcttgcaagaaagcaagttggagaagagcctcatgttcaacctgcactgaatgccatcttatctataatcttacggacatctatagcgcaggaatttgttgctgctgattatgtattcaagtgtttctgcgagagaaatcctaatggccaggcattattagcatcaactattgctccacatccaaaccaaggagatattcatgaacctgctagtgacatgccttttggaagtgtacttctgcaagctctggtttctagtgatgtcaatggagatatggaggcatgctgcagagcatctagcgttctttctcacattatcaaggacaacttgcaaagcaaggatcgtgtattgcaaattcagcttgagacatctacagcatccttggggcgtactgagccggtattgcatcgtattgttacatgtttgtccatcgcagcttcaatggagggagaaaatgaccaaaacaaccaactagaggaaccgtacattcaaccttttattcttcggctactcatcatatggcttgttgattgttcaaatgctgtcaactgccttttggaatcagcggtgcatctgaacttcataatagagcttgcttcgaataaacgttacgccgcttgtgtccgtggattggctgctgttgttctaggtgcttgcatcctgtacaatgctagccgtgagaagggtcgtgatgcctttgccgtggcagatgctataagtcaaaagattggcctcacaacatacttcttgaggtttgatgaactgaggaaaagcttggcacatccgttgtcagagcagcatcaccgcaaggagctttcccgatcaagtgcgaatagcatgtcagatttccaagagattgaagaggatgaaacaaataagggcgatcaacaccctgtgctttcagaaatatttgattcacagtttgttaatttacttactaagcttgaggctgatattagagaaaacataatggatatatttagtcggacaaaaactgcaacagcagtccttcctactgaattggagcagaagaacggggaggtcgatgaagagtatatcaagcgactaaagtcatttgtagaaaaacagtgcaatgagatgcaggacttgctggcacggaatgcaatgttagcagaagagttactgagaactggtggtggtacgaccacagatacttcacagaaaccgagcagtggccgagaaagggtccagattgaagctctcagacaagaactggagggggcaaaacgacagataggggcactcaaaagtgagaagtcccagattgaagctgaagctaacaaccaaagaaacctttcagtaaaactggagtctgatctcaagagcttgtcagaagcttacaacagcatagagcaggccaactaccgcttggatgccgaggagcaaacgaaggtcgagaagctgagcacaaggctggcagagctcggggaagatgtggatacccttctgcagggtattggcgatgacactgccattccggatgatgacgatgaagatgatgaagagtgattggtttatgtaacctgcaggtctgctggtgtaatctaccttcatgttgggtcatgatattgcgatggtaactggaaaatgtacagtggatgacaaatgcaccgttccaagtttaagttatttctagagaatgtgactaaatagcctcttgttaaatttgattgtctgaataactttttatattacctttgataaatagccccttgttgaatgggcctcagattcatcatcatatatactaaaaagaacgggtctgatctggtgtggaactcggcaacgtccgtagcccctagagtgctgctg

SEQ ID NO: 30451 - DNA, 688 bp, Zea Mays
ctcgttctcaagcaacaaaaaatatatatatactcaggtcataaggaatgaagcactgttacttcttacttatttgactcgggatgcagaggaaattcaaaaaattgttgtatttgagggtgtgtttgagaagatatttagcattatcagagaggagggctattctgacggaggtgtagttgttcagcatctcactcctagtcttaattctacttcctttgatgactggtgggaggaaatgcttttgaaagagacaatgggctttgacccattgatatcaatactaaagattaggagaggcagtgcatttaattttacccaacagaagacagtaaatctcctcgctgctttaaatactgtggaattgcttttgatggtgggcccatccggtgaagcaggtaaagatgctaacaagaatgcaaatcaaactgcattggctcagaaaaacattctggaccatcttcttttgttgggtgttgagagtcagtgggcccctgtcgctctccgctgtatggcactgcgttgtattggcaatttggtgttaaggaatcctcagaatcttgattctcttgcaagaaagcaagttggagaagagcctcatgttcaacctgcactgaatgccatcttatctataatcttacggacatctatagcgcaggaatttgttgctgctgattatgtattcaag

SEQ ID NO: 30452 - DNA, 2497 bp, Zea Mays
cttcttcatgtagtttcaccatcaggcgatgctaattcttgttcatatatggccgtggcggttggcgtgccgccctcttcatcatcgggacagtgtaaatataagaaggacgatacatcagcacctaaaggaggtcataaggaatgaagcactgttacttcttacttatttgactcgggatgcagaggaaattcaaaaaattgttgtatttgagggtgtgtttgagaagatatttagcattatcagagaggagggctattctgacggaggtgtagttgttcaggattgccttgaattgttaaataatttaattcgacacaacgcgtcaaatcagatgcttttgaaagagacaatgggctttgacccattgatatcaatactaaagattaggagaggcagtgcatttaattttacccaacagaagacagtaaatctcctcgctgctttaaatactgtggaattgcttttgatggtgggcccatccggtgaagcaggtaaagatgctaacaagaatgcaaatcaaactgcattggctcagaaaaacattctggaccatcttcttttgttgggtgttgagagtcagtgggcccctgtcgctctccgctgtatggcactgcgttgtattggcaatttggtgttaaggaatcctcagaatcttgattctcttgcaagaaagcaagttggagaagagcctcatgttcaacctgcactgaatgccatcttatctataatcttacggacatctatagcgcaggaatttgttgctgctgattatgtattcaagtgtttctgcgagagaaatcctaatggccaggcattattagcatcaactattgctccacatccaaaccaaggagatattcatgaacctgctagtgacatgccttttggaagtgtacttctgcaagctctggtttctagtgatgtcaatggagatatggaggcatgctgcagagcatctagcgttctttctcacattatcaaggacaacttgcaaagcaaggatcgtgtattgcaaattcagcttgagacatctacagcatccttggggcgtactgagccggtattgcatcgtattgttacatgtttgtccatcgcagcttcaatggagggagaaaatgaccaaaacaaccaactagaggaaccgtacattcaaccttttattcttcggctactcatcatatggcttgttgattgttcaaatgctgtcaactgccttttggaatcagcggtgcatctgaacttcataatagagcttgcttcgaataaacgttacgccgcttgtgtccgtggattggctgctgttgttctaggtgcttgcatcctgtacaatgctagccgtgagaagggtcgtgatgcctttgccgtggcagatgctataagtcaaaagattggcctcacaacatacttcttgaggtttgatgaactgaggaaaagcttggcacatccgttgtcagagcagcatcaccgcaaggagctttcccgatcaagtgcgaatagcatgtcagatttccaagagattgaagaggatgaaacaaataagggcgatcaacaccctgtgctttcagaaatatttgattcacagtttgttaatttacttactaagcttgaggctgatattagagaaaacataatggatatatttagtcggacaaaaactgcaacagcagtccttcctactgaattggagcagaagaacggggaggtcgatgaagagtatatcaagcgactaaagtcatttgtagaaaaacagtgcaatgagatgcaggacttgctggcacggaatgcaatgttagcagaagagttactgagaactggtggtggtacgaccacagatacttcacagaaaccgagcagtggccgagaaagggtccagattgaagctctcagacaagaactggagggggcaaaacgacagataggggcactcaaaagtgagaagtcccagattgaagctgaagctaacaaccaaagaaacctttcagtaaaactggagtctgatctcaagagcttgtcagaagcttacaacagcatagagcaggccaactaccgcttggatgccgaggagcaaacgaaggtcgagaagctgagcacaaggctggcagagctcggggaagatgtggatacccttctgcagggtattggcgatgacactgccattccggatgatgacgatgaagatgatgaagagtgattggtttatgtaacctgcaggtctgctggtgtaatctaccttcatgttgggtcatgatattgcgatggtaactggaaaatgtacagtggatgacaaatgcaccgttccaagtttaagttatttctagagaatgtgactaaatagcctcttgttaaatttgattgtctgaataactttttatattacctttgataaatagccccttgttgaatgggcctcagattcatcatcatatatactaaaaagaacgggtctgatctggtgtggaactcggcaacgtccgtagcccctagagtgctgctg

SEQ ID NO: 30453 - DNA, 2274 bp, Zea Mays
cttgttcatatatggccgtggcggttggcgtgccgccctcttcatcatcgggacagtgtaaatataagaaggacgatacatcagcacctaaaggaggtcataaggaatgaagcactgttacttcttacttatttgactcgggatgcagaggaaattcaaaaaattgttgtatttgagggtgtgtttgagaagatatttagcattatcagagaggagggctattctgacggaggtgtagttgttcaggattgccttgaattgttaaataatttaattcgacacaacgcgtcaaatcagatgcttttgaaagagacaatgggctttgacccattgatatcaatactaaagattaggagaggcagtgcatttaattttacccaacagaagacagtaaatctcctcgctgctttaaatactgtggaattgcttttgatggtgggcccatccggtgaagcaggtaaagatgctaacaagaatgcaaatcaaactgcattggctcagaaaaacattctggaccatcttcttttgttgggtgttgagagtcagtgggcccctgtcgctctccgctgtatgagaaatcctaatggccaggcattattagcatcaactattgctccacatccaaaccaaggagatattcatgaacctgctagtgacatgccttttggaagtgtacttctgcaagctctggtttctagtgatgtcaatggagatatggaggcatgctgcagagcatctagcgttctttctcacattatcaaggacaacttgcaaagcaaggatcgtgtattgcaaattcagcttgagacatctacagcatccttggggcgtactgagccggtattgcatcgtattgttacatgtttgtccatcgcagcttcaatggagggagaaaatgaccaaaacaaccaactagaggaaccgtacattcaaccttttattcttcggctactcatcatatggcttgttgattgttcaaatgctgtcaactgccttttggaatcagcggtgcatctgaacttcataatagagcttgcttcgaataaacgttacgccgcttgtgtccgtggattggctgctgttgttctaggtgcttgcatcctgtacaatgctagccgtgagaagggtcgtgatgcctttgccgtggcagatgctataagtcaaaagattggcctcacaacatacttcttgaggtttgatgaactgaggaaaagcttggcacatccgttgtcagagcagcatcaccgcaaggagctttcccgatcaagtgcgaatagcatgtcagatttccaagagattgaagaggatgaaacaaataagggcgatcaacaccctgtgctttcagaaatatttgattcacagtttgttaatttacttactaagcttgaggctgatattagagaaaacataatggatatatttagtcggacaaaaactgcaacagcagtccttcctactgaattggagcagaagaacggggaggtcgatgaagagtatatcaagcgactaaagtcatttgtagaaaaacagtgcaatgagatgcaggacttgctggcacggaatgcaatgttagcagaagagttactgagaactggtggtggtacgaccacagatacttcacagaaaccgagcagtggccgagaaagggtccagattgaagctctcagacaagaactggagggggcaaaacgacagataggggcactcaaaagtgagaagtcccagattgaagctgaagctaacaaccaaagaaacctttcagtaaaactggagtctgatctcaagagcttgtcagaagcttacaacagcatagagcaggccaactaccgcttggatgccgaggagcaaacgaaggtcgagaagctgagcacaaggctggcagagctcggggaagatgtggatacccttctgcagggtattggcgatgacactgccattccggatgatgacgatgaagatgatgaagagtgattggtttatgtaacctgcaggtctgctggtgtaatctaccttcatgttgggtcatgatattgcgatggtaactggaaaatgtacagtggatgacaaatgcaccgttccaagtttaagttatttctagagaatgtgactaaatagcctcttgttaaatttgattgtctgaataactttttatattacctttgataaatagccccttgttgaatgggcctcagattcatcatcatatatactaaaaagaacgggtctgatctggtgtggaactcggcaacgtccgtagcccctagagtgctgctg

SEQ ID NO: 30454 - DNA, 2405 bp, Zea Mays
ctcaggcttcgcatagaatttaacttctctcttgatgcacagtcataaggaatgaagcactgttacttcttacttatttgactcgggatgcagaggaaattcaaaaaattgttgtatttgagggtgtgtttgagaagatatttagcattatcagagaggagggctattctgacggaggtgtagttgttcaggattgccttgaattgttaaataatttaattcgacacaacgcgtcaaatcagatgcttttgaaagagacaatgggctttgacccattgatatcaatactaaagattaggagaggcagtgcatttaattttacccaacagaagacagtaaatctcctcgctgctttaaatactgtggaattgcttttgatggtgggcccatccggtgaagcaggtaaagatgctaacaagaatgcaaatcaaactgcattggctcagaaaaacattctggaccatcttcttttgttgggtgttgagagtcagtgggcccctgtcgctctccgctgtatggcactgcgttgtattggcaatttggtgttaaggaatcctcagaatcttgattctcttgcaagaaagcaagttggagaagagcctcatgttcaacctgcactgaatgccatcttatctataatcttacggacatctatagcgcaggaatttgttgctgctgattatgtattcaagtgtttctgcgagagaaatcctaatggccaggcattattagcatcaactattgctccacatccaaaccaaggagatattcatgaacctgctagtgacatgccttttggaagtgtacttctgcaagctctggtttctagtgatgtcaatggagatatggaggcatgctgcagagcatctagcgttctttctcacattatcaaggacaacttgcaaagcaaggatcgtgtattgcaaattcagcttgagacatctacagcatccttggggcgtactgagccggtattgcatcgtattgttacatgtttgtccatcgcagcttcaatggagggagaaaatgaccaaaacaaccaactagaggaaccgtacattcaaccttttattcttcggctactcatcatatggcttgttgattgttcaaatgctgtcaactgccttttggaatcagcggtgcatctgaacttcataatagagcttgcttcgaataaacgttacgccgcttgtgtccgtggattggctgctgttgttctaggtgcttgcatcctgtacaatgctagccgtgagaagggtcgtgatgcctttgccgtggcagatgctataagtcaaaagattggcctcacaacatacttcttgaggtttgatgaactgaggaaaagcttggcacatccgttgtcagagcagcatcaccgcaaggagctttcccgatcaagtgcgaatagcatgtcagatttccaagagattgaagaggatgaaacaaataagggcgatcaacaccctgtgctttcagaaatatttgattcacagtttgttaatttacttactaagcttgaggctgatattagagaaaacataatggatatatttagtcggacaaaaactgcaacagcagtccttcctactgaattggagcagaagaacggggaggtcgatgaagagtatatcaagcgactaaagtcatttgtagaaaaacagtgcaatgagatgcaggacttgctggcacggaatgcaatgttagcagaagagttactgagaactggtggtggtacgaccacagatacttcacagaaaccgagcagtggccgagaaagggtccagattgaagctctcagacaagaactggagggggcaaaacgacagataggggcactcaaaagtgagaagtcccagattgaagctgaagctaacaaccaaagaaacctttcagtaaaactggagtctgatctcaagagcttgtcagaagcttacaacagcatagagcaggccaactaccgcttggatgccgaggagcaaacgaaggtcgagaagctgagcacaaggctggcagagctcggggaagatgtggatacccttctgcagggtattggcgatgacactgccattccggatgatgacgatgaagatgatgaagagtgattggtttatgtaacctgcaggtctgctggtgtaatctaccttcatgttgggtcatgatattgcgatggtaactggaaaatgtacagtggatgacaaatgcaccgttccaagtttaagttatttctagagaatgtgactaaatagcctcttgttaaatttgattgtctgaataactttttatattacctttgataaatagccccttgttgaatgggcctcagattcatcatcatatatactaaaaagaacgggtctgatctggtgtggaactcggcaacgtccgtagcccctagagtgctgctg

SEQ ID NO: 30455 - DNA, 2529 bp, Zea Mays
cgagcgagtgctgtcggttgactgttgaaaacaaccagcgacctcgccatggatggaaggggatcgcgggggcaaccgattgaagccatggatgcggtagcggtcataaggaatgaagcactgttacttcttacttatttgactcgggatgcagaggaaattcaaaaaattgttgtatttgagggtgtgtttgagaagatatttagcattatcagagaggagggctattctgacggaggtgtagttgttcaggattgccttgaattgttaaataatttaattcgacacaacgcgtcaaatcagatgcttttgaaagagacaatgggctttgacccattgatatcaatactaaagattaggagaggcagtgcatttaattttacccaacagaagacagtaaatctcctcgctgctttaaatactgtggaattgcttttgatggtgggcccatccggtgaagcaggtaaagatgctaacaagaatgcaaatcaaactgcattggctcagaaaaacattctggaccatcttcttttgttgggtgttgagagtcagtgggcccctgtcgctctccgctgtatggcactgcgttgtattggcaatttggtgttaaggaatcctcagaatcttgattctcttgcaagaaagcaagttggagaagagcctcatgttcaacctgcactgaatgccatcttatctataatcttacggacatctatagcgcaggaatttgttgctgctgattatgtattcaagtgtttctgcgagagaaatcctaatggccaggcattattagcatcaactattgctccacatccaaaccaaggagatattcatgaacctgctagtgacatgccttttggaagtgtacttctgcaagctctggtttctagtgatgtcaatggagatatggaggtattgcaaattcagcttgagacatctacagcatccttggggcgtactgagccggtattgcatcgtattgttacatgtttgtccatcgcagcttcaatggagggagaaaatgaccaaaacaaccaactagaggaaccgtacattcaaccttttattcttcggctactcatcatatggcttgttgattgttcaaatgctgtcaactgccttttggaatcagcggtgcatctgaacttcataatagagcttgcttcgaataaacgttacgccgcttgtgtccgtggattggctgctgttgttctaggtgcttgcatcctgtacaatgctagccgtgagaagggtcgtgatgcctttgccgtggcagatgctataagtcaaaagattggcctcacaacatacttcttgaggtttgatgaactgaggaaaagcttggcacatccgttgtcagagcagcatcaccgcaaggagctttcccgatcaagtgcgaatagcatgtcagatttccaagagattgaagaggatgaaacaaataagggcgatcaacaccctgtgctttcagaaatatttgattcacagtttgttaatttacttactaagcttgaggctgatattagagaaaacataatggatatatttagtcggacaaaaactgcaacagcagtccttcctactgaattggagcagaagaacggggaggtcgatgaagagtatatcaagcgactaaagtcatttgtagaaaaacagtgcaatgagatgcaggacttgctggcacggaatgcaatgttagcagaagagttactgagaactggtggtggtacgaccacagatacttcacagaaaccgagcagtggccgagaaagggtccagattgaagctctcagacaagaactggagggggcaaaacgacagataggggcactcaaaagtgagaagtcccagattgaagctgaagctaacaaccaaagaaacctttcagtaaaactggagtctgatctcaagagcttgtcagaagcttacaacagcatagagcaggccaactaccgcttggatgccgaggtaaaagccttgcggcagggaggcagcgtgccatatcctgacgtggaagcaataaaagcgcaagctaaggaagaggctgagaaggacagtgaggcagaactgaatgatctactcgtctgccttgggcaggagcaaacgaaggtcgagaagctgagcacaaggctggcagagctcggggaagatgtggatacccttctgcagggtattggcgatgacactgccattccggatgatgacgatgaagatgatgaagagtgattggtttatgtaacctgcaggtctgctggtgtaatctaccttcatgttgggtcatgatattgcgatggtaactggaaaatgtacagtggatgacaaatgcaccgttccaagtttaagttatttctagagaatgtgactaaatagcctcttgttaaatttgattgtctgaataactttttatattacctttgataaatagccccttgttgaatgggcctcagattcatcatcatatatactaaaaagaacgggtctgatctggtgtggaactcggcaacgtccgtagcccctagagtgctgctg

SEQ ID NO: 30456 - DNA, 701 bp, Zea Mays
atggatggaaggggatcgcgggggcaaccgattgaagccatggatgcggtagcggtcataaggaatgaagcactgttacttcttacttatttgactcgggatgcagaggaaattcaaaaaattgttgtatttgagggtgtgtttgagaagatatttagcattatcagagaggagggctattctgacggaggtgtagttgttcaggattgccttgaattgttaaataatttaattcgacacaacgcgtcaaatcagatgcttttgaaagagacaatgggctttgacccattgatatcaatactaaagattaggagaggcagtgcatttaattttacccaacagaagtaaatctcctcgctgctttaaatactgtggaattgcttttgatggtgggcccatccggtgaagcaggtaaagatgctaacaagaatgcaaatcaaactgcattggctcagaaaaacattctggaccatcttcttttgttgggtgttgagagtcagtgggcccctgtcgctctccgctgtatggcactgcgttgtattggcaatttggtgttaaggaatcctcagaatcttgattctcttgcaagaaagcaagttggagaagagcctcatgttcaacctgcactgaatgccatcttatctataatcttacggacatctatagcgcaggaatttgttgctgctgattatgtattcaag

SEQ ID NO: 30457 - DNA, 2477 bp, Zea Mays
atggatggaaggggatcgcgggggcaaccgattgaagccatggatgcggtagcggtcataaggaatgaagcactgttacttcttacttatttgactcgggatgcagaggaaattcaaaaaattgttgtatttgagggtgtgtttgagaagatatttagcattatcagagaggagggctattctgacggaggtgtagttgttcaggattgccttgaattgttaaataatttaattcgacacaacgcgtcaaatcagatgcttttgaaagagacaatgggctttgacccattgatatcaatactaaagattaggagaggcagtgcatttaattttacccaacagaaggtaaagatgctaacaagaatgcaaatcaaactgcattggctcagaaaaacattctggaccatcttcttttgttgggtgttgagagtcagtgggcccctgtcgctctccgctgtatggcactgcgttgtattggcaatttggtgttaaggaatcctcagaatcttgattctcttgcaagaaagcaagttggagaagagcctcatgttcaacctgcactgaatgccatcttatctataatcttacggacatctatagcgcaggaatttgttgctgctgattatgtattcaagtgtttctgcgagagaaatcctaatggccaggcattattagcatcaactattgctccacatccaaaccaaggagatattcatgaacctgctagtgacatgccttttggaagtgtacttctgcaagctctggtttctagtgatgtcaatggagatatggaggcatgctgcagagcatctagcgttctttctcacattatcaaggacaacttgcaaagcaaggatcgtgtattgcaaattcagcttgagacatctacagcatccttggggcgtactgagccggtattgcatcgtattgttacatgtttgtccatcgcagcttcaatggagggagaaaatgaccaaaacaaccaactagaggaaccgtacattcaaccttttattcttcggctactcatcatatggcttgttgattgttcaaatgctgtcaactgccttttggaatcagcggtgcatctgaacttcataatagagcttgcttcgaataaacgttacgccgcttgtgtccgtggattggctgctgttgttctaggtgcttgcatcctgtacaatgctagccgtgagaagggtcgtgatgcctttgccgtggcagatgctataagtcaaaagattggcctcacaacatacttcttgaggtttgatgaactgaggaaaagcttggcacatccgttgtcagagcagcatcaccgcaaggagctttcccgatcaagtgcgaatagcatgtcagatttccaagagattgaagaggatgaaacaaataagggcgatcaacaccctgtgctttcagaaatatttgattcacagtttgttaatttacttactaagcttgaggctgatattagagaaaacataatggatatatttagtcggacaaaaactgcaacagcagtccttcctactgaattggagcagaagaacggggaggtcgatgaagagtatatcaagcgactaaagtcatttgtagaaaaacagtgcaatgagatgcaggacttgctggcacggaatgcaatgttagcagaagagttactgagaactggtggtggtacgaccacagatacttcacagaaaccgagcagtggccgagaaagggtccagattgaagctctcagacaagaactggagggggcaaaacgacagataggggcactcaaaagtgagaagtcccagattgaagctgaagctaacaaccaaagaaacctttcagtaaaactggagtctgatctcaagagcttgtcagaagcttacaacagcatagagcaggccaactaccgcttggatgccgaggtaaaagccttgcggcagggaggcagcgtgccatatcctgacgtggaagcaataaaagcgcaagctaaggaagaggctgagaaggacagtgaggcagaactgaatgatctactcgtctgccttgggcaggagcaaacgaaggtcgagaagctgagcacaaggctggcagagctcggggaagatgtggatacccttctgcagggtattggcgatgacactgccattccggatgatgacgatgaagatgatgaagagtgattggtttatgtaacctgcaggtctgctggtgtaatctaccttcatgttgggtcatgatattgcgatggtaactggaaaatgtacagtggatgacaaatgcaccgttccaagtttaagttatttctagagaatgtgactaaatagcctcttgttaaatttgattgtctgaataactttttatattacctttgataaatagccccttgttgaatgggcctcagattcatcatcatatatactaaaaagaacgggtctgatctggtgtggaactcggcaacgtccgtagcccctagagtgctgctg

SEQ ID NO: 30458 - DNA, 1303 bp, Zea Mays
agcttgggcagttgggttccagaactgcgcctaaggtttcttgcacgcgcaaatgaagcggcagccaccacatcctcgaggcggcggcggcgcggcggtcggcgagagcggaagcggcggagggttccataagggggaggggaaagggaaagggaggtggggcggcgggtgccggcggcggaacgagcagcggctgggtgtcggcggcggcggcggggccctctccctcgctgctttcgccagcgccaagtcccggactaccggctacaacccggccgtcatcaagaagcaaaaggagttctacaagaatgctaaactaatcagcaaatacaaaaggacaaagaagcaacaaagtcagtcaaacgaccatccgcagattccaatccatgaggatggtggcgacaatgcccaatatgtaccgaaaccgcgctaccaaggcaagaagcgcaccgcgcatagtttgaaggaagagtacgagaagaaacgcgcagaggatgagaaggctaagaaagagcaggatgcagcagttcaggcgaagagggaacaccgggagaagtccgaggcaaagcggagggaactgagggagaagatgttcaagaagacgagatctggccagcctgtgatgagataccggatcgagcatctcttggagacggcactgagcaaataacacgatgccaccgtcatcttggcagattttgtagttccgctgtccaatcgatttgttggttttaactgactttgtcacctttttagtttgcaaaaatggacaatctaagtgacaaagccagttaaaaccaacaaattggttgggctgcggaactacaaaatttgttggtcaatataccaaggcgatggtggccccacctagagctaggccagaaaagcctcatccaccggcagcccttaagccgtagtagtagggttctattctgttgtcggcagcccttaagaagagactgttcaccagtggagacacttccacttaaccaataaattacctgtgaaatcaatcattatgtcgagcaaaatgtgcgccggggtttaagttcaagaaagtaaatcagatagggcacatacctatgaatataatgggcttctctactgaggacttgatcgaaagtacacgtccattaattagatgcttgtgtacttgctctctcagttttggttccttgtgactggttaggcctgcttgctgctaattcagatgtgattgcaagaggctgatgagaagcaccgtagcagaatgcatcatcagtaagagaacatggagtgaagccttctgattaatgctgcatag

SEQ ID NO: 30459 - DNA, 1914 bp, Zea Mays
atctcgcaagcagcagcagagcagaaactgagggaagcgagggacggcgatggcgggtgcggaggggagagggccgagacggagccgcgtggcgttcgtgctggtggacgggatcggggacgtgagcgttccgtcgctgggcgggcgcacgccgctggacgcggcgtgcgcgccgcggctggacgcggtggcggcggccggggtgaccgggctcatggaccccgtggagccggggcttgcatgcggcagcgacacggcgcacctatccctcctcgggtacgacccacgggagtactaccgcggccgcggcgcgttcgaatccatgggtgccgggctcgccatggcgcctggcgacatcgccttcaagtcgaacttcgctacactggatgagaacactggagttatcatcagcaggagggcagatcggcactttgaagaggaaggccctatactctgtgctgcgttggatgggatgaaacttcggtcgtttcctgagtatgaagtcagagtaagatatgctaccgagcatagatgtggtgtggttgtcaaaggaccaaagctgagtgggaacatttctggaactgatcccttgaaggacaaccgcttgcatctgaaggctgaaccgttggatggctcagaagaagctaaaaacactgcagctgtggtcaatgagctttctatggagattacgcgcatactggtttctcaccccatcaacgcaaagcgtgcagctgaggggaagaacatcgcaaatgttgtgttgctgcgaggttgtggtattcggattgaggtgcctgcctttgaaaccaaacatggacttgcaccttgcatggttgctcctaccaagatcatagctggcctgggactgtcactggggattgatatccttgaagcacctggagcaactggagattatcgtactctcttaacttctaaagctaaagccatagccaaggcactctctgcccctatggatacaccacctcgtgtttttgtgcctggagaggatggatacaaggctggaaaagaaaatggatatgactttgggttcctgcacataaaggccattgatgatgctggtcatgacaaggctgtcaagttgaaagtacggggtctagaagctgttgatcgagctattggtcagcttgcgaggcttctttgggaagctgaaaaggccggacactatcagtactttctttgcgtcactggagaccattctactcctgttgaatatggtgatcatagcttcgaacccgtcccgtttgcaatatgcagactgagagattatgcaggagccattggggaggataatattatgaatacacagctcgacgattttcccctcccttcggtaaaatccggagaagatttgctcgacagtatagaatcactggagcacaagcctggtcaacttaaagctttcagtggcgacagtgtgtgtgagttcaacgagatcgccgctgcgaggggctgccttggacgattcccaggaagcgagatgatgggcatcattaagaagtttatcaaggccaagaatgattaatgctggttgaaatgctaacctttagcgtaatatattggccataaggtttattatcaatgtaataaactaataatgacagaatggagcaatatggaagaaccgtcttgattggagatgaataagagataccttggtgaaaaacaatgagatctgcttatgtacattgtacccagtgttgggtcactttccggccacatgaatgagaaattttgatggaagttttctcctctcttttttgcggggttgggttaaggagtccagacttgaagcttcttgcttagccataccttttatactaagcatcggacagacagaatacacaactgcagtaccttcaaattgcggtgttcaacagaatactgtaatttcag

SEQ ID NO: 30460 - DNA, 2034 bp, Zea Mays
atctcgcaagcagcagcagagcagaaactgagggaagcgagggacggcgatggcgggtgcggaggggagagggccgagacggagccgcgtggcgttcgtgctggtggacgggatcggggacgtgagcgttccgtcgctgggcgggcgcacgccgctggacgcggcgtgcgcgccgcggctggacgcggtggcggcggccggggtgaccgggctcatggaccccgtggagccggggcttgcatgcggcagcgacacggcgcacctatccctcctcgggtacgacccacgggagtactaccgcggccgcggcgcgttcgaatccatgggtgccgggctcgccatggcgcctggcgacatcgccttcaagtcgaacttcgctacactggatgagaacactggagttatcatcagcaggagggcagatcggcactttgaagaggaaggccctatactctgtgctgcgttggatgggatgaaacttcggtcgtttcctgagtatgaagtcagagtaagatatgctaccgagcatagatgtggtgtggttgtcaaaggaccaaagctgagtgggaacatttctggaactgatcccttgaaggacaaccgcttgcatctgaaggctgaaccgttggatggctcagaagaagctaaaaacactgcagctgtggtcaatgagctttctatggagattacgcgcatactggtttctcaccccatcaacgcaaagcgtgcagctgaggggaagaacatcgcaaatgttgtgttgctgcgaggttgtggtattcggattgaggtgcctgcctttgaaaccaaacatggacttgcaccttgcatggttgctcctaccaagatcatagctggcctgggactgtcactggggattgatatccttgaagcacctggagcaactggagattatcgtactctcttaacttctaaagctaaagccatagccaaggcactctctgcccctatggatacaccacctcgtgtttttgtgcctggagaggatggatacaaggctggaaaagaaaatggatatgactttgggttcctgcacataaaggccattgatgatgctggtcatgacaaggctgtcaagttgaaagtacggggtctagaagctgttgatcgagctattggtcagcttgcgaggcttctttgggaagctgaaaaggccggacactatcagtactttctttgcgtcactggagaccattctactcctgttgaatatggtgatcatagcttcgaacccgtcccgtttgcaatatgcagactgagagattatgcaggagccattggggaggataatattatgaatacacagctcgacgattttcccctcccttcggtaaaatccggagaagatttgctcgacagtatagaatcactggagcacaagcctggtcaacttaaagctttcagtggcgacagtgtgtgtgagttcaacgagatcgccgctgcgaggggctgccttggacgattcccaggaagcgagatgatgggcatcattaagaagtttatcaaggccaagaatgattaatgctggttgaaatgctaacctttagcgtaatatattggccataaggtttattatcaatgtaataaactaataatgacagaatggagcaatatggaagaaccgtcttgattggagatgaataagagataccttggtgaaaaacaatgagatctgcttatgtacattgtacccagtgttgggtcactttccggccacatgaatgagaaattttgatggaagttttctcctctcttttttgcggggttgggttaaggagtccagacttgaagcttcttgcttagccgtatgtatcatccagaatattttgacacattttatgcaattttgcattcttatagctccaatgatgcaaataattgctagagcatccggcacactgacatggcatacgttttgtgagatgataccttttatactaagcatcggacagacagaatacacaactgcagtaccttcaaattgcggtgttcaacagaatactgtaatttcag

SEQ ID NO: 30461 - DNA, 2430 bp, Zea Mays
agccaaaagcacaaagccattggcgactgcgatcgtcactcgaaagcggctcgccgtgtgccgtccccggcggcccactccaaagccccccaatcttgtcgctttttgcgcgccgtcgcccatctatcgtgtccgccatcccaatcgcctccggcaaaaaccctccgtttccgccgcgtccccctcgctgtcccggctcaccggacaccggtcgagtgttggtgctcgctctcgcggctcccctctttcctgagcctggaagggccgatgcaggccgcgcccgggagcgtctcttgggccgcctcgcagccgtccgtcctcggccggtgcggcggcggtgcaccgtccgcttcactcaagtggagagctggcggcgtcggaggaggggaatgcagggtccggggccgggacgtcgtcgtgccgcgctcctgcgcgcgcgcgcaggagaagcgcctgccgcgggtgcggaaatccaaggaggagaggagggagatggtggagtccttcatcaaaagctaccgagtttcaaatgaaggaaaattcccatcaattaatctgacacataaggaagttggaggatcatattatatagttcgtgaaatcatgagggatatcatccaagagaatagagtccttggtcctggtggattggatgctatgacacttagttttgaagattgcgctgattcttcaaagtcatccatgaagcttgaactgggtcaagacagtatagagatcttagatatgtctggtagtgaagtcagtaagagtcatgtacctgaaatatccagcactgatgaatcgtttccattgcaaggtaatgccatcagcaatcatagactgctgggttcatctaatatcttagaggttggtgttctgaatagtgtggtccaaaatggaagtgtggcagatgcaatattcatggaaacaaaccttgcgaaacaagatgaagttccatctagagggtccattgagtttgacttgaatacttctgaagagcaagctcgcttatttgctcaggtctctgattcagatgaagaagtaacactaaacaatcaggcggatgcacaggacgggacgaccaatagtggcactgatagagttattcttcccttagaatctttcgctgtttatgaaaacaatgcttcacttctaagagatcatgagacattgcctgatgataatcatgatggatcaactgatagggttgcggatgacgcaagtctccttgcggcgaccaatggtgttcaagcaaagcaagcttctttacatgagcatgatgcatcaactagaagtgtattgattgacaatgctcagagcttagatggtcagtttagtactactgtgtctactgatcctataaatggttttaaattggagactgaaattgcaaccaagacagttgaaacatctcaagtacacaggctgcaagatgagtttgagcaaccattagttgatgctagctatgatgggcaagaaaactctgatagcccagtttctcatccagcattagatacaaaggggctgttgcacacagaagatcagctcaatgtggtacaggtagatgaaactgaattcaagaactcaacatctgggatcacaaaggaagaggtccatgcagccgatttcaggcatgaacaaggaattaacaccacaatggcgatcagcaggcatgcactttgcctcctaactttgcgttccatgcttactgtttataatttccttcacttgtcacaaaaggcagcagtatattaggagaactttaaaagctcagcagaagaaagatgacaacctattctggcttgtccttagggcatttgttgttgctatatcgaaaatttgggcaaaatgaacagtgcagaaaggcaccttacgtggaactgaagatcgagtgtgatacctttcctactggaaaacgagaaaccggtccatgaagttccatttatcccatgcgaatatagatatgctctgcagtttaggttattttttggagacagttggtctactttgtagtcgcttcccactgtagatgtaacattcagtcatcttgttctggtgtcatctgtgaaatatctgctacaatggatgtcatgtgtcttttggtaaaaggaggaggatctctttcacagcgtgtttggtttgaggaatgatatagtctatcatcttttcacttttcattttctggtttatagaatagaataagttaatgcatcactattttattttttataggctaataattagtaataatataaggaatgggttattttactaaatttgtggaatgaatctatgatgcaccatcttatttagaatgtattattttttaaaccaaacaccctcttaatgcctcttaatgccttgaaatttgcagtgctgttcattgggtctacaaataaacttaggctggatttgcctccccgattggag

SEQ ID NO: 30462 - DNA, 2210 bp, Zea Mays
ctcgaaagcggctcgccgtgtgccgtccccggcggcccactccaaagccccccaatcttgtcgctttttgcgcgccgtcgcccatctatcgtgtccgccatcccaatcgcctccggcaaaaaccctccgtttccgccgcgtccccctcgctgtcccggctcaccggacaccggtcgagtgttggtgctcgctctcgcggctcccctctttcctgagcctggaagggccgatgcaggccgcgcccgggagcgtctcttgggccgcctcgcagccgtccgtcctcggccggtgcggcggcggtgcaccgtccgcttcactcaagtggagagctggcggcgtcggaggaggggaatgcagggtccggggccgggacgtcgtcgtgccgcgctcctgcgcgcgcgcgcaggagaagcgcctgccgcgggtgcggaaatccaaggaggagaggagggagatggtggagtccttcatcaaaagctaccgagtttcaaatgaaggaaaattcccatcaattaatctgacacataaggaagttggaggatcatattatatagttcgtgaaatcatgagggatatcatccaagagaatagagtccttggtcctggtggattggatgctatgacacttagttttgaagattgcgctgattcttcaaagtcatccatgaagcttgaactgggtcaagacagtatagagatcttagatatgtctggtagtgaagtcagtaagagtcatgtacctgaaatatccagcactgatgaatcgtttccattgcaaggtaatgccatcagcaatcatagactgctgggttcatctaatatcttagaggttggtgttctgaatagtgtggtccaaaatggaagtgtggcagatgcaatattcatggaaacaaaccttgcgaaacaagatgaagttccatctagagggtccattgagtttgacttgaatacttctgaagagcaagctcgcttatttgctcaggtctctgattcagatgaagaagtaacactaaacaatcaggcggatgcacaggacgggacgaccaatagtggcactgatagagttattcttcccttagaatctttcgctgtttatgaaaacaatgcttcacttctaagagatcatgagacattgcctgatgataatcatgatggatcaactgatagggttgcggatgacgcaagtctccttgcggcgaccaatggtgttcaagcaaagcaagcttctttacatgagcatgatgcatcaactagaagtgtattgattgacaatgctcagagcttagatggctgcaagatgagtttgagcaaccattagttgatgctagctatgatgggcaagaaaactctgatagcccagtttctcatccagcattagatacaaaggggctgttgcacacagaagatcagctcaatgtggtacaggtagatgaaactgaattcaagaactcaacatctgggatcacaaaggaagaggtccatgcagccgatttcaggcatgaacaaggaattaacaccacaatggcgatcagcaggagaactttaaaagctcagcagaagaaagatgacaacctattctggcttgtccttagggcatttgttgttgctatatcgaaaatttgggcaaaatgaacagtgcagaaaggcaccttacgtggaactgaagatcgagtgtgatacctttcctactggaaaacgagaaaccggtccatgaagttccatttatcccatgcgaatatagatatgctctgcagtttaggttattttttggagacagttggtctactttgtagtcgcttcccactgtagatgtaacattcagtcatcttgttctggtgtcatctgtgaaatatctgctacaatggatgtcatgtgtcttttggtaaaaggaggaggatctctttcacagcgtgtttggtttgaggaatgatatagtctatcatcttttcacttttcattttctggtttatagaatagaataagttaatgcatcactattttattttttataggctaataattagtaataatataaggaatgggttattttactaaatttgtggaatgaatctatgatgcaccatcttatttagaatgtattattttttaaaccaaacaccctcttaatgcctcttaatgccttgaaatttgcagtgctgttcattgggtctacaaataaacttaggctggatttgcctccccgattggag

SEQ ID NO: 30463 - DNA, 2062 bp, Zea Mays
taatcgaaatctagctaattatttataaggaatctctatctctctattgttctgttgttgaaaaggcgtacataaaaactttttctttgtacccaacttccgatccgatggtgcgactgcgagtgcgaggaggcgattggtaatggcacacacttttttttataaagatacgggtagccaatttgacttggcctgccagttccgcgcagccccctccaaatccatcgataaaacacacaataaatcaataataaccagagagtcagtttgcgtggattgccatcgccccttcctccacctctgcgctccaccacctaataattgattccactgccaatacctgcgatgagtgccgccatgccgccggcgatggaccccgcggcggcgggggagatggcgcgggaggccgccgcgtggtgctcgctgcacggcctcgtcgtcggggaccgcgccgaccagagatcagcaacggtccctggtgttggtttggtccatgctccattctccttgctcccagcacattttccagagtccttttggaggcaggcgtgcgagctcgctcccgtttttaacgagcttgtggaccgtgttagcatggacgggaatttcttgcagaatgctttgtccaaaacaaggcaggttgatgatttcacatctaggctcttggaaattcacaggaaaatgatggaaataaataaggaagagaatattcgcttggggttgcaccgatcagattatatgctggattcagaaacaagttctcttcttcaaatagagctcaacaccatttcagcatcatttcctgggcttggttccttagttagtgatcttcacaggtccttaattaaacaatatgggacttctttaagtctagaacacaagagggttcctgcaaatgcggctagcactcaattttctgaagcattggcccaagcatggtctgagtttaatattgacagtgctgtaattatgatgattgttcagccagaagagagaaatatgtatgatcaatactggctttccaaacatttgcaagactcacatggcataacaactataaggaaaaccttatcgcaggtggaagcggaaggccaggttctcccagatggaactcttcttgtaggtggccagaaagttgctgtagtgtattttagagctggctatgcaccaaatgattacccttcagaagcagaatggagtgcaagacttatgatggaacaatcatctgctgtgaagtgcccttcaatatcatatcatttagtgggaaccaaaaagatacaacaagaactagcaaagcctaatgtgcttgaaaggttccttaaaagtgaggaaattgacaaggttcgcaaatgttttgctggcttatggagtttggatgacgaatatattataaaaactgcagtggaaaaacctgagttgtttgtattgaagcctcaacgtgaaggcggagggaacaacatctacggtcttgatttgagggaaacgcttgtcagactacagaaggaaggaggggatgcgcttgcagcctacatactgatgcaaagaatcttcccaaaagcttctcctgcttatctcgttcgtggtggtgtttgccacgagggtcttgcaatttctgagcttggaatatatggagcttatctgcgtaacaaagataaagtggtgatcaatgagcaatgtggttacttgatgcgaacgaaggtttcttcatcagacgaaggtggcgtagctgcagggtttgctgttttggatagcttatacctgactggcaagtgagataacaaaaggagcggcggctacagctttcggttgggggcatacaccgtcaatggatcatcatgtcctccatttagatcgacacagaataagctgctgcaaactagagccattatgtgacaccatgtcacgttgtttgatgaattccttctatctgcccctgccaagggagagaagagaatagacatattattgtgtgtagattaaatgtgcatgaaatccatggaaatggtgaaggatgaaccacgtgcccataaccgtgatatgcttgtcaaggaagaggggcttg

SEQ ID NO: 30464 - DNA, 942 bp, Zea Mays
aacagacctgttcctagaggcgtttggatcgcggggtcacgcggagagtctccgtcttatcgacaagagatcagcaacggtccctggtgttggtttggtccatgctccattctccttgctcccagcacattttccagagtccttttggaggcaggcgtgcgagctcgctcccgtttttaacgagcttgtggaccgtgttagcatggacgggaatttcttgcagaatgctttgtccaaaacaaggcaggttgatgatttcacatctaggctcttggaaattcacaggaaaatgatggaaataaataaggaagagaatattcgcttggggttgcaccgatcagattatatgctggattcagaaacaagttctcttcttcaaatagagctcaacaccatttcagcatcatttcctgggcttggttccttagttagtgatcttcacaggtccttaattaaacaatatgggacttctttaagtctagaacacaagagggttcctgcaaatgcggctagcactcaattttctgaagcattggcccaagcatggtctgagtttaatattgacagtgctgtaattatgatgattgttcagccagaagagagaaatatgtatgatcaatactggctttccaaacatttgcaagactccatggcataacaactataaggaaaaccttatcgcaggtggaagcggaaggccaggttctcccagatggaactcttcttgtaggtggccagaaagttgctgtagtgtattttagagctggctatgcaccaaatgattacccttcagaagcagaatggagtgcaagacttatgatggaacaatcatctgctgtgaagtgcccttcaatatcatatcatttagtgggaaccaaaaagatacaacaagaactagcaaagcctaatgtgcttgaaaggaatttcaggattggttcaaga

SEQ ID NO: 30465 - DNA, 1836 bp, Zea Mays
cagacctgttcctagaggcgtttggatcgcggggtcacgcggagagtctccgtcttatcgacaagagatcagcaacggtccctggtgttggtttggtccatgctccattctccttgctcccagcacattttccagagtccttttggaggcaggcgtgcgagctcgctcccgtttttaacgagcttgtggaccgtgttagcatggacgggaatttcttgcagaatgctttgtccaaaacaaggcaggttgatgatttcacatctaggctcttggaaattcacaggaaaatgatggaaataaataaggaagagaatattcgcttggggttgcaccgatcagattatatgctggattcagaaacaagttctcttcttcaaatagagctcaacaccatttcagcatcatttcctgggcttggttccttagttagtgatcttcacaggtccttaattaaacaatatgggacttctttaagtctagaacacaagagggttcctgcaaatgcggctagcactcaattttctgaagcattggcccaagcatggtctgagtttaatattgacagtgctgtaattatgatgattgttcagccagaagagagaaatatgtatgatcaatactggctttccaaacatttgcaagactcacatggcataacaactataaggaaaaccttatcgcaggtggaagcggaaggccaggttctcccagatggaactcttcttgtaggtggccagaaagttgctgtagtgtattttagagctggctatgcaccaaatgattacccttcagaagcagaatggagtgcaagacttatgatggaacaatcatctgctgtgaagtgcccttcaatatcatatcatttagtgggaaccaaaaagatacaacaagaactagcaaagcctaatgtgcttgaaaggttccttaaaagtgaggaaattgacaaggttcgcaaatgttttgctggcttatggagtttggatgacgaatatattataaaaactgcagtggaaaaacctgagttgtttgtattgaagcctcaacgtgaaggcggagggaacaacatctacggtcttgatttgagggaaacgcttgtcagactacagaaggaaggaggggatgcgcttgcagcctacatactgatgcaaagaatcttcccaaaagcttctcctgcttatctcgttcgtggtggtgtttgccacgagggtcttgcaatttctgagcttggaatatatggagcttatctgcgtaacaaagataaagtggtgatcaatgagcaatgtggttacttgatgcgaacgaaggtttcttcatcagacgaaggtggcgtagctgcagggtttgctgttttggatagcttatacctgactggcaagtgagataacaaaaggagcggcggctacagctttcggttgggggcatacaccgtcaatggatcatcatgtcctccatttagatcgacacagaataagctgctgcaaactagagccattatgtgacaccatgtcacgttgtttgatgaattccttctatctgcccctgccaagggagagaagagaatagacatattattgtgtgtagattaaatgtgcatgaaatccatggaaatggtgaaggatgaaccacgtgcccataaccgtgatgtaggctggcggtgccgtttcttgttcttgatcaccttgacagcaacggggaattctgtgtttcttttgaggacacgtgatgtgcaccatcagtatgaatgtaaccaaagaataagggcctatttagtttatgactaactatgtcatattttgtctaaagttagttgttcgaattgaaaaactaattttagtc

SEQ ID NO: 30466 - DNA, 729 bp, Zea Mays
cccaagtccactacaggcctacagcctactcaccggataactcattggtgagagacataagccaaatgccgcaaagcagctatgggattgaaggattgtcacatataacagttgctggtgcgctcaatcatgggatgaaggaggtggaagtgtggcttcagacaataagtccaggtcaaaggacgccaatccacaggcattcctgtgaagaagttttcactgtcctcaaagggaagggtacgctcttgatgggatcaagctcactaaagtacccagggcagccacaggaaattcctttctttcagaataccacattttcaatccctgtaaatgatccacaccaggtttggaattctgacgagcacgaagatttgcaagttcttgtgatcatatcgagaccgcctgctaagatatttttatatgatgattggagcatgcctcatacagccgcggtactgaaattccccttcgtctgggatgaggactgcttcgaagcagcaaaagacgaactctaggtcacaagtgtttcctgcaatttatctgcttcatccatgatcctgctggtgctggactactacaattctcagcactagttgtaataaagccagtgcgcttttcatgtataattctgtattgtggctcgcgaaaataaaatttggcaacggtttatgaacttatgcgcttgtggagttgatccaatgttcaccgtttcaagatttttgcattatt

SEQ ID NO: 30467 - DNA, 1131 bp, Zea Mays
gccagtcctccctgcccgtaatcctcatcggcaaccccgcgtgctatcaacccccctgtgatcggcgatcccatcccttccaaagcaagcgcccactcaccttgccttgccggacaagcgtgccgcccgcgtcaaagatgcagtcgctgagcccttttctcccactcccctcccttcctctcttcgcctgactcgcacgcgcccccgatgtctgactcccccgcgtgggcacgagccccgccatacgcgcgctgccaaggggggcaaggcgcggcagctgctccacctcgacgcttgggcactcgtcgacgtcatccaggccaacgtgaccccatcgacggcctcaccctaggacccgctcctttcccctagaagcatccgaaggcatggcacccgtagccgccgacgtcgttcgcctcctactcacatggcgaggtgaacgggcactggactgtaagaaatggatgagcagtgacgtgaggagggcccctgcggccgagctatggaggctgatagacggcccgacacaaaggcgatggtcgtggaggctgcggcgacgcacaaggccatcactgggttgtggcggggcaggagagatgagtgggggagactgtgagagtgatgagtgtattctgtaattgagacggactccacccagatttgggtctagagtttgtttcgctataggtatgaaattgctgatcataggttgtttcgctacagaactaagtggaaatggagtttttcatagagtacggagaggcaagccagtaccagatctaagaagtcattggtaaagggaactacagagtagttgctacatcttaagacaccctataagattgtcaactcaattgtgatgaatatgttgttattgaagatggttgccacatccaagattcttctgaatgtaataatgttcaaccgcaagaactgttatgagagattgccaggttaccaactgtggtgatctgaattctccggtaaaaaatctaaatctcttccattagtaattagtgttagtaagagaaataaagtcatcatcgacaggttctagagactttgttagcttgttctatagggatggcattcaggtagagaaactctggatgttgagaaattcaatattct

SEQ ID NO: 30468 - DNA, 1026 bp, Zea Mays
gccagtcctccctgcccgtaatcctcatcggcaaccccgcgtgctatcaacccccctgtgatcggcgatcccatcccttccaaagcaagcgcccactcaccttgccttgccggacaagcgtgccgcccgcgtcaaagatgcagtcgctgagcccttttctcccactcccctcccttcctctcttcgcctgactcgcacgcgcccccgatgtctgactcccccgcgtgggcacgagccccgccatacgcgcgctgccaaggggggcaaggcgcggcagctgctccacctcgacgcttgggcactcgtcgacgtcatccaggccaacgtgaccccatcgacggcctcaccctaggacccgctcctttcccctagaagcatccgaaggcatggcacccgtagccgccgacgtcgttcgcctcctactcacatggcgaggtgaacgggcactggactgtaagaaatggatgagcagtgacgtgaggagggcccctgcggccgagctatggaggctgatagacggcccgacacaaaggcgatggtcgtggaggctgcggcgacgcacaaggccatcactgggttgtggcggggcaggagagatgagtgggggagactgtgagagtgatgagtgtattctgtaattgagacggactccacccagatttgggtctagagtttgtttcgctataggtatgaaattgctgatcataggttgtttcgctacagaactaagtggaaatggagtttttcatagagtacggagaggcaagccagtaccagatctaagaagtcattggtaaagggaactacagagtagttgctacatcttaagacaccctataagattgtcaactcaattgtgatgaatatgttgttattgaagatggttgccacatccaagattcttctgaatgtaataatgttcaaccgcaagaactgttatgagagattgccaggttaaacgagctggctcgagctgcgtaacgagtcaaatcgatatagctcgttacattaccaagccaaaacaag

SEQ ID NO: 30469 - DNA, 2331 bp, Zea Mays
gccagtcctccctgcccgtaatcctcatcggcaaccccgcgtgctatcaacccccctgtgatcggcgatcccatcccttccaaagcaagcgcccactcaccttgccttgccggacaagcgtgccgcccgcgtcaaagatgcagtcgctgagcccttttctcccactcccctcccttcctctcttcgcctgactcgcacgcgcccccgatgtctgactcccccgcgtgggcacgagccccgccatacgcgcgctgccaaggggggcaaggcgcggcagctgctccacctcgacgcttgggcactcgtcgacgtcatccaggccaacgtgaccccatcgacggcctcaccctaggacccgctcctttcccctagaagcatccgaaggcatggcacccgtagccgccgacgtcgttcgcctcctactcacatggcgaggtgaacgggcactggactgtaagaaatggatgagcagtgacgtgaggagggcccctgcggccgagctatggaggctgatagacggcccgacacaaaggcgatggtcgtggaggctgcggcgacgcacaaggccatcactgggttgtggcggggcaggagagatgagtgggggagactgtgagagtgatgagtgtattctgtaattgagacggactccacccagatttgggtctagagtttgtttcgctataggtatgaaattgctgatcataggttgtttcgctacagaactaagtggaaatggagtttttcatagagtacggagaggcaagccagtaccagatctaagaagtcattggtaaagggaactacagagtagttgctacatcttaagacaccctataagattgtcaactcaattgtgatgaatatgttgttattgaagatggttgccacatccaagattcttctgaatgtaataatgttcaaccgcaagaactgttatgagagattgccagcgccagcgtttttggtgtctcggctgaattgatgcaatgcacatacgatggcaagggaaattcagtccccacgatattgctgctcttgcaggagaggctgtatgcccacggggggctgaagagaatgaccaagaggagcacgtgagggaccagctgaacaaaggaattgtacctgatgacattgatgttcactgcttggctagcctgattaagttccatgaaataagggaactgaaacttctgcacatttaaattggacaggcatggttcagggaacttccagaaggtgtcctggatggcctgtcccctcagcaagtgcttcaatgcaattctgaaggggagttccttgagcttgtgacactgttgcgccccactcaggcggcactcctcaattgggctgtcgagctgatgtctgatgttgtcgaagaggaggagctcaacaagatgaatgctaggaacgtagccatggtgtttgcccccaacatgacacagatgtcagatccactgacagcactcatgcatgccgtccaagtcatgaactttctcaagacactgatcttgaggacgcttcgggagcgcgatgatgcagccaccaccggagagtacacaccatactcatctccagcatcatccagtaagcatgatgacgccgaatgctgctatggcagtgagcaggacatggacaggagctgtgagatgagtgacatgcatagccagatcagcaagtctgggcgacatgcagactatctcgtacgctacaatacctgttttgacagcgaacaagaggtcgacgatcatctgagtgaggttgaagaaggtttcttgcgtcggttggagcgtgatcttggagcagacagaccagaggtttcttgcagaaaaatctcagagatcatggccctggaggatgctgagccgaaagctgaaactagagcagtggagaagggcatacagaatgagaatgaagaggttgctgaacagctataatgatggaagttctgtgtttttaggcagtaaagcttattattgtaagtactgaacactgaccaatggtctttatccaacacctcggttgaatgtattgctccagtgtatgatgtaaacttggctgatccttttaatgcttggtgcccctttgttacctgggattgtatccatggaaatggtcaggctcactgggaacatgagcccttgatcatcaaatttcctgtgatcgagttgatatattttctcctcgggagtgctgtactgatgtgatattaaatttgattacaagtgaaggatacgatagtatcagactatcagttacaaacaacgaagtgacgaacactgtaaacctgataagacgccagtaatacatattttatcgccatggcaaata

SEQ ID NO: 30470 - DNA, 1100 bp, Zea Mays
ccgcgtgctatcaacccccctgtgatcggcgatcccatcccttccaaagcaagcgcccactcaccttgccttgccggacaagcgtgccgcccgcgtcaaagatgcagtcgctgagcccttttctcccactcccctcccttcctctcttcgcctgactcgcacgcgcccccgatgtctgactcccccgcgtgggcacgagccccgccatacgcgcgctgccaaggggggcaaggcgcggcagctgctccacctcgacgcttgggcactcgtcgacgtcatccaggccaacgtgaccccatcgacggcctcaccctaggacccgctcctttcccctagaagcatccgaaggcatggcacccgtagccgccgacgtcgttcgcctcctactcacatggcgaggtgaacgggcactggactgtaagaaatggatgagcagtgacgtgaggagggcccctgcggccgagctatggaggctgatagacggcccgacacaaaggcgatggtcgtggaggctgcggcgacgcacaaggccatcactgggttgtggcggggcaggagagatgagtgggggagactgtgagagtgatgagtgtattctgtaattgagacggactccacccagaactaagtggaaatggagtttttcatagagtacggagaggcaagccagtaccagatctaagaagtcattggtaaagggaactacagagtagttgctacatcttaagacaccctataagattgtcaactcaattgtgatgaatatgttgttattgaagatggttgccacatccaagattcttctgaatgtaataatgttcaaccgcaagaactgttatgagagattgccagccctgttattgcctatttgcctgttcctgaagggttgcaacgttggccggtggggtttgctattgcatttctgtaacatgacaaggttgtgtccctgcagtttgattgcttgatgttgcatcggctttgtttgtgcatgaatcgttattgcagccttgtgaccctgtgtccctaacaagttgtccctgctgtttagtgtttacttcaattgttttttggttattgcatattgaaagatgaaacctgtg

SEQ ID NO: 30471 - DNA, 2048 bp, Zea Mays
ctctgctgctgtcttcaagaagcagaataggagtgagggaaagcccgttgctttcgcttcggttttctcccagaactccaccgagagaggggaaggactccacaaggagaggggccgaggggggagtaaactcgggtccgtgtgacggcagagagtttccgacgaggagagagaagcagctgggaagggcactcacggagcttacagagaaaaaaggggtcgaggttcatgcccgtttggttcctcggttgctgcgtgaggcggccggaggagtcgtgaaccgggaatgacgggggtggtggtggtttccagcgcggggtgcaagggtggcggcggggcgaagagggccgccggcggcagaggtggcggggaggaggagcggcggcggcgggcggcggttctggagctgctgctcgcggccgtgcggcgctccgtggtggcgtgccgggtggagcgcggggccgccggagccgggtggccggcgagagaggaggacgcggcggtggcgctcgaggagatggagatcggttggcccaccgacgtccgccacgtcgcccacgtcaccttcgaccgcttccacggcttcctcggcctccccgtcgagttcgaggatgagatgccctgccgcgtgcccagcgccagcgccagcgtttttggtgtctcggctgaattgatgcaatgcacatacgatggcaagggaaattcagtccccacgatattgctgctcttgcaggagaggctgtatgcccacggggggctgaagtctgaggggatctttcgcattaatccagagaatgaccaagaggagcacgtgagggaccagctgaacaaaggaattgtacctgatgacattgatgttcactgcttggctagcctgattaagttccatgaaataagggaactgaaacttctgcacatttaaattggacaggcatggttcagggaacttccagaaggtgtcctggatggcctgtcccctcagcaagtgcttcaatgcaattctgaaggggagttccttgagcttgtgacactgttgcgccccactcaggcggcactcctcaattgggctgtcgagctgatgtctgatgttgtcgaagaggaggagctcaacaagatgaatgctaggaacgtagccatggtgtttgcccccaacatgacacagatgtcagatccactgacagcactcatgcatgccgtccaagtcatgaactttctcaagacactgatcttgaggacgcttcgggagcgcgatgatgcagccaccaccggagagtacacaccatactcatctccagcatcatccagtaagcatgatgacgccgaatgctgctatggcagtgagcaggacatggacaggagctgtgagatgagtgacatgcatagccagatcagcaagtctgggcgacatgcagactatctcgtacgctacaatacctgttttgacagcgaacaagaggtcgacgatcatctgagtgaggttgaagaaggtttcttgcgtcggttggagcgtgatcttggagcagacagaccagaggtttcttgcagaaaaatctcagagatcatggccctggaggatgctgagccgaaagctgaaactagagcagtggagaagggcatacagaatgagaatgaagaggttgctgaacagctataatgatggaagttctgtgtttttaggcagtaaagcttattattgtaagtactgaacactgaccaatggtctttatccaacacctcggttgaatgtattgctccagtgtatgatgtaaacttggctgatccttttaatgcttggtgcccctttgttacctgggattgtatccatggaaatggtcaggctcactgggaacatgagcccttgatcatcaaatttcctgtgatcgagttgatatattttctcctcgggagtgctgtactgatgtgatattaaatttgattacaagtgaaggatacgatagtatcagactatcagttacaaacaacgaagtgacgaacactgtaaacctgataagacgccagtaatacatattttatcgccatggcaaata

SEQ ID NO: 30472 - DNA, 1972 bp, Zea Mays
cagaataggagtgagggaaagcccgttgctttcgcttcggttttctcccagaactccaccgagagaggggaaggactccacaaggagaggggccgaggggggagtaaactcgggtccgtgtgacggcagagagtttccgacgaggagagagaagcagctgggaagggcactcacggagcttacagagaaaaaaggggtcgaggttcatgcccgtttggttcctcggttgctgcgtgaggcggccggaggagtcgtgaaccgggaatgacgggggtggtggtggtttccagcgcggggtgcaagggtggcggcggggcgaagagggccgccggcggcagaggtggcggggaggaggagcggcggcggcgggcggcggttctggagctgctgctcgcggccgtgcggcgctccgtggtggcgtgccgggtggagcgcggggccgccggagccgggtggccggcgagagaggaggacgcggcggtggcgctcgaggagatggagatcggttggcccaccgacgtccgccacgtcgcccacgtcaccttcgaccgcttccacggcttcctcggcctccccgtcgagttcgaggatgagatgccctgccgcgtgcccagcgccagcgtttttggtgtctcggctgaattgatgcaatgcacatacgatggcaagggaaattcagtccccacgatattgctgctcttgcaggagaggctgtatgcccacggggggctgaagtctgaggggatctttcgcattaatccagagaatgaccaagaggagcacgtgagggaccagctgaacaaaggaattgtacctgatgacattgatgttcactgcttggctagcctgattaaggcatggttcagggaacttccagaaggtgtcctggatggcctgtcccctcagcaagtgcttcaatgcaattctgaaggggagttccttgagcttgtgacactgttgcgccccactcaggcggcactcctcaattgggctgtcgagctgatgtctgatgttgtcgaagaggaggagctcaacaagatgaatgctaggaacgtagccatggtgtttgcccccaacatgacacagatgtcagatccactgacagcactcatgcatgccgtccaagtcatgaactttctcaagacactgatcttgaggacgcttcgggagcgcgatgatgcagccaccaccggagagtacacaccatactcatctccagcatcatccagtaagcatgatgacgccgaatgctgctatggcagtgagcaggacatggacaggagctgtgagatgagtgacatgcatagccagatcagcaagtctgggcgacatgcagactatctcgtacgctacaatacctgttttgacagcgaacaagaggtcgacgatcatctgagtgaggttgaagaaggtttcttgcgtcggttggagcgtgatcttggagcagacagaccagaggtttcttgcagaaaaatctcagagatcatggccctggaggatgctgagccgaaagctgaaactagagcagtggagaagggcatacagaatgagaatgaagaggttgctgaacagctataatgatggaagttctgtgtttttaggcagtaaagcttattattgtaagtactgaacactgaccaatggtctttatccaacacctcggttgaatgtattgctccagtgtatgatgtaaacttggctgatccttttaatgcttggtgcccctttgttacctgggattgtatccatggaaatggtcaggctcactgggaacatgagcccttgatcatcaaatttcctgtgatcgagttgatatattttctcctcgggagtgctgtactgatgtgatattaaatttgattacaagtgaaggatacgatagtatcagactatcagttacaaacaacgaagtgacgaacactgtaaacctgataagacgccagtaatacatattttatcgccatggcaaata

SEQ ID NO: 30473 - DNA, 1775 bp, Zea Mays
gtaagattcaaaatcgaagcttccgtagaaaatttcgcttacggggcaagagtcatactgaaaaaaattgattttctgaaggatgagtttatgattttgagtgctcccagtttggactttggagcatgttcttatctgaggatgctgttccgccagagttctgataactagagcaaaacttcagttcctgcagatgtatgcctggattttcaaagtgcaaacatgagttcaactgatgcatttaattcctattccttatgcactgtattaagcagatcttttgtgcaattacagcaacattggcactaatccggtggaactcttattcctgagtcacacattgtaacaagtctgaatttgtgttggacccgccagcgtttttggtgtctcggctgaattgatgcaatgcacatacgatggcaagggaaattcagtccccacgatattgctgctcttgcaggagaggctgtatgcccacggggggctgaagtctgaggggatctttcgcattaatccagagaatgaccaagaggagcacgtgagggaccagctgaacaaaggaattgtacctgatgacattgatgttcactgcttggctagcctgattaagttccatgaaataagggaactgaaacttctgcacatttaaattggacaggcatggttcagggaacttccagaaggtgtcctggatggcctgtcccctcagcaagtgcttcaatgcaattctgaaggggagttccttgagcttgtgacactgttgcgccccactcaggcggcactcctcaattgggctgtcgagctgatgtctgatgttgtcgaagaggaggagctcaacaagatgaatgctaggaacgtagccatggtgtttgcccccaacatgacacagatgtcagatccactgacagcactcatgcatgccgtccaagtcatgaactttctcaagacactgatcttgaggacgcttcgggagcgcgatgatgcagccaccaccggagagtacacaccatactcatctccagcatcatccagtaagcatgatgacgccgaatgctgctatggcagtgagcaggacatggacaggagctgtgagatgagtgacatgcatagccagatcagcaagtctgggcgacatgcagactatctcgtacgctacaatacctgttttgacagcgaacaagaggtcgacgatcatctgagtgaggttgaagaaggtttcttgcgtcggttggagcgtgatcttggagcagacagaccagaggtttcttgcagaaaaatctcagagatcatggccctggaggatgctgagccgaaagctgaaactagagcagtggagaagggcatacagaatgagaatgaagaggttgctgaacagctataatgatggaagttctgtgtttttaggcagtaaagcttattattgtaagtactgaacactgaccaatggtctttatccaacacctcggttgaatgtattgctccagtgtatgatgtaaacttggctgatccttttaatgcttggtgcccctttgttacctgggattgtatccatggaaatggtcaggctcactgggaacatgagcccttgatcatcaaatttcctgtgatcgagttgatatattttctcctcgggagtgctgtactgatgtgatattaaatttgattacaagtgaaggatacgatagtatcagactatcagttacaaacaacgaagtgacgaacactgtaaacctgataagacgccagtaatacatattttatcgccatggcaaata

SEQ ID NO: 30474 - DNA, 1601 bp, Zea Mays
gaaaatttcgcttacggggcaagagtcatactgaaaaaaattgattttctgaaggatgagtttatgattttgagtgctcccagtttggactttggagcatgttcttatctgaggatgctgttccgccagagttctgataactagagcaaaacttcagttcctgcagatcaacattggcactaatccggtggaactcttattcctgagtcacacattgtaacaagtctgaatttgtgttggacccgccagcgtttttggtgtctcggctgaattgatgcaatgcacatacgatggcaagggaaattcagtccccacgatattgctgctcttgcaggagaggctgtatgcccacggggggctgaagtctgaggggatctttcgcattaatccagagaatgaccaagaggagcacgtgagggaccagctgaacaaaggaattgtacctgatgacattgatgttcactgcttggctagcctgattaaggcatggttcagggaacttccagaaggtgtcctggatggcctgtcccctcagcaagtgcttcaatgcaattctgaaggggagttccttgagcttgtgacactgttgcgccccactcaggcggcactcctcaattgggctgtcgagctgatgtctgatgttgtcgaagaggaggagctcaacaagatgaatgctaggaacgtagccatggtgtttgcccccaacatgacacagatgtcagatccactgacagcactcatgcatgccgtccaagtcatgaactttctcaagacactgatcttgaggacgcttcgggagcgcgatgatgcagccaccaccggagagtacacaccatactcatctccagcatcatccagtaagcatgatgacgccgaatgctgctatggcagtgagcaggacatggacaggagctgtgagatgagtgacatgcatagccagatcagcaagtctgggcgacatgcagactatctcgtacgctacaatacctgttttgacagcgaacaagaggtcgacgatcatctgagtgaggttgaagaaggtttcttgcgtcggttggagcgtgatcttggagcagacagaccagaggtttcttgcagaaaaatctcagagatcatggccctggaggatgctgagccgaaagctgaaactagagcagtggagaagggcatacagaatgagaatgaagaggttgctgaacagctataatgatggaagttctgtgtttttaggcagtaaagcttattattgtaagtactgaacactgaccaatggtctttatccaacacctcggttgaatgtattgctccagtgtatgatgtaaacttggctgatccttttaatgcttggtgcccctttgttacctgggattgtatccatggaaatggtcaggctcactgggaacatgagcccttgatcatcaaatttcctgtgatcgagttgatatattttctcctcgggagtgctgtactgatgtgatattaaatttgattacaagtgaaggatacgatagtatcagactatcagttacaaacaacgaagtgacgaacactgtaaacctgataagacgccagtaatacatattttatcgccatggcaaata

SEQ ID NO: 30475 - DNA, 902 bp, Zea Mays
tggagatgctctaagagaagaaccttattttctaagaatttttatttttccaagtaaaattaacttaatttttgtcagaaaaataaaaatcccttaaaaataggactaaactaaccctaagtatacgaaacccaaagtttacggtcctaaaaatcaattatctcacccacgagcgatcgctttctacctcgctatgcccacgagctcgctttctactagctctcgacgcgtcgccgccgaccacagcacggctggcgtgtggatccctcccgctctcctcgccggatctccacccgcctcgctctctctgagtccagtggggcagagatccgtgagcgcgaggactggtcccttcttgggttgggtctcttctccagctcgcgagttcgccactggttgacactgattgtagcacttcgtggtgcctgattggatcgcgggtgcggtttgccctccacaaatttgggtttggttccactgaacccccatgacccaagcgaagtccgctcctggaaggaaggagatgggccgtgggcggtcgccggaaccgctcgatttcttcatatggactgtcgaggaatttccatgttcctatttgggcctacccttgagcgttcataaactctcaagagctgaacttcacaagattgttgacaaggtggcagacaacctcccaaaatggaagggagcactcataaacaaggctgcctgactggtcactgtaaaggctgtcctgtccgccctaaatatttatcacatgactgcccttgatctacctaaatgggtgttcaaggcaattgacaagaagcgcagaggctttctttgggtcggaaaagataaagctaatggaggaaactgtatgatatcttcggattcaatacaacgacctctccaatatggtg

SEQ ID NO: 30476 - DNA, 1374 bp, Zea Mays
tggagatgctctaagagaagaaccttattttctaagaatttttatttttccaagtaaaattaacttaatttttgtcagaaaaataaaaatcccttaaaaataggactaaactaaccctaagtatacgaaacccaaagtttacggtcctaaaaatcaattatctcacccacgagcgatcgctttctacctcgctatgcccacgagctcgctttctactagctctcgacgcgtcgccgccgaccacagcacggctggcgtgtggatccctcccgctctcctcgccggatctccacccgcctcgctctctctgagtccagtggggcagagatccgtgagcgcgaggactggtcccttcttgggttgggtctcttctccagctcgcgagttcgccactggttgacactgattgtagcacttcgtggtgcctgattggatcgcgggtgcggtttgccctccacaaatttgggtttggttccactgaacccccatgacccaagcgaagtccgctcctggaaggaaggagatgggccgtgggcggtcgccggaaccgctcgatttcttcatatggactgtcgaggatgttggattatggctggaagaaattaaccttggtggctacagacaagtatttgaagaaaatggtgtcaacggagaatatctagaaagcttgtccatgtttactactgagcagattctgcgttttattaggcggtgccatatgaaatggggagactttatcacactgtgcaaagagttgaggcgcattaaagtgccattgccaaggtaccggagcagtttgaagcttgagttaattatgactccattaccaaattcgcctgcctcaaaggggagcaagaagtccgcaggccatggtgggcgccggcatgcctctccatagtgttcgtgagggcagccaagcagaacaggaagtcccgtgtcgtctccttgaagctggaaccataatgcttgtcaagcacttggaatcgtcgccgcctgtgctccaatcctccagctctataggaggcagcctgcgcacaccatcgtgcgctagtccagagtggcatggaagctgtctgttttcgctcttggtgcatcatgcacaactggtctctctctctctctctctctctctctctctctctctctctctctctctctcttatcccttgctacttgttcttcatatataggtttggaacagtagtatgttgtagacaaagaaagaaacatataatgtgcagatggtctctggtctgctcttttcttgcaaatcttcctgagtagttatggtggtgcatgcgatttgctaaaagaataaaagattgtctaccacttagttgtccagtgcacctacttcacgaattctggacttat

SEQ ID NO: 30477 - DNA, 2567 bp, Zea Mays
tggagatgctctaagagaagaaccttattttctaagaatttttatttttccaagtaaaattaacttaatttttgtcagaaaaataaaaatcccttaaaaataggactaaactaaccctaagtatacgaaacccaaagtttacggtcctaaaaatcaattatctcacccacgagcgatcgctttctacctcgctatgcccacgagctcgctttctactagctctcgacgcgtcgccgccgaccacagcacggctggcgtgtggatccctcccgctctcctcgccggatctccacccgcctcgctctctctgagtccagtggggcagagatccgtgagcgcgaggactggtcccttcttgggttgggtctcttctccagctcgcgagttcgccactggttgacactgattgtagcacttcgtggtgcctgattggatcgcgggtgcggtttgccctccacaaatttgggtttggttccactgaacccccatgacccaagcgaagtccgctcctggaaggaaggagatgggccgtgggcggtcgccggaaccgctcgatttcttcatatggactgtcgaggatgttggattatggctggaagaaattaaccttggtggctacagacaagtatttgaagaaaatggtgtcaacggagaatatctagaaagcttgtccatgtttactactgagcagattctgcgttttattaggcggtgccatatgaaatggggagactttatcacactgtgcaaagagttgaggcgcattaaaggtttgtataattattgttcttatttagcctttcacatcaaggactctatctataacccatttcttctatgttctacctgctccatatatactcattttccctttcagttctacttgacttcataataacatgcaaagtagtctgtttgaaggaaattctcgtttcctcacagatgctattgtttttggcatttacgaaagcatctaaactactggtgtttgaagtggtaaaaacacattgctcggttgctctgttatgttgattggcttagctaattcttttgctgaagttttgtgcatataaagtgccattgccaaggtaccggagcagtttgaagcttgagttaattatgactccattaccaaatgtatgtactatgtagcactacatctggtttaaaatagatgttttagggggtgtttgaatgcactagagctaatagttagttgattaaaaatatgctagtggaattagctagctaacaaatagttagctaactagtagttaatttactaaaaatagctaatagctgaactattagctagggtgtttggatgtctctagctaattttagccagtaactattagctctagtacattcaaacatccccttaaccttttgccatcaaacttttgaagttctgaccactattatacataaaacacatgtgaaatggtaaaaatgatgttaagagttgccacaaacaatactggatgtagttagaaaaaaaagaattctgtagtggtccatttggcacaagatgaacaccttaatgagagcaagtcagaccaggtgggatattgttggaaggtcagctatgaacttcgatggttaggcctcagtatcactcgcatcgatgaatgcagtgtgcctacctagttatggactgatctcttcagaatgctggacttattgataatgatgacattgacgtgattgcactttgagaatagtaaggagagactgtaagcaaatagggtgtgtgattgaagctactcttttggttatttctgttttggatagttttactatttagcatagttactagtgaggttttggtaaattcaatatatgctgctattgaatatctttgcaatgaacgctaagcaaccttaagtgagttcttgagttgttttgtttgtaattttgagacatcaacatcatgcttttttcttttctatatgtgatccttgaaagtctctgcttgaactctgaccaaagtttggtgtgactattgctgattgtaaaatccagtcgcctgcctcaaaggggagcaagaagtccgcaggccatggtgggcgccggcatgcctctccatagtgttcgtgagggcagccaagcagaacaggaagtcccgtgtcgtctccttgaagctggaaccataatgcttgtcaagcacttggaatcgtcgccgcctgtgctccaatcctccagctctataggaggcagcctgcgcacaccatcgtgcgctagtccagagtggcatggaagctgtctgttttcgctcttggtgcatcatgcacaactggtctctctctctctctctctctctctctctctctctctctctctctctctctcttatcccttgctacttgttcttcatatataggtttggaacagtagtatgttgtagacaaagaaagaaacatataatgtgcagatggtctctggtctgctcttttcttgcaaatcttcctgagtagttatggtggtgcatgcgatttgctaaaagaataaaagattgtctaccacttagttgtccagtgcacctacttcacgaattctggacttat

SEQ ID NO: 30478 - DNA, 1431 bp, Zea Mays
tggagatgctctaagagaagaaccttattttctaagaatttttatttttccaagtaaaattaacttaatttttgtcagaaaaataaaaatcccttaaaaataggactaaactaaccctaagtatacgaaacccaaagtttacggtcctaaaaatcaattatctcacccacgagcgatcgctttctacctcgctatgcccacgagctcgctttctactagctctcgacgcgtcgccgccgaccacagcacggctggcgtgtggatccctcccgctctcctcgccggatctccacccgcctcgctctctctgagtccagtggggcagagatccgtgagcgcgaggactggtcccttcttgggttgggtctcttctccagctcgcgagttcgccactggttgacactgattgtagcacttcgtggtgcctgattggatcgcgggtgcggtttgccctccacaaatttgggtttggttccactgaacccccatgacccaagcgaagtccgctcctggaaggaaggagatgggccgtgggcggtcgccggaaccgctcgatttcttcatatggactgtcgaggatgttggattatggctggaagaaattaaccttggtggctacagacaagtatttgaagaaaatggtgtcaacggagaatatctagaaagcttgtccatgtttactactgagcagattctgcgttttattaggcggtgccatatgaaatggggagactttatcacactgtgcaaagagttgaggcgcattaaagttctacttgacttcataataacatgcaaagtagtctgtttgaaggaaattctcgtttcctcacagatgctattgtttttggcatttacgaaagcatctaaactactggtgtttgaagtgtcgcctgcctcaaaggggagcaagaagtccgcaggccatggtgggcgccggcatgcctctccatagtgttcgtgagggcagccaagcagaacaggaagtcccgtgtcgtctccttgaagctggaaccataatgcttgtcaagcacttggaatcgtcgccgcctgtgctccaatcctccagctctataggaggcagcctgcgcacaccatcgtgcgctagtccagagtggcatggaagctgtctgttttcgctcttggtgcatcatgcacaactggtctctctctctctctctctctctctctctctctctctctctctctctctctcttatcccttgctacttgttcttcatatataggtttggaacagtagtatgttgtagacaaagaaagaaacatataatgtgcagatggtctctggtctgctcttttcttgcaaatcttcctgagtagttatggtggtgcatgcgatttgctaaaagaataaaagattgtctaccacttagttgtccagtgcacctacttcacgaattctggacttat

SEQ ID NO: 30479 - DNA, 1627 bp, Zea Mays
cgtcgtactgtctccctctcgctgaccactcgagcccgtctgtcggcgtggtcgtttcttcgcgcttcgttagctcgctgacaactcgagacccacctgacagcccgtttctgacctgtgggcgatatgctcatatcccatctaacctcccggcggacccacaaatcagcttctaagtatgtaacgctgtctgtggtcgcagcatttgtggcaccctgacgctccagaaccttctccacaaaccgctaaatccaccagcaattcaatcccccatttacctactcactcactgacaatccgaccgaatcggcgggcccgaagtgccagggactaacccctcccatcttcttgctccgcaaggcgcacgcatttatacgtctccctctccccatcgctccccaaaaccctaccacgtctcaaaaccctcgcgaatcgtcatttccgctctctgccacgccggagcccccactgcccaccacccgttcccgcggcctcgccctttgcgtggttgaagaagcgaaagatgctcggggcctctaggcgatccctcagtgccgccgccgccgcccgcagccgcgtggctgccggcgctgcctccgccgtctccgccgacgccgccgcctcaatcccgccccgacccgcgagcaatggagcgccaggggttcatcagcagcagaagaggctgctctcagtgcttgtagcgcccaaggttgcaggaaccagcaatgttgtgtccctcaagctgatgggtggtgcccttactgggagacgctatgaatcgagtgcggcagcagttgactccacggacccgccagctgagaagcatgagtaccaggctgaggtcaacaggctcatggatttgatcgtacacagcttgtatagtaacaaggaagttttccttcgagaactggtcagcaatgctagtgatgctcttgataagttgcgttacctgagtgttacggatcctgagcttctgaaggatggtccccaacttgatattcgcatccaaactgacaaggataatggaataataacaattactgattctgggattggtatgacgaaacaagagcttattgattctcttgggactattgcaagcagtggaactgccaagttcctgaaggcattgaaggagagtcaagaagcgggcatggacaacaacttgattggccaatttggtgttggtttctattccgcatttcttgtttcagagaaggttgttgtatcgacaaagagcccaaaatctgacaaacaatatgtttgggaaggacaagcagattctggttcttataccattagagaggaaaaagacccggagcagctcattcctaggggaactcgccttactctctatctcaagtgtgatgataagggttttgctcaccctgagaggattcaaaaacttctaaagacttactctcagtttgtttcctttcccatttacacatgggaagagaaaggcttcacaaaagaggtcgaggttgatgaagatccagcggaagcccaaaaaaaaggtgatgattcagcggaaaccaaaactgagcctaagaaaaagaccaaaactgttattgagaagtattgggattgggagctttcaaatgagacacaacctatttgggtaagg

SEQ ID NO: 30480 - DNA, 1805 bp, Zea Mays
aaacctaatcctttgataccatgtagaagagtgaactgttggattgataggagatggggtacatatatatagggactcaaccctaaccctaatgggccctaaccctaatgggccggcagcccaacagtggtgccggcccacacactactcacacatagtctaacatgtatgatcccaattcccaaagaacatcttcacacgcaagtgataatacttgatctaatttgacacagggtgaggtagaatttaggtcaattctttttgttcctgctacaaggaaggaagatgtaactgctgatagtaggaagaccaagaatatcagactatatgttaagcgtgtattcatatcagatgactttgatggagaattgttcccaagatatttgagctttgtgaagggtgttgttgactcaaatgaccttccattgaatgtttctcgtgagattcttcaagaaagtcgaattgttcgtataatgagaaaaaggctggtgcggaaagcctttgatatgatacttggcatttcttgcagtgaaaatagagatgttctgggagaactttggaaaatttttaaagctgggtgccatggaagataaggaaaatcacaagagaattgctcctttgttgcgcttcttctcttctcaaagcaacaatgaattaattagcttggatgaatatgtggaaaacatgaaacctgagcagaaggacatttacttcattgctgcagatagtatgagcagtgccataaatgctcctttcttagagagactaacagaaaaagactatgaggttctacttttggtcgaccctatggatgaattggctatccagaatctgagctcctacaaggataagaaatttgtggacattagcaaggaagatttggatttaggtgataacaatgaggaaagagagaaggagataaagcaggagttcagccaagcctgtgactggataaagaatcgcttgggtgacaaggttgcacgtgttgacatatctaatcgtctcaggtcatcgccatgtgttcttgttgcagcgaagtttggttggtcagccaatatggaaaggctgatgagagcacagtctatgggtgatacagcctctttggatttcatgcgttcgaggaaagtttttgaaataaacccagagcatgagataatcaaggccttgaatgtggcatgcaggaataaccctgatgatcctgaagccctaaaggctctggatgttctctttgaaactgctatgatttcaagtggcttttcgcctgacaacccggcggagctcagtgggaagatttacgagatgatgacctctgccatcgctggcaaatggtcctcacagccacaggcgcaggcgcaacctgccgacccaatcccacagcacgacgcacctgtgaggtcagacgagccgcttgaagctcaagtggtggaggcagagcccgttgaggctggtcagcagaagtgagggcctgttcgtgcagaatctttgtacggagtagttttgaaccgttgtgcacaacatggctgagaatttcgagtatttgttttgacggcctgtatctgtgtcatgagctgttactggtaatgtaagacgtattggttagaaattaggagattaggaataatcgggtagctggactacttgaactggttcctgaaccatcaggagggttatggactcatggttagcttctactgcgtccttgggggcagtagtaattttgaagccaattcgttgttttgtaggctctatttctgtttggctttaatacatattggtttctactgtttctacagcgttttgtctct

SEQ ID NO: 30481 - DNA, 530 bp, Zea Mays
gctggagacaaccttaacgcactgctaaaagagctcgacgactacgttgtatgctgatcgattcgtctccgatctcctccttcgaccgccgccaccttcgtctccgagactccgacgatgtcctccgccgccgatgaggatgcgttgtcgtctgacaaggggaagaagagggaggaggacggcactgacgggaggagccaacgtcaggagggtgtcgaggtggccgacgggaaagtggatctaggagacctgtacggcgcggcggcggggtgggtagaggcgcggaccagctgcccgcacatcggcaccatgccacccgctggtgctgacgacctcgcgcgcgtgccttcgcccgactctccgtgctccagatgtaatcaccctgctgaaaactggttatgcttcatatgcaaagatgtgctttgcagccgttttatcaacaaacatatgttgtgccatcatcaagaaactggtcactgtcttgctttgagcttcaggtgggctcctgatcagaccagtgaccactggac

SEQ ID NO: 30482 - DNA, 890 bp, Zea Mays
gctggagacaaccttaacgcactgctaaaagagctcgacgactacgttgtatgctgatcgattcgtctccgatctcctccttcgaccgccgccaccttcgtctccgagactccgacgatgtcctccgccgccgatgaggatgcgttgtcgtctgacaaggggaagaagagggaggaggacggcactgacgggaggagccaacgtcaggagggtgtcgaggtggccgacgggaaagtggatctaggagacctgtacggcgcggcggcggggtgggtagaggcgcggaccagctgcccgcacatcggcaccatgccacccgctggtgctgacgacctcgcgcgcgtgccttcgcccgactctccgtgctccagatgtaatcaccctgctgaaaactggttatgcttcatatgcaaagatgtgctttgcagccgttttatcaacaaacatatgttgtgccatcatcaagaaactggtcactgtcttgctttgagcttcagaaagagggcagacccaatgttggaggctcccacatgacgggggaagggataaaatgagacaagtctttcttccgcaaatgcggagaggctgattcgaacccgttaccttgtgactcaagtgaaacggctctcaccatcaccattgcaccaagtctatccttccgttgttactagaaagaacttaaaacaaaagttctgaagtttctacatctgcattattgatcataaacatgaatttttcaaactctgaacagttactaggccacataaattattatgcaaaaacattacacattaaaatttatggctgctcttttttttccacaatgggaaacctgaatttcattactaaaaagcatctacatcacaaagtagtttgagttacaggcaaac

SEQ ID NO: 30483 - DNA, 1155 bp, Zea Mays
gctggagacaaccttaacgcactgctaaaagagctcgacgactacgttgtatgctgatcgattcgtctccgatctcctccttcgaccgccgccaccttcgtctccgagactccgacgatgtcctccgccgccgatgaggatgcgttgtcgtctgacaaggggaagaagagggaggaggacggcactgacgggaggagccaacgtcaggagggtgtcgaggtggccgacgggaaagtggatctaggagacctgtacggcgcggcggcggggtgggtagaggcgcggaccagctgcccgcacatcggcaccatgccacccgctggtgctgacgacctcgcgcgcgtgccttcgcccgactctccgtgctccagatgtaatcaccctgctgaaaactggttatgcttcatatgcaaagatgtgctttgcagccgttttatcaacaaacatatgttgtgccatcatcaagaaactggtcactgtcttgctttgagcttcaggtaatctgttgaccttgctttgattaattgttatttttactgtaaataaataatattccttaattccacataatattgtattatcctagtttcatgactatgcatggtctcagcctttacctaccagtaagtccgaataataaattctctagtgtttatccctacatacaggattttttgtaacaaataatattatctcaatatcatctgcataactacactggctcaacagtgatctgtcagtttggtgtttctcatgtgattcatacctagatgttcaagccattttagaattgcgcccagtgtatgaagttgcacatttgttgaagtttggacaacgtccaccatttcgatcacttgatgtacaggattctggcactggtgaaagtggaagtgtgtcaagggcttagttatatgtattccagtaatgagtttcttttcatgatacttcaatcagattcagacagacagttgtctactatcctggcatttcttaagctgcagtgcaatataattcatttgagaagccttgtttttttgctctttacttttggttagtatattttgatagctcaaagcatccttacatagtcatcgttgcgtagtttgctgtgtcgagcatgaagcagacgacaggtgtaaagcctgtgtaccatag

SEQ ID NO: 30484 - DNA, 633 bp, Zea Mays
gctggagacaaccttaacgcactgctaaaagagctcgacgactacgttgtatgctgatcgattcgtctccgatctcctccttcgaccgccgccaccttcgtctccgagactccgacgatgtcctccgccgccgatgaggatgcgttgtcgtctgacaaggggaagaagagggaggaggacggcactgacgggaggagccaacgtcaggagggtgtcgaggtggccgacgggaaagtggatctaggagacctgtacggcgcggcggcggggtgggtagaggcgcggaccagctgcccgcacatcggcaccatgccacccgctggtgctgacgacctcgcgcgcgtgccttcgcccgactctccgtgctccagatgtaatcaccctgctgaaaactggttatgcttcatatgcaaagatgtgctttgcagccgttttatcaacaaacatatgttgtgccatcatcaagaaactggtcactgtcttgctttgagcttcagctagcaggaaattaacaaacatggatgaggcgaaggcgtgctccactgtctggtcctggtctggtctgatctgaggcgaagaataattgaacaagaagcagccacagccagggctttcggcagaaagatttttgcc

SEQ ID NO: 30485 - DNA, 1057 bp, Zea Mays
aaactaatggcaggggagagaatcttaaatcccctcctcacccctcctgcctcaccagatttgatgcacacggcatgcaaatcctgcaggctgttgcttctcagcagggccaaaagctgtgcctttggcctagcagtagctaccactagtaccaggagatcttcccgtcccaacatcttcgacagaggaatcagctgtgggagctcgtgaggcagagggcgggcagagacaagatggagaaggaacacatcaagatggccatgctgaggcaagagcaaacattcaggcagcaggttcagaagcagctgatgacgcagacgcagattacccagcaccaccagcaacggtgtggtagctcaggcaagacggaggaggaggaggacttcaacctggagctgacgctggcaacaggggctggaaggacgcggcaggagaagccatccacttcagactccgaagcgaccatgtcgtcgtcgacatctgcagaatcagagcaagctcagaggttcatgcccagttccaatgtaacaaacctaaggttccagggcgagagcaataggcatgatgatcatcaggtcatgcagtctgcttggcgctatcaatgtttaagtctcaagatggcgtgaagggattaattagacagggttggcatgggagtgccctaaacaaaagcaagtgcattgctgcatgtatgtatgtatattacgatttcattgcaactgtaggaacgagctcaaaaaagaaggaaatgataggcaaactaaaatgaaccagacgagaagaaaaagaatcaaatcgtgtctgttgttgttttgtggcaaagagaacagggccacttacatctagataaccagatacagagagtttagttcaagtaaatgtacttttgagcaacaggatcaaagaccgtacaaagatgtcatcatacaagaccaatggacctagtgtaatttgcccaccccttggatccgcctctggtggacataagtgaatgaacgcattggaagcaattcctctatctaaaatctgtaatcgttggtcgataataaaacgacag

SEQ ID NO: 30486 - DNA, 365 bp, Zea Mays
gccagagccatggagaagagccgggtgctggtggtgggcggcaccgggtacatcgggcggcggctcgtgagggcgagcctggcgcaagggcacccgacgctagtcctgctgcggccggagatcggcctggacatcgacaagctccagatgttgctctccttcaaggcccagggcgcgcggctggtggaggcgtcgctggaggaccacgcgggcctcgtcgccgccgtagcgcaggccgacgtggtggtctcagccatgtccggggcgcacatccgcagccacaatctctccctgcagcataagctcgtcgaggccatcaaggaggctgggaacatcaagtttgttaagggtttgtttggttagaa

SEQ ID NO: 30487 - DNA, 2193 bp, Zea Mays
ctccataatataaatacacctatttaaatttgtactagcttcgccacctgtagccacgggtaaaaaaaaagttcacatccaacttgcactctatgtcgcggggaaaatgtgcacatcgtcctgcctacgcaccgcggggaagagagtgcagagaggagagcgaggacaaccaaacaaatcgagccggatgttgcgggaatatcttcctggttgatcgggcgggaacggggaatctgtccaagtgctctccagatctggagtcaaaggatactgccctatttggtctgtccatcccagcctccaagaatacaagcagctgtagaccacgaaactctgcttcgatagcaggagcagcagagagagagacgcacgccggctatcagttcagttcttctgggcatctctcaactcaaggaggagacacgacttggctcttcttcctctccggcgcggcgcggcgcgtgcgtcctattctctctcaggtgctccaggaacaagtgccgtccaccagatccaggctcggcatgttcgtgatcgaggacaagggcggcgccatcgcgctgatgctggcgtcgctcctgttcctgggcacctggccggccgtgctcaccctgctggagcgccggggccgcctgccgcagcacacgtacctggactactccatcaccaacctcctcgcggccgtgctcatcgcgctcaccttcggccagctcggggacagcaggcgcggcatgcccaacttcttcacgcagctcggccaggacaactggccctctgtgctgttcgccatggccgggggcgtcgtgctcagcgtcggcaacctctccacccagtacgcttgggcctatgtgggcctctccgtcactgaggtcatcagctccagcatggtggtggtcataggcaccacgctgaactacttcctggacaaccgcatcaacagggcagagattctgttccctggtgtggcgtgcttcctcgtcgccgtcatccttggctccgctgtccattcctccaatgcagctgacaatgagcagaaactcggtgcctccacgaatgcctacaaactcgggacaagtggaaatgtggaaccaagcaaacaagctgtagacagagaagaaagaacaaatctaatttcagatgctcccaaagacttggaggagagtggagcctctggaatccggcaacctgacaaagctgaggcaggcactgcagagtacctcattgagcttgaagaacggcgatcaattaaggtattcggttcaaacaccttcatcgggctggggatcgtcttcttcgcgggcgtgtgcttctcgctcttctccccggcgttcaacctggccactaacgaccagtggcacacgctcagggacggcgtgccgcacctggtggtgtacaccgccttcttctacttctccatctcctgcttcgtcgtcggcgtcggactcaacgtcctgttcctctaccgccccatggccggcgtgccccgctcctccctcggggcctacctcagggactgggacggccgccagtgggcgctcctcgccggcctgctctgcggcttcggcaacggcttccagttcatgggcggccaggccgcagggtacgccgccgctgacgctgtccaggccctgccgctcgtcagcaccttctggggcgtactgctcttcggggagtaccgcaagtcgtcgcggaagacctacgtcctgctcggcttcatgctcttcatgttcgtcgccgctgtcgccgtgctcatggcttcgtcaggtcacaggagcacagagtgaattgcaagtcttgttcgtcctctgcttgttgcaagcccttccacttgcgattgatccacggaaagatccatcgtcttcgtgaagcaggggaaatccattccttccagccattaatgagatcttcagaacaatggaatggagatgtacaaaaaaatggttgttgtatgattgatcaaatgtatagaactatttatattctttccaagacaattggctgataggataggaactgttccaggggtggaaaaaatctctatctttatgaacagggtaaaagcaatgttcagaaaaaagtagtttgtgcctagtatgacagattcagaatggtatcagtactcccgctgttttggaatgttcaagagaaaactagtggatgctctaaatcttataatcttgcaatgcttctcgg

SEQ ID NO: 30488 - DNA, 2322 bp, Zea Mays
tttttttgttattggatgatgatgatgacgatgatgtcactgaaagagacatgattttgcgcagaatatctctgtgactgtgagcgatgagtattactaccttttgcctgtctaaattcactttccctggactccctgtctgcttgctctggtccctgattggatttggatggagaggggaaacaaacaaggaaatgttcagaaagtcgcggagcgtgcaatggactgagagctatactatacatgtgttgtcgtagagtaattttgcttggaggcaaacgagcggagggtcactgtcatcggcccaaattattttccacggcgatgacgagtgcatcgctcgtccgttccttcctctctcctcctcctcctttccctgctccatccagactccaactaaacgccattggtgaatggatcccaaggaggtcaaactgatgcagagcaagttggacttttcagtcagtggcctggccttgcagatcgctcccgcgaggctggccgaagaggcagggggcttgttagtagtccagtcgctgctataaaataaagcggccatgaaccgtgttctcgctctcgcgtgtgcgtcttctctgctcacatgccgcgaggtgctccaggaacaagtgccgtccaccagatccaggctcggcatgttcgtgatcgaggacaagggcggcgccatcgcgctgatgctggcgtcgctcctgttcctgggcacctggccggccgtgctcaccctgctggagcgccggggccgcctgccgcagcacacgtacctggactactccatcaccaacctcctcgcggccgtgctcatcgcgctcaccttcggccagctcggggacagcaggcgcggcatgcccaacttcttcacgcagctcggccaggacaactggccctctgtgctgttcgccatggccgggggcgtcgtgctcagcgtcggcaacctctccacccagtacgcttgggcctatgtgggcctctccgtcactgaggtcatcagctccagcatggtggtggtcataggcaccacgctgaactacttcctggacaaccgcatcaacagggcagagattctgttccctggtgtggcgtgcttcctcgtcgccgtcatccttggctccgctgtccattcctccaatgcagctgacaatgagcagaaactcggtgcctccacgaatgcctacaaactcgggacaagtggaaatgtggaaccaagcaaacaagctgtagacagagaagaaagaacaaatctaatttcagatgctcccaaagacttggaggagagtggagcctctggaatccggcaacctgacaaagctgaggcaggcactgcagagtacctcattgagcttgaagaacggcgatcaattaaggtattcggttcaaacaccttcatcgggctggggatcgtcttcttcgcgggcgtgtgcttctcgctcttctccccggcgttcaacctggccactaacgaccagtggcacacgctcagggacggcgtgccgcacctggtggtgtacaccgccttcttctacttctccatctcctgcttcgtcgtcggcgtcggactcaacgtcctgttcctctaccgccccatggccggcgtgccccgctcctccctcggggcctacctcagggactgggacggccgccagtgggcgctcctcgccggcctgctctgcggcttcggcaacggcttccagttcatgggcggccaggccgcagggtacgccgccgctgacgctgtccaggccctgccgctcgtcagcaccttctggggcgtactgctcttcggggagtaccgcaagtcgtcgcggaagacctacgtcctgctcggcttcatgctcttcatgttcgtcgccgctgtcgccgtgctcatggcttcgtcaggtcacaggagcacagagtgaattgcaagtcttgttcgtcctctgcttgttgcaagcccttccacttgcgattgatccacggaaagatccatcgtcttcgtgaagcaggggaaatccattccttccagccattaatgagatcttcagaacaatggaatggagatgtacaaaaaaatggttgttgtatgattgatcaaatgtatagaactatttatattctttccaagacaattggctgataggataggaactgttccaggggtggaaaaaatctctatctttatgaacagggtaaaagcaatgttcagaaaaaagtagtttgtgcctagtatgacagattcagaatggtatcagtactcccgctgttttggaatgttcaagagaaaactagtggatgctctaaatcttataatcttgcaatgcttctcgg

SEQ ID NO: 30489 - DNA, 2008 bp, Zea Mays
tgaaaatgcttccttttctctggttgagatcttcccctccccctgccggatctgaatctcatccccgggtggggccgtgggggggactctagctggaggggcactttcttgttcaccatgtttgtcgtgcccttaatacattttttgtagtaccttcctgtcaaaactacaagaaatggagattttggatggatgcatgtgtacatgtctctcggaaggaaaagcccgcaagatcggatcgatcacttacttggctactgctgcctgctgctgcaggtgctccaggaacaagtgccgtccaccagatccaggctcggcatgttcgtgatcgaggacaagggcggcgccatcgcgctgatgctggcgtcgctcctgttcctgggcacctggccggccgtgctcaccctgctggagcgccggggccgcctgccgcagcacacgtacctggactactccatcaccaacctcctcgcggccgtgctcatcgcgctcaccttcggccagctcggggacagcaggcgcggcatgcccaacttcttcacgcagctcggccaggacaactggccctctgtgctgttcgccatggccgggggcgtcgtgctcagcgtcggcaacctctccacccagtacgcttgggcctatgtgggcctctccgtcactgaggtcatcagctccagcatggtggtggtcataggcaccacgctgaactacttcctggacaaccgcatcaacagggcagagattctgttccctggtgtggcgtgcttcctcgtcgccgtcatccttggctccgctgtccattcctccaatgcagctgacaatgagcagaaactcggtgcctccacgaatgcctacaaactcgggacaagtggaaatgtggaaccaagcaaacaagctgtagacagaggtgttcattgtctatctgaagaagaaagaacaaatctaatttcagatgctcccaaagacttggaggagagtggagcctctggaatccggcaacctgacaaagctgaggcaggcactgcagagtacctcattgagcttgaagaacggcgatcaattaaggtattcggttcaaacaccttcatcgggctggggatcgtcttcttcgcgggcgtgtgcttctcgctcttctccccggcgttcaacctggccactaacgaccagtggcacacgctcagggacggcgtgccgcacctggtggtgtacaccgccttcttctacttctccatctcctgcttcgtcgtcggcgtcggactcaacgtcctgttcctctaccgccccatggccggcgtgccccgctcctccctcggggcctacctcagggactgggacggccgccagtgggcgctcctcgccggcctgctctgcggcttcggcaacggcttccagttcatgggcggccaggccgcagggtacgccgccgctgacgctgtccaggccctgccgctcgtcagcaccttctggggcgtactgctcttcggggagtaccgcaagtcgtcgcggaagacctacgtcctgctcggcttcatgctcttcatgttcgtcgccgctgtcgccgtgctcatggcttcgtcaggtcacaggagcacagagtgaattgcaagtcttgttcgtcctctgcttgttgcaagcccttccacttgcgattgatccacggaaagatccatcgtcttcgtgaagcaggggaaatccattccttccagccattaatgagatcttcagaacaatggaatggagatgtacaaaaaaatggttgttgtatgattgatcaaatgtatagaactatttatattctttccaagacaattggctgataggataggaactgttccaggggtggaaaaaatctctatctttatgaacagggtaaaagcaatgttcagaaaaaagtagtttgtgcctagtatgacagattcagaatggtatcagtactcccgctgttttggaatgttcaagagaaaactagtggatgctctaaatcttataatcttgcaatgcttctcgg

SEQ ID NO: 30490 - DNA, 1830 bp, Zea Mays
tgaaaatgcttccttttctctggttgagatcttcccctccccctgccggatctgaatctcatccccgggtggggccgtgggggggactctagctggaggggcactttcttgttcaccatgtgctccaggaacaagtgccgtccaccagatccaggctcggcatgttcgtgatcgaggacaagggcggcgccatcgcgctgatgctggcgtcgctcctgttcctgggcacctggccggccgtgctcaccctgctggagcgccggggccgcctgccgcagcacacgtacctggactactccatcaccaacctcctcgcggccgtgctcatcgcgctcaccttcggccagctcggggacagcaggcgcggcatgcccaacttcttcacgcagctcggccaggacaactggccctctgtgctgttcgccatggccgggggcgtcgtgctcagcgtcggcaacctctccacccagtacgcttgggcctatgtgggcctctccgtcactgaggtcatcagctccagcatggtggtggtcataggcaccacgctgaactacttcctggacaaccgcatcaacagggcagagattctgttccctggtgtggcgtgcttcctcgtcgccgtcatccttggctccgctgtccattcctccaatgcagctgacaatgagcagaaactcggtgcctccacgaatgcctacaaactcgggacaagtggaaatgtggaaccaagcaaacaagctgtagacagagaagaaagaacaaatctaatttcagatgctcccaaagacttggaggagagtggagcctctggaatccggcaacctgacaaagctgaggcaggcactgcagagtacctcattgagcttgaagaacggcgatcaattaaggtattcggttcaaacaccttcatcgggctggggatcgtcttcttcgcgggcgtgtgcttctcgctcttctccccggcgttcaacctggccactaacgaccagtggcacacgctcagggacggcgtgccgcacctggtggtgtacaccgccttcttctacttctccatctcctgcttcgtcgtcggcgtcggactcaacgtcctgttcctctaccgccccatggccggcgtgccccgctcctccctcggggcctacctcagggactgggacggccgccagtgggcgctcctcgccggcctgctctgcggcttcggcaacggcttccagttcatgggcggccaggccgcagggtacgccgccgctgacgctgtccaggccctgccgctcgtcagcaccttctggggcgtactgctcttcggggagtaccgcaagtcgtcgcggaagacctacgtcctgctcggcttcatgctcttcatgttcgtcgccgctgtcgccgtgctcatggcttcgtcaggtcacaggagcacagagtgaattgcaagtcttgttcgtcctctgcttgttgcaagcccttccacttgcgattgatccacggaaagatccatcgtcttcgtgaagcaggggaaatccattccttccagccattaatgagatcttcagaacaatggaatggagatgtacaaaaaaatggttgttgtatgattgatcaaatgtatagaactatttatattctttccaagacaattggctgataggataggaactgttccaggggtggaaaaaatctctatctttatgaacagggtaaaagcaatgttcagaaaaaagtagtttgtgcctagtatgacagattcagaatggtatcagtactcccgctgttttggaatgttcaagagaaaactagtggatgctctaaatcttataatcttgcaatgcttctcgg

SEQ ID NO: 30491 - DNA, 901 bp, Zea Mays
attgaatataatctatctatcgtcccaactcacggtattggagtagttattttttatcgccgtactcacggtacaggagtagttattttttatgtgtcacatcttccgacgattgaaccccaactctccaaagtccaaagcccccaaaacccaaaaccctgcgaccccaagataccaaagccagcagcagaagccgatgcccatgcagccgcaggcgccatcgatgaccccggccgccggaatcaccacggagcagatccaaaagtatctggatgagaataagcagcttattttggccattttggaaaatcagaacctaggaaaattggcagaatgtgctcagtatcagtcacaacttcagaagaacctcttgtatctcgctgcaatcgcagatgcccaaccagagactgctgtaagccggcctcaggaaatcaactgggaggcctgcacaacctttatggccctaagctggtggaaacatgtttatgggaacgatgagaaagccatgtgccaagttagtgaaattgctttgaaaaatcgtgccatgttggcatgtgctcatgttaaatagccctttggacaactatcatctttggatgctgctctcattggagagggaagccattctcagaactgttcttagtgagtgtttagtttctagtgacagtctctctattttattcaattttagtccctaaattaccaaatttattgagaaattaatatatcttaaatttgattaaatacatcaaaaaagctgttgatgcttatgatgtataattaatgtccttagataaaatacatttttataataaatccatttacatagatacagtgttgattattttaatatataaatatagttaaattaaaaaaacatttggcttgatgtgaacttatg

SEQ ID NO: 30492 - DNA, 1562 bp, Zea Mays
ccaaagcccccaaaacccaaaaccctgcgaccccaagataccaaagccagcagcagaagccgatgcccatgcagccgcaggcgccatcgatgaccccggccgccggaatcaccacggagcagatccaaaagtatctggatgagaataagcagcttattttggccattttggaaaatcagaacctaggaaaattggcagaatgtgctcagtatcagtcacaacttcagaagaacctcttgtatctcgctgcaatcgcagatgcccaaccagagactgctgtaagccggcctcagatggcgccgcctggtgcatcgcctggagtagggcagtacatgtcacaggtgcctatgttcccgccgaggacacctctaacgccacagcagatgctggagcagcaacttcagcaacagcaagctcaattgctaaacttcagtggccaaatggttgctaggcctggcatggttaacggcatgcttcaggccatgcaagtccaacaagctcagccatcgccggtaatgaacagaccggatgctggtgggatcgcctcggagccctctggcactgagagccacaggactagcactggtggcgataatggcggtggaagcgactagtccaaagagtcttgaggatttacgagctagccttgtaggttgcaaaatatgcacgtatactgccgatgaccaaagagaggatcgatcctgcgcccttagttgataagtggccatgatctttgcatggatgatcagtagctgtcacggttttatctttgttgccagtctgtagaacacacgtatagattgttgtgacatttatttgcttgctgtttccacaatgtactgtcgtagacttggagccatatgctagtttatggcttcaggagctggatttcagttacgagctgtgatggcaaaactttcaactcttcaggtagctggattcatttatgttatatgttacaagtttcatatctgtcaccaaattggaagcagaaatcaactgggaggcctgcacaacctttatggccctagtatgtactaccaggcttataggaaactatgttgattcaaatcttttgcaaggtctgatagtcaccatttcttcggtgtcctaatacaatggagcagagctggtggaaacatgtttatgggaacgatgagaaagccatgtgccaagttagtgaaattgctttgaaaaatcgtgccatgttggcatgtgctcatgttaaatagccctttggacaactatcatctttggatgctgctctcattggagagggaagccattctcagaactgttcttagtgagtgtttagtttctagtgacagtctctctattttattcaattttagtccctaaattaccaaatttattgagaaattaatatatcttaaatttgattaaatacatcaaaaaagctgttgatgcttatgatgtataattaatgtccttagataaaatacatttttataataaatccatttacatagatacagtgttgattattttaatatataaatatagttaaattaaaaaaacatttggcttgatgtgaacttatg

SEQ ID NO: 30493 - DNA, 2079 bp, Zea Mays
cccgtgtgcccgcctgcacgcgccacaacctgcccagcgcgaaaggggctaaaaaacaaacaaacagagcgcacaggagagcaaccactcgccccgctcgcccaccacgatctccctcccctccgcacgccgcgcggggcgttgcagacccagccaaaggcaagccatgaaccggagcacgccggccggtcgcgggcgtcgtcatcgcctcccacgccgccgccctgctgctcgctcccgcattggatcgcgctgtggttggcgactcggtgtggtctgctgctggtgactgaagccggcccacgcggagacgatgagccgctgctcttcgcttctcgccactcccttgccttctctctctctctctatctatctcgtgttatgttatgtgtggaggagcccggagccctgcgctgcggaacagaagcttccgccggatctctctctctactaggccgcggattactaacgcgtctcccattccatacttggtagccatggcatgcaaccccggcctcaatcatctgctattaaaatgatggacagcgcagacaaggactctattgtactctcctctgattcgtcgattcgcccccgttatattcaactcaaaagtgatggaggacgaggaggcatacgacctgcctgcgttccaggagttcaccttcgagcagttgcggctagctacatcggggtttgcggtggagaacatcgtgtccgagcaaggtgagaaggcgcccaatgtggtatacaaggggaagcttgatgcccagcgccgcattgctgtcaagcgctttaaccgctctgcctggcccgacccgcgccagttcctgataccatatgatgaagtgggaaaactatgcctaccagagcggaatatgggggcctgggcgggttttctttatgaaaagggactgctaacactttccataaggcttcttttcatttaccagggcactgttcttgttatggatcagatgggatacaatgctgatcgcacaccattcacgaacatctcaaacaccattattacaggtacgaacactaatccacaaagttacattgtaggtaatcaaaatgaatcgaactcgcttggaccaattgtcgatgctagggaacatagctttccagatgactgtagcaccattgatttcaaaattttgtcaacacaaggcattgcaggtggagacgaacaagtaaacgtggatccagatgatgatagcgattggttgcatagaaatgagacattccaggcaaacaacattgtcgcaagtaatgaccttctgacaacaggttgtgtgcatgaaagtgttgataacacacctaatcatactatgaaaagggccgcctactttagtgagcggtacaaaaacttaactcccgtcgagagggagtctaggcgtgaacgccttaggttgtataataagacaccaagacggaaagatgcaaagacagagtacggcagaaaacgtagagcactgcaatctgacactttcaatcaggagtccatcgccatggaggacccaacatatacccctgaggttggacgtcatagaacagatgcaacacaaccgtatggatcctcagttaccacttgcgactgggttatccctgaattcgtcgggacacctttcctgccaacttcaatacagaccgaggatgttggttcactcactatgtctactgagccactaagtcgtaaacatcatgtgctatctggggcaagaccagctatcttaggtagtcgaaaccaacaatttgaagctgccatttcaaggaacgtggctacggtgactgaggatacaatcagtgacgccgtggaaggggacgattggacacaaccccatacgactacagagatccacaacaatggtgacgatgatgagggtgtcatattcgaagaggatgatgatgataacgatggatacctattcgctgggcaatatgatgagaccgacgaggacatcaagatcgatgggtttgaacttgaaacaggtatacacaaggtcattgattgctgcattctgcttccatgcataccaacagagcgtaatgtaggcgttcacagttcgtgttctg

SEQ ID NO: 30494 - DNA, 2570 bp, Zea Mays
ccaaaggcaagccatgaaccggagcacgccggccggtcgcgggcgtcgtcatcgcctcccacgccgccgccctgctgctcgctcccgcattggatcgcgctgtggttggcgactcggtgtggtctgctgctggtgactgaagccggcccacgcggagacgatgagccgctgctcttcgcttctcgccactcccttgccttctctctctctctctatctatctcgtgttatgttatgtgtggaggagcccggagccctgcgctgcggaacagaagcttccgccggatctctctctctactaggccgcggattactaacgcgtctcccattccatacttggtagccatggcatgcaaccccggcctcaatcatctgctattaaaatgatggacagcgcagacaaggactctattgtactctcctctgattcgtcgattcgcccccgttatattcaactcaaaagtgatggaggacgaggaggcatacgacctgcctgcgttccaggagttcaccttcgagcagttgcggctagctacatcggggtttgcggtggagaacatcgtgtccgagcaaggtgagaaggcgcccaatgtggtatacaaggggaagcttgatgcccagcgccgcattgctgtcaagcgctttaaccgctctgcctggcccgacccgcgccagttcctgatcgaactggttaatgtgaagttacacatgtagctagaaatggccatagaagacctacaagacgtaaggttttgttcctgaaaaaggactgttaacacttttcataaggctcctttttatttactaggttttctttatgaaaagggactgctaacactttccataaggcttcttttcatttaccagggcactgttcttgttatggatcagatgggatacaatgctgatcgcacaccattcacgaacatctcaaacaccattattacaggtacgaacactaatccacaaagttacattgtaggtaatcaaaatgaatcgaactcgcttggaccaattgtcgatgctagggaacatagctttccagatgactgtagcaccattgatttcaaaattttgtcaacacaaggcattgcaggtggagacgaacaagtaaacgtggatccagatgatgatagcgattggttgcatagaaatgagacattccaggcaaacaacattgtcgcaagtaatgaccttctgacaacaggttgtgtgcatgaaagtgttgataacacacctaatcatactatgaaaagggccgcctactttagtgagcggtacaaaaacttaactcccgtcgagagggagtctaggcgtgaacgccttaggttgtataataagacaccaagacggaaagatgcaaagacagagtacggcagaaaacgtagagcactgcaatctgacactttcaatcaggagtccatcgccatggaggacccaacatatacccctgaggttggacgtcatagaacagatgcaacacaaccgtatggatcctcagttaccacttgcgactgggttatccctgaattcgtcgggacacctttcctgccaacttcaatacagaccgaggatgttggttcactcactatgtctactgagccactaagtcgtaaacatcatgtgctatctggggcaagaccagctatcttaggtagtcgaaaccaacaatttgaagctgccatttcaaggaacgtggctacggtgactgaggatacaatcagtgacgccgtggaaggggacgattggacacaaccccatacgactacagagatccacaacaatggtgacgatgatgagggtgtcatattcgaagaggatgatgatgataacgatggatacctattcgctgggcaatatgatgagaccgacgaggacatcaagatcgatgggtttgaacttgaaacagcccaatcacctctggttctcaagtatggggaggaagggaaggtggtggagcgagtgaacctcgccactcagcagctgcgcctactgccgaagcccgttgtccggatctgcggtctcctcgcgctcgacgtctcccgcgaccagctcaaggttagatactccatcccgcgcaggcaacaccggcaagatccacggactacggtccctgtggcgtcggcaccgagtccgacgcggaagacgccgccgaagggggaggaggcagagggaagcccgcggaacaaagctccccgcctggacgacgctgctcggactacggttcctgtggcgtcggcaccgagtccgacgcagaagacgacgctgaagggggggaggagacggagggaagcctgcagaagaaatctccacggcccgcggaggctctgcctgtggctacgtgatccagaaagaggatactgcttcaagtgtaacactgaggtgctaatgttgggcaaatgtggagaagacaacaacgagggtggtcttgaactgatctgcgatattgtcagtcagttgccggatcaaccatctgttgaatctgtgtcactgtgtgtggaggctgaaagtctcaacgaagaagattcatctctgcaccgaccacgagcacaaccagtacctctaagctaa

SEQ ID NO: 30495 - DNA, 1621 bp, Zea Mays
ctcttcgcttctcgccactcccttgccttctctctctctctctatctatctcgtgttatgttatgtgtggaggagcccggagccctgcgctgcggaacagaagcttccgccggatctctctctctactaggccgcggattactaacgcgtctcccattccatacttggtagccatggcatgcaaccccggcctcaatcatctgctattaaaatgatggacagcgcagacaaggactctattgtactctcctctgattcgtcgattcgcccccgttatattcaactcaaaagtgatggaggacgaggaggcatacgacctgcctgcgttccaggagttcaccttcgagcagttgcggctagctacatcggggtttgcggtggagaacatcgtgtccgagcaaggtgagaaggcgcccaatgtggtatacaaggggaagcttgatgcccagcgccgcattgctgtcaagcgctttaaccgctctgcctggcccgacccgcgccagttcctgataccatatgatgaagtgggaaaactatgcctaccagagcggaatatgggggcctgggcgggttttctttatgaaaagggactgctaacactttccataaggcttcttttcatttaccagggcactgttcttgttatggatcagatgggatacaatgctgatcgcacaccattcacgaacatctcaaacaccattattacaggtacgaacactaatccacaaagttacattgtaggtaatcaaaatgaatcgaactcgcttggaccaattgtcgatgctagggaacatagctttccagatgactgtagcaccattgatttcaaaattttgtcaacacaaggcattgcaggtggagacgaacaagtaaacgtggatccagatgatgatagcgattggttgcatagaaatgagacattccaggcaaacaacattgtcgcaagtaatgaccttctgacaacaggttgtgtgcatgaaagtgttgataacacacctaatcatactatgaaaagggccgcctactttagtgagcggtacaaaaacttaactcccgtcgagagggagtctaggcgtgaacgccttaggttgtataataagacaccaagacggaaagatgcaaagacagagtacggcagaaaacgtagagcactgcaatctgacactttcaatcaggagtccatcgccatggaggacccaacatatacccctgaggttggacgtcatagaacagatgcaacacaaccgtatggatcctcagttaccacttgcgactgggttatccctgaattcgtcgggacacctttcctgccaacttcaatacagaccgaggatgttggttcactcactatgtctactgagccactaagtcgtaaacatcatgtgctatctggggcaagaccagctatcttaggtagtcgaaaccaacaatttgaagctgccatttcaaggaacgtggctacggtgactgaggatacaatcagtgacgccgtggaaggggacgattggacacaaccccatacgactacagagatccacaacaatgtacaatgtacgaatccatgtcaaggtgctaccttggcaacaaatgtgagtgaaggcatggctgaacaaagagt

SEQ ID NO: 30496 - DNA, 1326 bp, Zea Mays
atggaggacgaggaggcatacgacctgcctgcgttccaggagttcaccttcgagcagttgcggctagctacatcggggtttgcggtggagaacatcgtgtccgagcaaggtgagaaggcgcccaatgtggtatacaaggggaagcttgatgcccagcgccgcattgctgtcaagcgctttaaccgctctgcctggcccgacccgcgccagttcctggttttgttcctgaaaaaggactgttaacacttttcataaggctcctttttatttactaggttttctttatgaaaagggactgctaacactttccataaggcttcttttcatttaccagggcactgttcttgttatggatcagatgggatacaatgctgatcgcacaccattcacgaacatctcaaacaccattattacaggtacgaacactaatccacaaagttacattgtaggtaatcaaaatgaatcgaactcgcttggaccaattgtcgatgctagggaacatagctttccagatgactgtagcaccattgatttcaaaattttgtcaacacaaggcattgcaggtggagacgaacaagtaaacgtggatccagatgatgatagcgattggttgcatagaaatgagacattccaggcaaacaacattgtcgcaagtaatgaccttctgacaacaggttgtgtgcatgaaagtgttgataacacacctaatcatactatgaaaagggccgcctactttagtgagcggtacaaaaacttaactcccgtcgagagggagtctaggcgtgaacgccttaggttgtataataagacaccaagacggaaagatgcaaagacagagtacggcagaaaacgtagagcactgcaatctgacactttcaatcaggagtccatcgccatggaggacccaacatatacccctgaggttggacgtcatagaacagatgcaacacaaccgtatggatcctcagttaccacttgcgactgggttatccctgaattcgtcgggacacctttcctgccaacttcaatacagaccgaggatgttggttcactcactatgtctactgagccactaagtcgtaaacatcatgtgctatctggggcaagaccagctatcttaggtagtcgaaaccaacaatttgaagctgccatttcaaggaacgtggctacggtgactgaggatacaatcagtgacgccgtggaaggggacgattggacacaaccccatacgactacagagatccacaacaatgtacaatgtacgaatccatgtcaaggtgctaccttggcaacaaatgtgagtgaaggcatggctgaacaaagagt

SEQ ID NO: 30497 - DNA, 1604 bp, Zea Mays
gaactgacatgtgcactttggtccagtcttgctgaagaagaaagcgggaggaagccgaagccgagtagaaaggaaccaaataagacctcggtcaaaatttggagaaaggaaccaaacaccccattttttgccgcttcggaggcaccttcgaacaaagcccaaaagcagccagcgcaccgcatgtcctcgtcttcggcgcaccagaaggcgtcgccgccgatagaggaggaagcgacggagcacggacccttccccatcgaacagctacaggcatctggaatagctgcacttgatgtgaaaaaactcaaagatgctggtctctgcacagtggaatctgtagcatactctccaaggaaagaccttttgcaaattaaagggattagtgaagccaaagtcgacaagataattgaagcagcttccaagttggttccactcggatttactagtgctagccaacttcatgcacagagacttgagatcatccagcttacaactggatctagagagcttgatcaaattttggacggtggaatagaaacaggatctatcacagagatgtatggtgaatttcgctccgggaagactcagttgtgccacactctctgtgtcacatgtcagctcccattggaccaaggtggtggtgaaggaaaggctttgtatattgatgcagagggtacattcaggcctcaaagaattctccagatagcagacaggtttggcttgaatggcgctgatgtactagagaatgtggcttatgccagagcatataacactgatcatcaatcaagacttttgctagaagcagcctccatgatgaggggagctatcagcaaggcagatgcatctggcgaagtttcttaggagccttcaaaagttagcagatgagtttggagtggcagtggtaatcacgaaccaagtagtggctcaagtggatggtgctgcaatgtttgctgggccacagatcaagcccattggagggaacatcatggctcatgcttccacaactaggctctttcttcgcaagggaagaggggaggagcggatctgcaaagtaatcagctctccctgcctggctgaagctgaagcaaggtttcagatatcatctgagggtgtcactgatgtcaaggactgaaagcatcctcatttgcagtccacagcataacttgccaattcagacgaatctctgatctgctgcactcgtgtcggtcccttgtacaatcaaaataccagtacaggcttccagaatgcgaatgcaaatccgttggagtgtggcactgtcatcctgttgtctttaggtaccatctaaagttggcattgttgtaaagtggtagagcgcaaggctctactttgtagccgtggattcgagccctatggtgggcgttatttaatttttttggcgaaaaagcctttaattgagttgtttaggtgatatgaataactctttaggtcatggagttcgactccatgggagtttaagctgggttaaaaaaaattatggtcacgatctttttcacatgggctactgtaacatctcgtctactcctgaaccgatgttaagctttttaggactatagatcatcttcatatatcaacatgagtttttt

SEQ ID NO: 30498 - DNA, 1863 bp, Zea Mays
gaactgacatgtgcactttggtccagtcttgctgaagaagaaagcgggaggaagccgaagccgagtagaaaggaaccaaataagacctcggtcaaaatttggagaaaggaaccaaacaccccattttttgccgcttcggaggcaccttcgaacaaagcccaaaagcagccagcgcaccgcatgtcctcgtcttcggcgcaccagaaggcgtcgccgccgatagaggaggaagcgacggagcacggacccttccccatcgaacagctacaggcatctggaatagctgcacttgatgtgaaaaaactcaaagatgctggtctctgcacagtggaatctgtagcatactctccaaggaaagaccttttgcaaattaaagggattagtgaagccaaagtcgacaagataattgaagcagcttccaagttggttccactcggatttactagtgctagccaacttcatgcacagagacttgagatcatccagcttacaactggatctagagagcttgatcaaattttggacggtggaatagaaacaggatctatcacagagatgtatggtgaatttcgctccgggaagactcagttgtgccacactctctgtgtcacatgtcagctcccattggaccaaggtggtggtgaaggaaaggctttgtatattgatgcagagggtacattcaggcctcaaagaattctccagatagcagacagagcatataacactgatcatcaatcaagacttttgctagaagcagcctccatgatggtagagaccaggtttgctctcatggttgtggatagtgctacagccctttacagaactgatttctctggtagaggggagctatcagcaaggcagatgcatctggcgaagtttcttaggagccttcaaaagttagcagatgaggtaaccagcttgtcctttcaccgctcatgatttatggaaggttaggtatattgcaatacatgcatttgtcctcatgcaaacgttactttactgctatgaaattaccggacaactattgattctgcggcaagctttttaataagttaaccaaatatagcaacgacatattgagtctcatgtctatttggtacacatagtattttttattgtttttggtcctttatgtctggctctagtttggagtggcagtggtaatcacgaaccaagtagtggctcaagtggatggtgctgcaatgtttgctgggccacagatcaagcccattggagggaacatcatggctcatgcttccacaactaggctctttcttcgcaagggaagaggggaggagcggatctgcaaagtaatcagctctccctgcctggctgaagctgaagcaaggtttcagatatcatctgagggtgtcactgatgtcaaggactgaaagcatcctcatttgcagtccacagcataacttgccaattcagacgaatctctgatctgctgcactcgtgtcggtcccttgtacaatcaaaataccagtacaggcttccagaatgcgaatgcaaatccgttggagtgtggcactgtcatcctgttgtctttaggtaccatctaaagttggcattgttgtaaagtggtagagcgcaaggctctactttgtagccgtggattcgagccctatggtgggcgttatttaatttttttggcgaaaaagcctttaattgagttgtttaggtgatatgaataactctttaggtcatggagttcgactccatgggagtttaagctgggttaaaaaaaattatggtcacgatctttttcacatgggctactgtaacatctcgtctactcctgaaccgatgttaagctttttaggactatagatcatcttcatatatcaacatgagtttttt

SEQ ID NO: 30499 - DNA, 1911 bp, Zea Mays
gaactgacatgtgcactttggtccagtcttgctgaagaagaaagcgggaggaagccgaagccgagtagaaaggaaccaaataagacctcggtcaaaatttggagaaaggaaccaaacaccccattttttgccgcttcggaggcaccttcgaacaaagcccaaaagcagccagcgcaccgcatgtcctcgtcttcggcgcaccagaaggcgtcgccgccgatagaggaggaagcgacggagcacggacccttccccatcgaacagctacaggcatctggaatagctgcacttgatgtgaaaaaactcaaagatgctggtctctgcacagtggaatctgtagcatactctccaaggaaagaccttttgcaaattaaagggattagtgaagccaaagtcgacaagataattgaagcagcttccaagttggttccactcggatttactagtgctagccaacttcatgcacagagacttgagatcatccagcttacaactggatctagagagcttgatcaaattttggacggtggaatagaaacaggatctatcacagagatgtatggtgaatttcgctccgggaagactcagttgtgccacactctctgtgtcacatgtcagctcccattggaccaaggtggtggtgaaggaaaggctttgtatattgatgcagagggtacattcaggcctcaaagaattctccagatagcagacaggtttggcttgaatggcgctgatgtactagagaatgtggcttatgccagagcatataacactgatcatcaatcaagacttttgctagaagcagcctccatgatggtagagaccaggtttgctctcatggttgtggatagtgctacagccctttacagaactgatttctctggtagaggggagctatcagcaaggcagatgcatctggcgaagtttcttaggagccttcaaaagttagcagatgaggtaaccagcttgtcctttcaccgctcatgatttatggaaggttaggtatattgcaatacatgcatttgtcctcatgcaaacgttactttactgctatgaaattaccggacaactattgattctgcggcaagctttttaataagttaaccaaatatagcaacgacatattgagtctcatgtctatttggtacacatagtattttttattgtttttggtcctttatgtctggctctagtttggagtggcagtggtaatcacgaaccaagtagtggctcaagtggatggtgctgcaatgtttgctgggccacagatcaagcccattggagggaacatcatggctcatgcttccacaactaggctctttcttcgcaagggaagaggggaggagcggatctgcaaagtaatcagctctccctgcctggctgaagctgaagcaaggtttcagatatcatctgagggtgtcactgatgtcaaggactgaaagcatcctcatttgcagtccacagcataacttgccaattcagacgaatctctgatctgctgcactcgtgtcggtcccttgtacaatcaaaataccagtacaggcttccagaatgcgaatgcaaatccgttggagtgtggcactgtcatcctgttgtctttaggtaccatctaaagttggcattgttgtaaagtggtagagcgcaaggctctactttgtagccgtggattcgagccctatggtgggcgttatttaatttttttggcgaaaaagcctttaattgagttgtttaggtgatatgaataactctttaggtcatggagttcgactccatgggagtttaagctgggttaaaaaaaattatggtcacgatctttttcacatgggctactgtaacatctcgtctactcctgaaccgatgttaagctttttaggactatagatcatcttcatatatcaacatgagtttttt

SEQ ID NO: 30500 - DNA, 1374 bp, Zea Mays
cccggcgacctccttcccaaatcctagcccccccccaccctagcaccaccgcggcctgccttctctgggcgggtccttcccagatccatcacgggaggttaaaaaggaggcgggcaggtggtggatggacgggccgaagcgacacctgcgggtgcgcctccgcgtcactgcgcgccggcggggcgcctacggcgatggcgctggaggcgcgttggggcccaggcggcggaagtgccggatggagacccccgttctcaactccgctgccaagcttcagcgccgcgagatcgggggtcgccagctcgcggcacgcggcggcggccccgccgccgccgtgcccgagcgcttccggaacatgcagctccaggaggagttcgatacatatgatgacaatgctaacctatttgtgaagctgcagtttcttaaaagaagatccaaaattaatgagattgttgcagcaaaggatatcatatttgcccttgctaattctgggctttgtgctgcttttaaccgagtaacaaacaagcgcataggcttcttgaatttgagcccagatgaagtgattcggagcttgttctacaacaagaacaacgattcccttattaccgtttcagtttatgcatctgacaatttcagcacattgaagtgcagaacaaccccggttgagtatattagaaggaaccagttagatgctgggtttcccctctttgaatcagagtctctgaaatggcctggatttgtggagtttgatgacgtaaatggaaaagtactcacatattcagcgcaggatggtatatataaggtctttgacttgaagaactactacttcctatattcaataccagatgaaaatgtgcaggagataaagatcagtccaggaatcatgctcttgatatacgacagaacaccaagttatgtcccattgaagatattatctattgaagatgggaaacaactgaaattttttaagcacttgttacatcgcaacaagaaaattgatttcattgagcagttcaatgagaagctccttgtcaagcaagaggacgaaaacttccagatacttgatgtgcggagttctgagctaattgaagtcaatgtctccaagtttatgaccccttcagcattcatttttctttatgagaacaatctcttcttgacattccgaaacagaacagtcgctgtatggaacttccgaggagatcttgtgacttcatttgaggaccatttactttggcatcatgattgtagcaccaacaatatttacatcactagcgaccaggatcttattatctcatactgcaaatcggaggcagtggctgaggatggtacagccatggcgaggatgacagagtggctgacattgaggtcgagcag

SEQ ID NO: 30501 - DNA, 1352 bp, Zea Mays
cccggcgacctccttcccaaatcctagcccccccccaccctagcaccaccgcggcctgccttctctgggcgggtccttcccagatccatcacgggaggttaaaaaggaggcgggcaggtggtggatggacgggccgaagcgacacctgcgggtgcgcctccgcgtcactgcgcgccggcggggcgcctacggcgatggcgctggaggcgcgttggggcccaggcggcggaagtgccggatggagacccccgttctcaactccgctgccaagcttcagcgccgcgagatcgggggtcgccagctcgcggcacgcggcggcggccccgccgccgccgtgcccgagcgcttccggaacatgcagctccaggaggagttcgatacatatgatgacaatgctaacctatttgtgaagctgcagtttcttaaaagaagatccaaaattaatgagattgttgcagcaaaggatatcatatttgcccttgctaattctgggctttgtgctgcttttaaccgagtaacaaacaagcgcataggcttcttgaatttgagcccagatgaagtgattcggagcttgttctacaacaagaacaacgattcccttattaccgtttcagtttatgcatctgacaatttcagcacattgaagtgcagaacaaccccggttgagtatattagaaggaaccagttagatgctgggtttcccctctttgaatcagagtctctgaaatggcctggatttgtggagtttgatgacgtaaatggaaaagtactcacatattcagcgcaggatggtatatataaggtctttgacttgaagaactactacttcctatattcaataccagatgaaaatgtgcaggagataaagatcagtccaggaatcatgctcttgatatacgacagaacaccaagttatgtcccattgaagatattatctattgaagatgggaaacaactgaaattttttaagcacttgttacatcgcaacaagaaaattgatttcattgagcagttcaatgagaagctccttgtcaagcaagaggacgaaaacttccagatacttgatgtgcggagttctgagctaattgaagtcaatgtctccaagtttatgaccccttcagcattcatttttctttatgagaacaatctcttcttgacattccgaaacagaacagtcgctgtatggaacttccgaggagatcttgtgacttcatttgaggaccatttactttggcatcatgattgtagcaccaacaatatttacatcactagcgaccaggatcttattatctcatactgcaaatcggaggcagtggctgaggatggtacagccatggcgaggatgacagagt

SEQ ID NO: 30502 - DNA, 1279 bp, Zea Mays
gatgagagaagtaacaaacaagcgcataggcttcttgaatttgagcccagatgaagtgattcggagcttgttctacaacaagaacaacgattcccttattaccgtttcagtttatgcatctgacaatttcagcacattgaagtgcagaacaaccccggttgagtatattagaaggaaccagttagatgctgggtttcccctctttgaatcagagtctctgaaatggcctggatttgtggagtttgatgacgtaaatggaaaagtactcacatattcagcgcaggatggtatatataaggtctttgacttgaagaactactacttcctatattcaataccagatgaaaatgtgcaggagataaagatcagtccaggaatcatgctcttgatatacgacagaacaccaagttatgtcccattgaagatattatctattgaagatgggaaacaactgaaattttttaagcacttgttacatcgcaacaagaaaattgatttcattgagcagttcaatgagaagctccttgtcaagcaagaggacgaaaacttccagatacttgatgtgcggagttctgagctaattgaagtcaatgtctccaagtttatgaccccttcagcattcatttttctttatgagaacaatctcttcttgacattccgaaacagaacagtcgctgtatggaacttccgaggagatcttgtgacttcatttgaggaccatttactttggcatcatgattgtagcaccaacaatatttacatcactagcgaccaggatcttattatctcatactgcaaatcggaggcagtggctgaggatggtacagttggatccatcaacatgagcgagatcatgactggcaagtgtatcgccaagattactgccaacgatcctgccctaagtgcgccccctcgcagaaatggtcgcagcaagcggcggtcctcggtctggagcaccgttccagaagctctggaggacgtcacggcactgttctatgacgaggacaggaatgagatctacaccggcaacagtcatggactggtgcatgtatggtctaactagatggtaacatgtccatacatctcgcccttttgatttgacttggctagcctgactgcattctgtataatccccggcttggggctcacctagattttgtatttggcaatagaatgtgtttccttgagaaattgtgaatgcaaatcgttataaatatctcatgttcgtctaccttgttcgagtaacatagaagaaattagcctccaaatctaactttgc

SEQ ID NO: 30503 - DNA, 1398 bp, Zea Mays
atagtcccaacatgtaccttgtagttggtagcttgagtcgtatatatccagtttgcttggcaattagttcagtccagttgctgcacttgctgtgcgtgtcttctacctccagcccagtgtgtgtgtttaataacaaacaagcgcataggcttcttgaatttgagcccagatgaagtgattcggagcttgttctacaacaagaacaacgattcccttattaccgtttcagtttatgcatctgacaatttcagcacattgaagtgcagaacaaccccggttgagtatattagaaggaaccagttagatgctgggtttcccctctttgaatcagagtctctgaaatggcctggatttgtggagtttgatgacgtaaatggaaaagtactcacatattcagcgcaggatggtatatataaggtctttgacttgaagaactactacttcctatattcaataccagatgaaaatgtgcaggagataaagatcagtccaggaatcatgctcttgatatacgacagaacaccaagttatgtcccattgaagatattatctattgaagatgggaaacaactgaaattttttaagcacttgttacatcgcaacaagaaaattgatttcattgagcagttcaatgagaagctccttgtcaagcaagaggacgaaaacttccagatacttgatgtgcggagttctgagctaattgaagtcaatgtctccaagtttatgaccccttcagcattcatttttctttatgagaacaatctcttcttgacattccgaaacagaacagtcgctgtatggaacttccgaggagatcttgtgacttcatttgaggaccatttactttggcatcatgattgtagcaccaacaatatttacatcactagcgaccaggatcttattatctcatactgcaaatcggaggcagtggctgaggatggtacagttggatccatcaacatgagcgagatcatgactggcaagtgtatcgccaagattactgccaacgatcctgccctaagtgcgccccctcgcagaaatggtcgcagcaagcggcggtcctcggtctggagcaccgttccagaagctctggaggacgtcacggcactgttctatgacgaggacaggaatgagatctacaccggcaacagtcatggactggtgcatgtatggtctaactagatggtaacatgtccatacatctcgcccttttgatttgacttggctagcctgactgcattctgtataatccccggcttggggctcacctagattttgtatttggcaatagaatgtgtttccttgagaaattgtgaatgcaaatcgttataaatatctcatgttcgtctaccttgttcgagtaacatagaagaaattagcctccaaatctaactttgc

SEQ ID NO: 30504 - DNA, 3668 bp, Zea Mays
ccatcttctccaactgaacactccgacttcgccgcgcggaccgcgcccaccttgcgcgagaagctcgccggagacctcagaattcgtgagaccaccgcacacctgcacgtattaaggccacgttcccatcacccgaaacccttgaccaccttccgttatctagaactcaaaagagtcggccgccattaccagggagagctcgaaggggataaatcgggtagtatcgtcccgccgccgctgctgaggtgtgcgtgtggtggtcgcgggtagtgccagaaagcgggaacacacacgagtgagatctagcatcggaagacggctgtggagggtgaattgcccaacagaatcgaagaagaaggccgtggacgcgggcttcaccgtcggggtcgatctaccactccctctgcggggggtgcaggtgtggcaagggaattgtttgaagagatgccagacaggaatgtgaacagctggaacatggcgattgctgcatactcgcaggagaggtcatgggctgatgcagttgctgtgttcaatcgtatgcgcctcgccagattccaacctgatcccgcgacgatggctgtgctgatgtctgcctgtgcacagcttggttctttgtcagttgcaagacaggtgcatgggattttgaggaaaggctgtgtcgaaatgaacttccatgtgctgaattcattgattgacatgtatgctaagtgtggtagtatcagccaagctcatttgttgtttgttgagacacatttaaaggacacagtgtcttacaatgtgatgatctgtgctcttgcacgccatggacatggcagagatgcacttcaggtcttcgatgagatgtctaaggaacgattgcagccagatgcggtcactttgcttggcgttttgtcagcttgtgctcatgctggactagttcatgatgggaagttctactttgaatctatgaaaacaaattatgcaattgagcaatccccagatcactatgcatgcatggtggatctctatggccgagctggactcattaaggaagcatacgaattagcacgggcaatgccaatggaaccacatgcaggtgtctggggagccttgatcaatgcatgcaggaagcattgcaatgttgaagtcggtaaggttgcagcgagagagctcattgctattgaacccaggaatcctggaacttatgtactccttgccaacacgttggctcgtggtcagcaatgggaatttgttgagactgtgtggcaatcaatgagaggaaagggtattgagaaaacagcagggtgcagttggcttgaagtggaaaatgttgttcatgagttcttgatgggagagtccagccaccctaattccgatgagatttacagcatccttgagcatctgtatctacaactgacttaagtttggtcttttgctataaaggagacgagatcattatgctggatgcctccatatgcagtgtcaggctgtaaaaccatgaagaaatttgtatcagtcatttttatcaagtaggaatcagagacgctgaaggctgtgacttgaaatgtaaaccttttagagcagctgatcaaggatggcttcatttcgtaatgactgaagacacaatgcaatgtacttgaaaatgtggcaaatcatggtattctgcagaagtgcagaatctatgacacgagaaggacaaaaccaagtcaaggtatggtgctgtgatataattgtatttattgtgccaaatttatgccagaactgtacattcttactaagttaccaaaataacagaaattattttatcatttgaatgatcagaaaggctttttgttctttcactaaaacattgtagagagattgataaataaagtagcagatattcataacctgtttgtgtttcatatattttgtacacatgcctccattcatctttaactgctctcacgaggtggaggtttagatcctgaatctcttgtcgagctgacatttattagagctggtggattggatcttaaggaaagattaatgcagatgaattcagtgcttcatatttcttgattttatcttggcacaactactgaaacctaaatagaagatttggcacaggaaacataattatttcttgaatttagtttttttgtggtaattttccttcacctcttcccctcacgatatcttttgtttagtatcacatttatggcatctagctagtggaatattgttttctgttgctgtaagcatatgctctgcaactgcaacagaactttgcatagcaaaagcatggtactatttttttcggacatcctggttctctctaaagtgttcagacattttaaacatgtagaaattacatatcgatgcctgcctaggtactccattactagtatgattcaaggccttctttttggtagtaagagggagcacaccgagtccaattttggtatcagctctacctctaccttggcatgggctggtaatcaaacaacttgggcatatgctgagcaagcaatctgcaggattttccatgacctgataccgtgcaaaagcagggcttcccatgagttcatttgtccatgctgagcagaggtgcaccattcattaaaactctcgacaataacattgcccataacgtgctgcagagcctgtttgacatggttccaaagctaaactttaagtaaagttggataaaatcttgctaaacagataaactttagagttgttaactctattgagtttttggagatgtagtgcaaattttttcatgctctgacatctttcaaaaccaatctagacatagagttgtgaaaaatttacccattattatggttatgagtataatgtttcactttatttctcctgcatcaaagcctttcttctctgcgtttgttttctttctcatacgctagcccataatatagttgtcaaggtgggcatcacctcatgcatggagggcgacgtttcccatctcaggccaaaaggacagaggtgagttctctttcttgttgattctttttaacacgtcctctgctcatccatggaggtggcggttgagctggcaagtatggggtgagttccctattctcccccctccgtcgcttctcgcggacgcctacgcccgcgccctggggaagaaacttctcggtcagctccgctacggttcgacgcgtccgtggacctcgagcgagcgcgggcgacgcggcgtcggatctgcaggaagaaggccgattcggatccggtggacctcgacggcgagcaggcgcaagtgcacgacgacgaggcggtgaagaagcaatcccgtgtgcggaggaggagcaagcaccgacatatccaactccgtcgaggctattcttcgtcgccgcatccgtctccctccactccgaccgtcgacgacatcctcagatccggatttctccccttcactgctcactcttggaccgtagatcttgccttcctcaggtacgaagcacatctcaatctggctcccaggttaatccgtgttcatttgatttaggattttgttcgttcttagttttgtagttaagcccaataattcattaaggatccatttggaacacttgcatcagtacttgtctaaagatggatctggttaaagaacccgattttgcagtcaaccgttaaacattatcaccaacattgtcatcatccagatatgtgtctaatggctt

SEQ ID NO: 30505 - DNA, 2737 bp, Zea Mays
gtggctctgccacctagcgcccgtctggacgccggctctctccccgcgctcctggctggccttgcccgtcgcgcaatgacccccgcagcggcgaggcagctccaagtgcagctcctcgtccggggtctccctctccccgctcgcgccgccgtctccctcatagcctcgtcccattctccgggccacgcccgcgcagtcttcgacaacgccgtccccaccgcctgtgagaacgtctacctctggaccgccaccatcgctgcttacgccagacacgcctcgtcctctccgtcggtagccgaaggggcgctcacgctgttccggctcatgctccggcatggtgtccctcgcccgaacgccttcacggcgagctccgtggtcaggtgctgctcggcactgcgggccgttcgagtggggatccaggtgcacgggttcttggtgaatgctggactcggacgcgctgagcacgtgagagccgcgttggttgacatgtacggcaaccatggccgggtagcggatgcgaggagggtgttcgacgaaatgtctgccacaagtgtggtcctggggaataccatggtggcgtgctacgtcagggcaggggatgtggagtctgggcgggttgtgtttgataggatggtggaaagggacctaatctcttggaacacgctgatgatggggtacttgcggcaggggggtgcaggtgtggcaagggaattgtttgaagagatgccagacaggaatgtgaacagctggaacatggcgattgctgcatactcgcaggagaggtcatgggctgatgcagttgctgtgttcaatcgtatgcgcctcgccagattccaacctgatcccgcgacgatggctgtgctgatgtctgcctgtgcacagcttggttctttgtcagttgcaagacaggtgcatgggattttgaggaaaggctgtgtcgaaatgaacttccatgtgctgaattcattgattgacatgtatgctaagtgtggtagtatcagccaagctcatttgttgtttgttgagacacatttaaaggacacagtgtcttacaatgtgatgatctgtgctcttgcacgccatggacatggcagagatgcacttcaggtcttcgatgagatgtctaaggaacgattgcagccagatgcggtcactttgcttggcgttttgtcagcttgtgctcatgctggactagttcatgatgggaagttctactttgaatctatgaaaacaaattatgcaattgagcaatccccagatcactatgcatgcatggtggatctctatggccgagctggactcattaaggaagcatacgaattagcacgggcaatgccaatggaaccacatgcaggtgtctggggagccttgatcaatgcatgcaggaagcattgcaatgttgaagtcggtaaggttgcagcgagagagctcattgctattgaacccaggaatcctggaacttatgtactccttgccaacacgttggctcgtggtcagcaatgggaatttgttgagactgtgtggcaatcaatgagaggaaagggtattgagaaaacagcagggtgcagttggcttgaagtggaaaatgttgttcatgagttcttgatgggagagtccagccaccctaattccgatgagatttacagcatccttgagcatctgtatctacaactgacttaagtttggtcttttgctataaaggagacgagatcattatgctggatgcctccatatgcagtgtcaggctgtaaaaccatgaagaaatttgtatcagtcatttttatcaagtaggaatcagagacgctgaaggctgtgacttgaaatgtaaaccttttagagcagctgatcaaggatggcttcatttcgtaatgactgaagacacaatgcaatgtacttgaaaatgtggcaaatcatggtattctgcagaagtgcagaatctatgacacgagaaggacaaaaccaagtcaagttgtcaaggtgggcatcacctcatgcatggagggcgacgtttcccatctcaggccaaaaggacagaggtgagttctctttcttgttgattctttttaacacgtcctctgctcatccatggaggtggcggttgagctggcaagtatggggtgagttccctattctcccccctccgtcgcttctcgcggacgcctacgcccgcgccctggggaagaaacttctcggtcagctccgctacggttcgacgcgtccgtggacctcgagcgagcgcgggcgacgcggcgtcggatctgcaggaagaaggccgattcggatccggtggacctcgacggcgagcaggcgcaagtgcacgacgacgaggcggtgaagaagcaatcccgtgtgcggaggaggagcaagcaccgacatatccaactccgtcgaggctattcttcgtcgccgcatccgtctccctccactccgaccgtcgacgacatcctcagatccggatttctccccttcactgctcactcttggaccgtagatcttgccttcctcaggtacgaagcacatctcaatctggctcccaggttaatccgtgttcatttgatttaggattttgttcgttcttagttttgtagttaagcccaataattcattaaggatccatttggaacacttgcatcagtacttgtctaaagatggatctggttaaagaacccgattttgcagtcaaccgttaaacattatcaccaacattgtcatcatccagatatgtgtctaatggctt

SEQ ID NO: 30506 - DNA, 665 bp, Zea Mays
cccccctccgtcgcttctcgcggacgcctacgcccgcgccctggggaagaaacttctcggtcagctccgctacggttcgacgcgtccgtggacctcgagcgagcgcgggcgacgcggcgtcggatctgcaggaagaaggccgattcggatccggtggacctcgacggcgagcaggcgcaagtgcacgacgacgaggcggtgaagaagcaatcccgtgtgcggaggaggagcaagcaccgacatatccaactccgtcgaggctattcttcgtcgccgcatccgtctccctccactccgaccgtcgacgacatcctcagatccggatttctccccttcactgctcactcttggaccgtagatcttgccttcctcagcacctatcatcatggcatcctcgacgggagaaaacatgaaggctttgcttaaagtccttgttgactatgccgaggatgccaccaaatcactgggggtcatgaatgatgaagagatcgtagctaagaccttatttgccatcaaataaagactagaatttctacaacaagatgccttagaggcaaaagtgcaagcatttccacaaattgctaagtacgaggggtgacataagtgttgaaccaacaactccgttgacccctccaacactatctcatcgatctgatgaagacgag

SEQ ID NO: 30507 - DNA, 667 bp, Zea Mays
ctccacgcaaacacacagactaatgtacaagctccagacacatttcaacacgcgccttcttaaatatctgaaagttcattcaggaatgctcaggttagacttgggtgggggggggggggggggggtcatactacagtcccaatctccaactatgaagcacgacatcaactagaaacaaccaatcctcgtagacaagtccatcagatatctggaaagtgtttttgtcccaaacacagcaatagtgtggggggtcttattgcagtattagaccaacatactgcacacagaagctggctctttagagtaacccactaggtatatcaaccctgtctgtggccagtcttggtcagaagaataaagttagcttttgtacaaacatctctatccaatacagctacaaaaatgtaactctagagcatcattcctttggatgccatgtctgcggaggaaccacggcctaacaaatcagctccctttgaaacaacccactaacacttacatataaaataccagcagaagcatgtttcaatgcagtgagattgttgaactacagttacagcactgctgaattatcaacgcctggtgattcgaggaaaatgtaaagtcgggagatgggtgcaggttaagcttctgaggaaggttgcatcacagacacatggcctcaaga

SEQ ID NO: 30508 - DNA, 3444 bp, Zea Mays
caaagacttcgtacgcttgctacttattggatgagctgggacgacatgttcattgaattcatacatgtaggagatgatgaactatatggatggatatcttgaccagttcaatgaatatacaattcaaggctcatttcctaccttacatgcctgccaactaatatgacctactgcacttctgccaaagcttcttgccttcgaaggaggaagaagaagatgatgagcagctaagaagaattcggcaacatctccatgaactctccaaaaatggagctttctccatggcttgtgttctccttgggtttccttgcgcaggctctcgtcatcttggctgacacgaatgcacaagacgcttctgggctgaatgggattcaagattcctggaacaagaagccatcaaactggagggtgggcactgacccatgtggagataaatggaacgggataagctgcaccacaagccgggtcacggctataagactctcgagtttaggattgtcaggatccctttcaggcgacatccagtccctgtccgaattgcagaccttggatttctcctacaacaaggacttgggcggtcctcttcctgcgtccatcggaagcctgagtaacctcgaaaacctgattcttgtcggttgcagcttttctggagaaataccgaaagaactcggacagctcaccaagcttagatttttatctttgaactcaaacaagttcagcggttccattccggcatcactcggaaggctctcgaatctatactggtttgatctggctgacaataagctctccggaggactcccggtgttcgacggcacgaatcccgggctggataacctgacaaatacaaagcacttccacttcggggtcaatcagctctcaggaacaataccgagccagattttcaactcaaatatgacgctgatacatgtgcttcttgacaacaacaacttcaccggacgcattcctcctactctgggccttctcaatacactagaagtcatgcgttttgataacaactaccagctgactgggccggttcctagcaacatcaacaacctcacaaaacttgcagagctccatctggaaaacaaccagctgactggtccactgccagacctcacagggatgatcgcgctcagttttgtggacatgagcaacaacagcttcaatgcatctggtgttccttcctggttcaccactctgccatctttgacctcactgtaccttgaaaacctgcgtgtcacagggcagctgccccaagccctgttcagccttcctgcagttcagacactgaggctccggggaaaccgtttcaacggcacgctaactatcggatcagactacagcactcagctccagctaatcgatctgcgagacaaccaaatcagccagataactgtcggcggatcacagtacaacaagcagctcatactagtcgggaaccccatctgcagcccggggacggggagcagcgagaaatactgcgcgtcgccggggcagtccaaccaggcggcgccgccgccgtacagcaccccgatgaactgctcggggctgccgccgccgtgcctctcggaccagctcgtgagcccaggctgcgtctgcgccgtgccctacaggggcaccctgttcttcaggtcgccgtccttctctgacctcagcaacggctcgtactggggccagctggagaccggcatcagagccaagttccggagtctcagcgtccccgtcgactcggttgcgctccacgatccgtccgtcaactcggtcaacaacctgcagctcgcgctggaggtgttccccagcggcaagacccagtttagtgagcaggacatctctgacatcgggttcatactcagcaaccagacgtataagccaccctcagtattcggtccgtactattttcttggccagccgtacagctttgccaatgtggtgctaataccttccaaatcgaaggcgaacaaccgcttacctctgatcgtcggagcctcggtgggtggagcggttcttgttgcaatagttcttgctcttgttaccatcgtcgcaaggaggaagaagagaccaaagcagaacgaagagaggagccagtcttttgtttcttgggacatgaagagcacgagcggcagcagcgtcccccagctgcgcggcgcgcgcacgttcaacttcgacgagctgaggaagatcaccagcaacttctcggaggcgaacgacatcggcaacggcggctacgggaaggtgtacagagggaccctgcctagcgggcagctggtggccgtgaagaggtgccagcaggggtccctgcaggggagcctcgaattcaggacggagatcgagctgctctcccgggtgcaccacaagaacgtggtcagcctagtgggcttctgcctggaccaggcggagcagatcctcgtctacgagtacgtccccaacggcacgctcaaggagagcctcacgggcaagtccggcgtgcgtctggactggcggcggcgcctccgggtgctgctcggcgccgccaagggcatcgcctacctccacgagctagccgacccgcctatcgtgcaccgcgacatcaagtccagcaacgtcctccttgacgagcgcctcaacgccaaggtctccgacttcggcctctccaagcccctcggagaggacggcaggggacaagtcaccacgcaagtcaagggcacgatgggctaccttgatcctgagtactacatgacgcagcagcttacggacaagagcgacgtgtacagcttcggcgtgctgatgctggagatggccacggcgaggaagccgctggagcgcggccggtacattgtcagggagatgaaggtggcgctggaccgtaccaaggacctgtacggcctgcacgacctgctggacccggtgctgggctcgtcgccgtccgcgctggccgggctggagcagtacgtggatctggcgctgcgctgcgtcgaggaggccggcgccgaccggccatcgatgggcgaggtggtcggcgagatcgagcgggtgctcaagatggccggcggcccggggcccgagtccgcgtccaactccatgagctacgccagccggacgccgcgtcacccctacggcggcgacagccccttcgaccacagcaacagcgggttgccgtccgcgagggttgagcccaagtgaatctacagcgcgcgccgcgagtacatgcggaaaagcttcactcttcaacaaaagctagctctgaatgtacagggtattgtaattattagtgttataattttggttactatgataggtgtgcgattggattaagaactgatttcttgataacgattgtttacatgataattttggttgctatgtatttaagatagatatgcaattggattgttgacatgctaatatatttcatgtatgtcatcaaatacacaaatgattatttatgttcaaatattagac

SEQ ID NO: 30509 - DNA, 845 bp, Zea Mays
ctgggacgacatgttcattgaattcatacatgtaggagatgatgaactatatggatggatatcttgaccagttcaatgaatatacaattcaaggctcatttcctaccttacatgcctgccaactaatatgacctactgcacttctgccaaagcttcttgccttcgaaggaggaagaagaagatgatgagcagctaagaagaattcggcaacatctccatgaactctccaaaaatggagctttctccatggcttgtgttctccttgggtttccttgcgcaggctctcgtcatcttggctgacacgaatgcacaagacgcttctgggctgaatgggattcaagattcctggaacaagaagccatcaaactggagggtgggcactgacccatgtggagataaatggaacgggataagctgcaccacaagccgggtcacggctataagactctcgagtttaggattgtcaggatccctttcaggcgacatccagtccctgtccgaattgcagaccttggatttctcctacaacaaggacttgggcggtcctcttcctgcgtccatcggaagcctgagtaacctcgaaaacctgattcttgtcggttgcagcttttctggagaaataccgaaagaactcggacagctcaccaagcttagatttttatctttgaactcaaacaagttcagcggttccattccggcatcactcggaaggctctcgaatctatactggtttgatctggctgacaataagctctccggaggactcccggtgttcgacggcacgaatcccgggctggataacctgacaaatacaaagcacttagttgtggttcatttgatggccg

SEQ ID NO: 30510 - DNA, 451 bp, Zea Mays
atgaaacctccccgctctctctccccattttctcccactccctccctgcttcgcccctcgaccaaaccgcaggagcgccgctgtcgctgtcgttcatcgccatgataacgttccgtttgcggagatataggaagttgcaagagaagaccatgagcagcaactggttggttgtccatattgcaatccctgctcaagagaagatgaaggcgtagcggaagatttccaggagttccaagactatgatgagttctagacttgaattagcggcaaacccctagtcagcggccttatcttactacatttcgtattctcactttgatttatgtttatgttaaggactatgtggatgtcttcgacatcatgatgtaataaagaaatacttctttatgctattatttgagcactgtgtgacgatgttcagttatgtaatcgctgtgtacctgaaattatg

SEQ ID NO: 30511 - DNA, 362 bp, Zea Mays
attttctcccactccctccctgcttcgcccctcgaccaaaccgcaggagcgccgctgtcgctgtcgttcatcgccatggttgtccatattgcaatccctgctcaagagaagatgaaggcgtagcggaagatttccaggagttccaagactatgatgagttctagacttgaattagcggcaaacccctagtcagcggccttatcttactacatttcgtattctcactttgatttatgtttatgttaaggactatgtggatgtcttcgacatcatgatgtaataaagaaatacttctttatgctattatttgagcactgtgtgacgatgttcagttatgtaatcgctgtgtacctgaaattatg

SEQ ID NO: 30512 - DNA, 711 bp, Zea Mays
ctgtcatcctcagcctcagctcagtctcttccactctcccttgacctgtctccttcacctgctgattgctgtgccgctccgctccgctccggtggcatctgcatctgcatctccatccctcgatctgtcttctctcagggtggaataagcgtgacaatggaggctccacccgtggcgctgttcgacaccctcaaggcagccaaaccgttcttcttgttggctggtcccaacgtgattgaatcggaggagcacgtcctgaagatggccaaacacatcaaagcaattacgaccaagcttggaattccgctcgtgttcaagtccagctttgataaagcaaaccgtacatcatcaaaatcattccgtggtcctggtcttgaagaaggtcttaagatccttcaaaaggtgaaagcaacatatgaccttccgatagtcactgatgtgcacgaaagccaccagtgtgaagctgttggaagagttgctgacatcatacagattccagccttcctctgtcgccagactgatcttctagtggctgctgctaagactggaaaaattatcaatatcaagaaaggacaattctgtgcgccttctaggcgcatggcggtggagtgtcgtggcagccgttcgagacgcttgtcgacatgggaaggtaaagacggcacaacaggatggcctgctcgatgtccatcctctatggtcgtacagaagaat

SEQ ID NO: 30513 - DNA, 1367 bp, Zea Mays
gtcatcctcagcctcagctcagtctcttccactctcccttgacctgtctccttcacctgctgattgctgtgccgctccgctccgctccggtggcatctgcatctgcatctccatccctcgatctgtcttctctcagggtggaataagcgtgacaatggaggctccacccgtggcgctgttcgacaccctcaaggcagccaaaccgttcttcttgttggctggtcccaacgtgattgaatcggaggagcacgtcctgaagatggccaaacacatcaaagcaattacgaccaagcttggaattccgctcgtgttcaagtccagctttgataaagcaaaccgtacatcatcaaaatcattccgtggtcctggtcttgaagaaggtcttaagatccttcaaaaggtgaaagcaacatatgaccttccgatagtcactgatgtgcacgaaagccaccagtgtgaagctgttggaagagttgctgacatcatacagattccagccttcctctgtcgccagactgatcttctagtggctgctgctaagactggaaaaattatcaatatcaagaaaggacaattctgtgcgccttctgttatggtgaactctacagagaaagtaaggcttgctgggaatccaaatgtgatgatgatctatttgttgacccaaggaaccttgagtggctgagggaaagcaactgcccagttgtagctgatgtaacacatgctctacagcaaccagctggaagaaagcttgatggtggaggtgttgcaagcggtgggctacgagaactaataccgtgcattgcaaggacttctgttgctgttggtgttgatggtattttcatggaggtacatgatgaccccttgaatgcaccatgcgatggcccaactcaatggccgttgcgcaatctggaagagctgttggaggaattaattgcaattgctcgagttaccaagggaaagaagccattcaagatcgacctcactccgttccaggagtgatctgctttggttgatagaaagcacaatgccaccatccatggaattccacagggtggatttcaatatgaattgagtacttgctattgttgggagtatacctgcagtggatgacttagactatctctagcagattctttatctcattccgtattttatttcctttttcaaactccactccgcaaacagtgtcaaacagtgttgtcatctacagtttcgcattccctgttttaccctatctactcgagacagtcttatcaccgaacaaactattgtgttgaaacctgccggattggtttgtgttatttcaccagttgtgccatgttggactaacaatatcgctaaacaaatgcaattgttggttatgttct

SEQ ID NO: 30514 - DNA, 829 bp, Zea Mays
gttggttgcacatgcaagaggttatggtgaactctacagagaaagtaaggcttgctgggaatccaaatgtgatggtctgtgagcgtggtaccatgtttggctacaatgatctatttgttgacccaaggaaccttgagtggctgagggaaagcaactgcccagttgtagctgatgtaacacatgctctacagcaaccagctggaagaaagcttgatggtggaggtgttgcaagcggtgggctacgagaactaataccgtgcattgcaaggacttctgttgctgttggtgttgatggtattttcatggaggtacatgatgaccccttgaatgcaccatgcgatggcccaactcaatggccgttgcgcaatctggaagagctgttggaggaattaattgcaattgctcgagttaccaagggaaagaagccattcaagatcgacctcactccgttccaggagtgatctgctttggttgatagaaagcacaatgccaccatccatggaattccacagggtggatttcaatatgaattgagtacttgctattgttgggagtatacctgcagtggatgacttagactatctctagcagattctttatctcattccgtattttatttcctttttcaaactccactccgcaaacagtgtcaaacagtgttgtcatctacagtttcgcattccctgttttaccctatctactcgagacagtcttatcaccgaacaaactattgtgttgaaacctgccggattggtttgtgttatttcaccagttgtgccatgttggactaacaatatcgctaaacaaatgcaattgttggttatgttct

SEQ ID NO: 30515 - DNA, 1191 bp, Zea Mays
acatgtttttaccgattaatcgtgattaaacggaaatcggcgggggctggtttttgaggggttaccggtttggtgcgttttcatttccccgccgcctccagatcacgactctgtccttcccaattctcaggcaaccccgtcgtcttccgccatgatccggttcatcctgctgcagaaccggcaggggaaaacacggctggccaagtactatgtcgctctcgaggactccgagaagcacaaggttgagtacgaggtgcatcggctcgtggtcaaccgggaccccaagttcaccaacttcgtcgagttccgcacgcacaaagttatatataggagatatgcaggactttttttctctatatgtgtggacatcaccgacaacgaattggcatacttggaatgtatccatctgtttgttgagatattggaccatttcttcagcaatgtgtgtgaacttgatttagtatttaatttccacaaggtttacttgatattggatgagttcattcttgctggagagcttcaagaaacaagcaaaaggctcctagacttctcgttccagaatccagacttcactagtacaccggctgaccggcgaccatctgtgcgcgctgtgcggttttagttccagaatccagagttccagacttcaccggcccagatttctcgtccagacacgcgcgaacaacaggtggaaggggagctacaggcaattatagagaggatgggcgagcttgagaagctggaatgaaaagaaacaatggtgtagtgtacattagcaatttagcataggtccggagctagttctgcccaatcgacaaattacctccatatttttcacaattctttgtacctgttgtgcatcatctttgcttcacttaaacctttatcaagccgtgaatcggtgtatgtctttttaacgtttcctgaggttactgagggtttttgaactgcatgtgaggattttagtttgatggcaaagcgaaagatccaccgcatgaagaaaggatatgtgtctgtatgctgatttgatgtgtttctgaccaatcttgctgataggcctgaagttctcgctgataaatgggctggaacgacctgtgaggaccgaaggtcctttgggcttttgcgtactaagagcatctccaacaaggtgacctataaaaatgccctataatttgaaaatgagtatatttt

SEQ ID NO: 30516 - DNA, 1002 bp, Zea Mays
acatgtttttaccgattaatcgtgattaaacggaaatcggcgggggctggtttttgaggggttaccggtttggtgcgttttcatttccccgccgcctccagatcacgactctgtccttcccaattctcaggcaaccccgtcgtcttccgccatgaaccggcaggggaaaacacggctggccaagtactatgtcgctctcgaggactccgagaagcacaaggttgagtacgaggtgcatcggctcgtggtcaaccgggaccccaagttcaccaacttcgtcgagttccgcacgcacaaagttatatataggagatatgcaggactttttttctctatatgtgtggacatcaccgacaacgaattggcatacttggaatgtatccatctgtttgttgagatattggaccatttcttcagcaatgtgtgtgaacttgatttagtatttaatttccacaaggtttacttgatattggatgagttcattcttgctggagagcttcaagaaacaagcaaaagggcaattatagagaggatgggcgagcttgagaagctggaatgaaaagaaacaatggtgtagtgtacattagcaatttagcataggtccggagctagttctgcccaatcgacaaattacctccatatttttcacaattctttgtacctgttgtgcatcatctttgcttcacttaaacctttatcaagccgtgaatcggtgtatgtctttttaacgtttcctgaggttactgagggtttttgaactgcatgtgaggattttagtttgatggcaaagcgaaagatccaccgcatgaagaaaggatatgtgtctgtatgctgatttgatgtgtttctgaccaatcttgctgataggcctgaagttctcgctgataaatgggctggaacgacctgtgaggaccgaaggtcctttgggcttttgcgtactaagagcatctccaacaaggtgacctataaaaatgccctataatttgaaaatgagtatatttt

SEQ ID NO: 30517 - DNA, 590 bp, Zea Mays
agagggagtaatctgttatgcagtttagataactgtattgaaaaggtttacttgatattggatgagttcattcttgctggagagcttcaagaaacaagcaaaagggcaattatagagaggatgggcgagcttgagaagctggaatgaaaagaaacaatggtgtagtgtacattagcaatttagcataggtccggagctagttctgcccaatcgacaaattacctccatatttttcacaattctttgtacctgttgtgcatcatctttgcttcacttaaacctttatcaagccgtgaatcggtgtatgtctttttaacgtttcctgaggttactgagggtttttgaactgcatgtgaggattttagtttgatggcaaagcgaaagatccaccgcatgaagaaaggatatgtgtctgtatgctgatttgatgtgtttctgaccaatcttgctgataggcctgaagttctcgctgataaatgggctggaacgacctgtgaggaccgaaggtcctttgggcttttgcgtactaagagcatctccaacaaggtgacctataaaaatgccctataatttgaaaatgagtatatttt

SEQ ID NO: 30518 - DNA, 512 bp, Zea Mays
tttcagttggatgaagatcttctttaggcaattatagagaggatgggcgagcttgagaagctggaatgaaaagaaacaatggtgtagtgtacattagcaatttagcataggtccggagctagttctgcccaatcgacaaattacctccatatttttcacaattctttgtacctgttgtgcatcatctttgcttcacttaaacctttatcaagccgtgaatcggtgtatgtctttttaacgtttcctgaggttactgagggtttttgaactgcatgtgaggattttagtttgatggcaaagcgaaagatccaccgcatgaagaaaggatatgtgtctgtatgctgatttgatgtgtttctgaccaatcttgctgataggcctgaagttctcgctgataaatgggctggaacgacctgtgaggaccgaaggtcctttgggcttttgcgtactaagagcatctccaacaaggtgacctataaaaatgccctataatttgaaaatgagtatatttt

SEQ ID NO: 30519 - DNA, 365 bp, Zea Mays
gttttccagccgatccctttctaagaaaataggagagcaaagaggagaaaggaactgaacaaaacactcattattctaaatactttcaataaataaaaatctggagtggggacatccatggacgcgctcagctcctgtagctccgccctcttctcaccattgcagtagtacagctctgacacaccacacaaggccactggcctggccacagggctctctctctctctctctctctcaaacaagcttggattcctgacagtgcaagcaaagcaaagcaagcagagccgaagcttggatagtttgtaggtagaccgcaaggtggttttttcttgcagcaatggcggccaaggttgacaaggcataac

SEQ ID NO: 30520 - DNA, 166 bp, Zea Mays
ctggcctggccacagggctctctctctctctctctctctcaaacaagcttggattcctgacagtgcaagcaaagcaaagcaagcagagccgaagcttggatttgtaggtagaccgcaaggtggttttttcttgcagcaatggcggccaaggttgacaaggcataac

SEQ ID NO: 30521 - DNA, 1630 bp, Zea Mays
tgtgatgcaagcctttgcagagagcagcccctgtatccatcttactaaactcctagcattctagttctactgctgatcttctgcatggccatgatttgttgcagcgtgagacaggagctgcggctgcggaggaagtgagcaaaagcatggatctttccggcacgcagggcgagctgccgatggcaacaatgcacgccggcgggtcgccgtacctggggctgcaccacgggcacccacagcagcacaaccatggcgcgaacggccggcacatgtcgccgccggatgtggtggcggaggaggccaagaaccggcagctggcggtggtgcccgtgggcacaggaggcggaggcggggcaggggtgaggtaccgcgagtgcctgaagaaccacgcggctgccatcggcgggagcgcgacggacgggtgcggcgagttcatgcccgcgggcgaggaggggtcgctggacgcgctccggtgctcggcgtgcgggtgccaccgcaacttccaccgcaaggagccgccgggcggcgacgggcggcagctgtacgggcaccaccaccaccacccgctgagcccgctggccgcggtgcacccccaccatcaccgggggctgctggtggcggcgcttcccccggcgccgacgcgcatggtgatgccgctgagcgccgccatgcaccatcaccagcagccgccgcagcagcaccacagctcggcgtcagcggactccgacgacgcacacgtgccaggggtgcgcgggggggaggtgcagcagcagcagcaggcaccggcacggaagcggttccggaccaagttcaccgcggagcagaaggcccggatgctggggttcgcggaggacgccgggtggcggctgcagaagctggacgaggcggcggtgcagcgcttctgccaggaggtcggcgtgaagcggcgcgtgctcaaggtgtggatgcacaacaacaagcacaccctggcgcggcgcggccacgccgggctccccggcgacccggagctgctggggccgcacgacggccagctcggcatgccgctcccggagccggcggcggagcccgcagctgctgctgcggctgcggctggacttggagtgaccgaccaagccatgtctttcgggactggacgacattgatcaagagagtctaatgctgactgaatcagccttgcggcatagggaagctgttttctttgttaatctgctgctgatctcatcaatctagccgtagctttagctgcattcgcattccactgttccatccatccatcctagctatccatcaaccacaaactgatgatgcggagtctccatggatttctattccttgttgatttctgtagctgctctccccgctcttgactttaattttttagtgctcgagtgactggtggtttgggaggtgagactgaatcactcactcttccgccttatgtgttgttcctttcatttcatcatgctactgtcgttgtggtgtttagtcagccagccagagagtgagtgctacactagtactagtgattgatcaacagctggtaatctgatacgcctggctgccgtgcatgcttagcaggcctgtaaccgaaagaatctactagtaaattatgatcagattaggctaatga

SEQ ID NO: 30522 - DNA, 1964 bp, Zea Mays
atcgaccaattcatccaatagtggatactttgtctccaagtctcaaaacccaattcgacccacttggaaccggccttgttccccgttggatccagcctaataaaattccccattccaacacacacagatctcgcatcccggcagtggcgacgaatctcgcggggcggaggtggtggcgcgacagaggcggtgtcgactccgacgaactcgcagccaccggtggatacgcaccagcagcaccggcgcactccaccgacgttcatatttaaggacttggtttggatagttctactcgtcaacaaaagtgattaaaaatggtggttcttgcagcttcaatcgtttcaaagtcggggaaaggattatatcttctacttatcacaaacaagcagagcaatattcttgaagatctggacacattgaggcttctctccaagcttgtgcctgaatactccccttccttggatgaggacggtatttgtaaaacagcatttgagattatatttgcttttgatgaagccatctctcttgggaacaaggaaaatgtgacagtgcaacaagttaaacaatattgtgagatggagagccatgaagagaaggcacacaagctgatgatgcaagccaaaatcaacgaaaccaaggatctcatgaagaagagggctaatgaacttgacaaaatgaggatggaaagaggcaagcttgacaaaggaggatactcatcaatatctggtccacgcgtgattgaaaaaacgtttagtgacatgagcatcagtggttctggatttggtagtggttctggattaggtggactgagcactgatatggactcatttgccagcaagcccaaaggtcgtccatctacagcagctactgcacctggtaaaggttttggtatgaaattaggcaagacacagaagacaaatcaattcctcgagtctttgaaagctgaaggagaagtcattttggaggatgtacaaccaagtgcagtttctacaagatcatctgctcttccaccaagtgaccctgtcacagtgaacatagaagagaagctcaatgttgttgttaaaagagatggtggtattagtaactttgatgttcaaggaacacttgctcttcaggttcttaatgatactgatgggttcatccatttgcagattgaaagccaagatatgcctgggcttagcttcaaaacacacccaaatatcaataaggatttgtttaacagtcagcaaattttgggagcaaaagatccaaacaggccctttccgagtggtcaaaatgaaactcctctggtgaaatggagaatccaggggatggatgagtcatctttacctctgtcagtcaattgctggccgtcagtatctggaaatgaaacctatgtgaacattgaatatgaagcttctgagatgtttgatctgcacaacgttgtcatatctatacctctgccagcacttcgggaggctccgagtgttagacagatcgatggagagtggaagttcgactcaagaaactctgtgttggaatggtctattctccttatcgatcagtcgaatcgcagtggttccatggaatttgttgttcccccagctgacccatcatcgtttttccccatctccgttggattttctgcatcgagtactttcagtgatctgaaggttactggaattcttcctctgaaggaaggcaaccctcccaagttttctcagcgggctcgtttgctcactgctaactaccaagttgtttaacgcttgtaccgcgagtgttggtccacttgaatgctccaatagcagatgttattgccgtggacttatgcaagccatggcacgggagattattttgtgtttggaaaatttctttactatgcgcttctcattgttatagcatattgcacaaatgttgttctaatgtattgccaccagagaaataagtaatgttcttgcattttgttggcatgcattttgtacccg

SEQ ID NO: 30523 - DNA, 2060 bp, Zea Mays
atcgaccaattcatccaatagtggatactttgtctccaagtctcaaaacccaattcgacccacttggaaccggccttgttccccgttggatccagcctaataaaattccccattccaacacacacagatctcgcatcccggcagtggcgacgaatctcgcggggcggaggtggtggcgcgacagaggcggtgtcgactccgacgaactcgcagccaccggtggatacgcaccagcagcaccggcgcactccaccgacgttcatatttaaggacttggtttggatagttctactcgtcaacaaaagtgattaaaaatggtggttcttgcagcttcaatcgtttcaaagtcggggaaaggattacttgctgcgttcccgaaactggttggaactgggaaacagcacacttatgttgaaactgaaaatgtgcgttatgtttatcaacctattgaaggattatatcttctacttatcacaaacaagcagagcaatattcttgaagatctggacacattgaggcttctctccaagcttgtgcctgaatactccccttccttggatgaggacggtatttgtaaaacagcatttgagattatatttgcttttgatgaagccatctctcttgggaacaaggaaaatgtgacagtgcaacaagttaaacaatattgtgagatggagagccatgaagagaaggcacacaagctgatgatgcaagccaaaatcaacgaaaccaaggatctcatgaagaagagggctaatgaacttgacaaaatgaggatggaaagaggcaagcttgacaaaggaggatactcatcaatatctggtccacgcgtgattgaaaaaacgtttagtgacatgagcatcagtggttctggatttggtagtggttctggattaggtggactgagcactgatatggactcatttgccagcaagcccaaaggtcgtccatctacagcagctactgcacctggtaaaggttttggtatgaaattaggcaagacacagaagacaaatcaattcctcgagtctttgaaagctgaaggagaagtcattttggaggatgtacaaccaagtgcagtttctacaagatcatctgctcttccaccaagtgaccctgtcacagtgaacatagaagagaagctcaatgttgttgttaaaagagatggtggtattagtaactttgatgttcaaggaacacttgctcttcaggttcttaatgatactgatgggttcatccatttgcagattgaaagccaagatatgcctgggcttagcttcaaaacacacccaaatatcaataaggatttgtttaacagtcagcaaattttgggagcaaaagatccaaacaggccctttccgagtggtcaaaatgaaactcctctggtgaaatggagaatccaggggatggatgagtcatctttacctctgtcagtcaattgctggccgtcagtatctggaaatgaaacctatgtgaacattgaatatgaagcttctgagatgtttgatctgcacaacgttgtcatatctatacctctgccagcacttcgggaggctccgagtgttagacagatcgatggagagtggaagttcgactcaagaaactctgtgttggaatggtctattctccttatcgatcagtcgaatcgcagtggttccatggaatttgttgttcccccagctgacccatcatcgtttttccccatctccgttggattttctgcatcgagtactttcagtgatctgaaggttactggaattcttcctctgaaggaaggcaaccctcccaagttttctcagcgggctcgtttgctcactgctaactaccaagttgtttaacgcttgtaccgcgagtgttggtccacttgaatgctccaatagcagatgttattgccgtggacttatgcaagccatggcacgggagattattttgtgtttggaaaatttctttactatgcgcttctcattgttatagcatattgcacaaatgttgttctaatgtattgccaccagagaaataagtaatgttcttgcattttgttggcatgcattttgtacccg

SEQ ID NO: 30524 - DNA, 1805 bp, Zea Mays
atcgaccaattcatccaatagtggatactttgtctccaagtctcaaaacccaattcgacccacttggaaccggccttgttccccgttggatccagcctaataaaattccccattccaacacacacagatctcgcatcccggcagtggcgacgaatctcgcggggcggaggtggtggcgcgacagaggcggtgtcgactccgacgaactcgcagccaccggtggatacgcaccagcagcaccggcgcactccaccgacgttcatatttaaggacttggtttggatagttctactcgtcaacaaaagtgattaaaaatggtggttcttgcagcttcaatcgtttcaaagtcggggaaagccatctctcttgggaacaaggaaaatgtgacagtgcaacaagttaaacaatattgtgagatggagagccatgaagagaaggcacacaagctgatgatgcaagccaaaatcaacgaaaccaaggatctcatgaagaagagggctaatgaacttgacaaaatgaggatggaaagaggcaagcttgacaaaggaggatactcatcaatatctggtccacgcgtgattgaaaaaacgtttagtgacatgagcatcagtggttctggatttggtagtggttctggattaggtggactgagcactgatatggactcatttgccagcaagcccaaaggtcgtccatctacagcagctactgcacctggtaaaggttttggtatgaaattaggcaagacacagaagacaaatcaattcctcgagtctttgaaagctgaaggagaagtcattttggaggatgtacaaccaagtgcagtttctacaagatcatctgctcttccaccaagtgaccctgtcacagtgaacatagaagagaagctcaatgttgttgttaaaagagatggtggtattagtaactttgatgttcaaggaacacttgctcttcaggttcttaatgatactgatgggttcatccatttgcagattgaaagccaagatatgcctgggcttagcttcaaaacacacccaaatatcaataaggatttgtttaacagtcagcaaattttgggagcaaaagatccaaacaggccctttccgagtggtcaaaatgaaactcctctggtgaaatggagaatccaggggatggatgagtcatctttacctctgtcagtcaattgctggccgtcagtatctggaaatgaaacctatgtgaacattgaatatgaagcttctgagatgtttgatctgcacaacgttgtcatatctatacctctgccagcacttcgggaggctccgagtgttagacagatcgatggagagtggaagttcgactcaagaaactctgtgttggaatggtctattctccttatcgatcagtcgaatcgcagtggttccatggaatttgttgttcccccagctgacccatcatcgtttttccccatctccgttggattttctgcatcgagtactttcagtgatctgaaggttactggaattcttcctctgaaggaaggcaaccctcccaagttttctcagcgggctcgtttgctcactgctaactaccaagttgtttaacgcttgtaccgcgagtgttggtccacttgaatgctccaatagcagatgttattgccgtggacttatgcaagccatggcacgggagattattttgtgtttggaaaatttctttactatgcgcttctcattgttatagcatattgcacaaatgttgttctaatgtattgccaccagagaaataagtaatgttcttgcattttgttggcatgcattttgtacccg

SEQ ID NO: 30525 - DNA, 2095 bp, Zea Mays
atcgaccaattcatccaatagtggatactttgtctccaagtctcaaaacccaattcgacccacttggaaccggccttgttccccgttggatccagcctaataaaattccccattccaacacacacagatctcgcatcccggcagtggcgacgaatctcgcggggcggaggtggtggcgcgacagaggcggtgtcgactccgacgaactcgcagccaccggtggatacgcaccagcagcaccggcgcactccaccgacgttcatatttaaggacttggtttggatagttctactcgtcaacaaaagtgattaaaaatgcttcaatcgtttcaaagtcggggaaagcacttgtttcaagacagtttgttgacatgtctcgcataagaattgaaggattacttgctgcgttcccgaaactggttggaactgggaaacagcacacttatgttgaaactgaaaatgtgcgttatgtttatcaacctattgaaggattatatcttctacttatcacaaacaagcagagcaatattcttgaagatctggacacattgaggcttctctccaagcttgtgcctgaatactccccttccttggatgaggacggtatttgtaaaacagcatttgagattatatttgcttttgatgaagccatctctcttgggaacaaggaaaatgtgacagtgcaacaagttaaacaatattgtgagatggagagccatgaagagaaggcacacaagctgatgatgcaagccaaaatcaacgaaaccaaggatctcatgaagaagagggctaatgaacttgacaaaatgaggatggaaagaggcaagcttgacaaaggaggatactcatcaatatctggtccacgcgtgattgaaaaaacgtttagtgacatgagcatcagtggttctggatttggtagtggttctggattaggtggactgagcactgatatggactcatttgccagcaagcccaaaggtcgtccatctacagcagctactgcacctggtaaaggttttggtatgaaattaggcaagacacagaagacaaatcaattcctcgagtctttgaaagctgaaggagaagtcattttggaggatgtacaaccaagtgcagtttctacaagatcatctgctcttccaccaagtgaccctgtcacagtgaacatagaagagaagctcaatgttgttgttaaaagagatggtggtattagtaactttgatgttcaaggaacacttgctcttcaggttcttaatgatactgatgggttcatccatttgcagattgaaagccaagatatgcctgggcttagcttcaaaacacacccaaatatcaataaggatttgtttaacagtcagcaaattttgggagcaaaagatccaaacaggccctttccgagtggtcaaaatgaaactcctctggtgaaatggagaatccaggggatggatgagtcatctttacctctgtcagtcaattgctggccgtcagtatctggaaatgaaacctatgtgaacattgaatatgaagcttctgagatgtttgatctgcacaacgttgtcatatctatacctctgccagcacttcgggaggctccgagtgttagacagatcgatggagagtggaagttcgactcaagaaactctgtgttggaatggtctattctccttatcgatcagtcgaatcgcagtggttccatggaatttgttgttcccccagctgacccatcatcgtttttccccatctccgttggattttctgcatcgagtactttcagtgatctgaaggttactggaattcttcctctgaaggaaggcaaccctcccaagttttctcagcgggctcgtttgctcactgctaactaccaagttgtttaacgcttgtaccgcgagtgttggtccacttgaatgctccaatagcagatgttattgccgtggacttatgcaagccatggcacgggagattattttgtgtttggaaaatttctttactatgcgcttctcattgttatagcatattgcacaaatgttgttctaatgtattgccaccagagaaataagtaatgttcttgcattttgttggcatgcattttgtacccg

SEQ ID NO: 30526 - DNA, 301 bp, Zea Mays
agccatatataaagaagagttagagaatgaagggattgttaatgtggaaaaaaccattcagaagcacttttcctcctggtttaagaagcatattgcaagtttgtgttttgtcgagggagaagacattgatgatgacctatatgcattggcatgcgaaccggatttgcgagttcgaattttttctgcatgtcttgttgatggtgtccggtaccacatcattgaccgtgagagaaatagaagaacccaaaacagtggagtcatggttgagggcacccataataatgaatgcattgatttttat

SEQ ID NO: 30527 - DNA, 1948 bp, Zea Mays
catttctatgacaaccatcttaataaaaaaaaaaccccaccgaagccgaaaaagaaaaatcctcgccgacgttcctcaccacggcgacggccaccgcgacctcggccccgacgttgcctacggcagccaccatgtcggcgagctccgttgtccccacgctgctgccagatgagcggcccgacatcctctcactgctcgacgccgccgcccgcccgctcgccgacgtcgtcgccgacttccttgctcggttcccccgcgagcgccgcctccgtgtctgcggcgccctctgcttcctcctcgaggacaagatgatgctccatcctactggccggttaattgcatttgcaattcttcatcagagttattcgccgcagacagcaaatccatatattcctatattgttaaatgcagcctgtgatgaaacgtcagagaaatcagaacgggcgtttgtccaactattattgacttcatctagtggaaatagtaataacgaggtcctgaatcagtctgcccttgattacataaatggatctgtttcagcatctcaggtctttttgcctcgggaacaacttgagaagcaatactgcagtactggtgtacattcctcgcctcagactagtagtttcacagctcctgcagttagaagtgctataccagatccagacgtccgtcaaagttgtgcaaattcatcagaaaatctgcgtctgatgatagagatactactatttctgttttactcgaagacataccaggggggaggttgggtccgcaatggattcggcccacacccccaagacttcctttatttgatggggagctacaatggctgaaccctgacaataaccacgagctattatgggattatagcatgtgtgctgacacgaatcgaggggctgctatccgagatttgattgcaagagccttaaaaggtccacttgcacctattcaacaggagcaagtcgtagtagaactggcaaaggatcctaaactggtttattattgtgggatgactccacagaagcttcctgatcttgttgaacacaacccactcattgctgttgaggttctttcaaagctaattcactctcctgacatttctggttactttgatgttcttgtgcacatggaaatgagcttgcattctatggaagttgtgaacagactcactactgccgttgaccttccaacagaatttgtccatgagtacatcacaaattgtatccaatcatgtcaaaacataaagagtcttatccgaaacaagattataaacgttcaagaccttttcatcgaggtacaagcgttctgtattgaattttcacggataagggaagcagctggtttgttccggctactcaagtcgttggagtgaaagaattcgtgtgttttttacttgccgtctctgtaccatactgcatcgtgtatgtttctacttacattctctggaccatactgcatcttttttccccctaatctatgtacatcttcattgtcatggttaagtcagatgcctcaagggcattggatgcgaggatcatgtgttgtattgaaaattttccatggaaccatttttggaactttatgggctgattgctactaagatttcgagttgtcaggttgtaccgacttggaaagtttgaagtttgcctgttctggtagttctgtggccactgcccttgaggagggtgttccggtgtgttacgtgcattgtctttgactcgttgcccttgaaagagtggccaaaacgagtatagcaagagcagaatctcaaattgttggtgcttaagcttgtactgtgtaggctcatttgtgctttggtaggctctttgttttgtaacgtaaacaacgctccaatctatttgatttaccgttcttgtcaagttacatcatgcttgtcggtcattgttggttatatatatgcagacaagatatcaagaaactctatacgttc

SEQ ID NO: 30528 - DNA, 2742 bp, Zea Mays
catttctatgacaaccatcttaataaaaaaaaaaccccaccgaagccgaaaaagaaaaatcctcgccgacgttcctcaccacggcgacggccaccgcgacctcggccccgacgttgcctacggcagccaccatgtcggcgagctccgttgtccccacgctgctgccagatgagcggcccgacatcctctcactgctcgacgccgccgcccgcccgctcgccgacgtcgtcgccgacttccttgctcggttcccccgcgagcgccgcctccgtgtctgcggcgccctctgcttcctcctcgaggacaagatgatgctccatcctactggccggttaattgcatttgcaattcttcatcagagttattcgccgcagacagcaaatccatatattcctatattgttaaatgcagcctgtgatgaaacgtcagagaaatcagaacgggcgtttgtccaactattattgacttcatctagtggaaatagtaataacgaggtcctgaatcagtctgcccttgattacataaatggatctgtttcagcatctcaggtctttttgcctcgggaacaacttgagaagcaatactgcagtactggtgtacattcctcgcctcagactagtagtttcacagctcctgcagttagaagtgctataccagatccagacgtccgtcaaagttgtgcaaattcatcagagtcttcgatatcaccacctggaagcaaacagaaatctgcgtctgatgatagagatactactatttctgttttactcgaagacataccaggggggaggttgggtccgcaatggattcggcccacacccccaagacttcctttatttgatggggagctacaatggctgaaccctgacaataaccacgagctattatgggattatagcatgtgtgctgacacgaatcgaggggctgctatccgagatttgattgcaagagccttaaaaggtccacttgcacctattcaacaggagcaagtcgtagtagaactggcaaaggatcctaaactggtttattattgtgggatgactccacagaagcttcctgatcttgttgaacacaacccactcattgctgttgaggttctttcaaagctaattcactctcctgacatttctggttactttgatgttcttgtgcacatggaaatgagcttgcattctatggaagttgtgaacagactcactactgccgttgaccttccaacagaatttgtccatgagtacatcacaaattgtatccaatcatgtcaaaacataaaggataaatacatgcaaaacagacttgtgagactagtttgtgtttttctgcagagtcttatccgaaacaagattataaacgttcaagaccttttcatcgaggtacaagcgttctgtattgaattttcacggataagggaagcagctgccagcgagcattctcctttcacaaatgctgagctgctctgcattggttccatggtcgctcagagttgcaccggtgcgaccgacgtggccgtggccgtggcgtctggtttcgatagacaattcaaacacttgaacaccaaataccgcaaactactcaacagctagcatcatgaattggtctcatgttcacagatcaggaaaaagaaaggattcctagacacatgatgagggctcctttgaattgcaagattttttccacttcctgggttgcgttttttctgtgaaaataaactgttctgtaaaaaatcttatatgatttttccgaaattcctacaaaccaacccacccagggcaacaagatcaccgcaaataacttgctcaaagtccgcgaaataaacaaaaattaaaggacgaggaaaaatagctaatcgccggctccgactcgatcgatgcacaagtgtatatatagccagctaaatcagcaaggcagtcctaataatcaccgccggctgaaggctgcgtcatgagtcacgacgaggccgccgcctcggcatcatagccgcggcagcgcgggctctcggcgaagtcgtcgatcgggaacgacgtggcgacggggccgatgtagaagctgagcgtctccccggcgcggtccacctcgccgacgccgagccacaggaacagcaccttcacgctgatcccccgcagcgccgtgagcgagccggcggcgacggacccggacacgcgcgcctcgtagcggaccagccacgtcctcgccagcaggaactcgcaggcccgcgggaagtacacctcgaaggcgccgtccgcgccgagctcgtaccctgtcacgcccgccggcaggatgccccgcgggaagccgtaccgctccagcatctcgtacgccgtcggcgacgtctcggtcgcgttgccgccgcctccggacgcctcggcggctgcttcttctgctacggccgtggccgccagcagcaggagcagcatgagggagtagtagctgctggccatggaggagcagagcagagcaaagtaggtggggggactggctcctccgattattccgagctggctgctagtgtttgcgcttcgcttacttgtcctttggaatctggaatggcttggtgagttgctattggatggatctatgtcgtgctgttcgggtagtgatgatttttttttcttctacgtactatttaatctgttcgtattttgacggggcgtatattccctaattaattagttgaggttgatgtaattgaccaatcatacaagaggttgtacttgtcacgttgtggcagttggctggccactc

SEQ ID NO: 30529 - DNA, 1577 bp, Zea Mays
caagcgcatgccacaatgcccagactataaaaatcgaagcccacgccgggagctccatccctaaaaaaaaacaaaagccttcgcttcgcttcaccactctatcgctccacggccggccacagctagctgcgtgctgtcctgggggagcagcagcagcttcggcgggaggggaaaggagctacgatggagaggttgggcgtcggcgtcggcgtcggcgagctgccgccggggttccgcttccacccgacggacgaggagctgatcacctactacctcctctgcaaggccgtggacggcggcttctgcggcggccgcgccatcgcggagatcgacctgaacaagtgcgagccatgggagctcccggacaaggcgaagatgggggagaaggagtggtacttctactgcctccgcgaccgcaagtacccgacgggcctgcgcaccaaccgcgccacggcggccggctactggaaggccaccggcaaggaccgcgaggtccgcagcggccgcagcggcgcgctggtgggcatgaagaagacgctcgtcttctaccggggccgcgcccccaggggccagaagacgcgctgggtcatgcacgagtaccgcctcgacggcacctacgcctaccatttccttcccggctctacgagggacgagtgggtgatcgcgagggtgttccagaagccaggcgaggtcccatgcggccgcaagcaccgcctgggcggccccagcgccgccgccggcgagtcctgcttctcggactccaccacctcggcctccatcggcggcggcggcggaggaggagcgtccgcgtcgtctcgcccgctgctcaccgtcacggacacttcctcgccgtcgctgttcgtggccaacgcgaacgccgccgccagcaacaacaacggcaacccggtcaccgggcgagagctcgtgccctgcttctccactaccgccagtcccctggaagccgcggcgctcggcgtcgtcgggcacccgtacaacgcggccccgctgcgtctgggcttggacttcgaggcgccgtccccgggcttcgtcgtcccgaacctgcgttccctgcaagtgcaggacgacggcggcctgccgctgttcctctcggcagcagcaggcggcggcatgtcgtccgcgacgctgggaataatggggtcgctgggcgggtctctccactgcccgccccacgccggcatggatgtcgtcaaggtcgagggccgcgccgcgccgccgcagatggctgtcggccccggcctcctcgatggcgccttcgcctggggcttctagtgctcactgctcaggcgctgcacgccgccgtggcatatgggcatgcatgcatcaccagcaaaccgatggatatatatatgcctctccacatgcatgtggtagttcgtggtttctctgcatgcgttgtacgttaagcttcgttagtaagtggaagtggcagagagtcgtcgtttatgtacgctattaagcttgattagtatcaggatgtggctgaccgaccctccatgcatgggcactccaaactgtagccttccagcagctttgttcgtggattagatgtgtcgtcg

SEQ ID NO: 30530 - DNA, 1573 bp, Zea Mays
caagcgcatgccacaatgcccagactataaaaatcgaagcccacgccgggagctccatccctaaaaaaaaacaaaagccttcgcttcgcttcaccactctatcgctccacggccggccacagctgcgtgctgtcctgggggagcagcagcagcttcggcgggaggggaaaggagctacgatggagaggttgggcgtcggcgtcggcgtcggcgagctgccgccggggttccgcttccacccgacggacgaggagctgatcacctactacctcctctgcaaggccgtggacggcggcttctgcggcggccgcgccatcgcggagatcgacctgaacaagtgcgagccatgggagctcccggacaaggcgaagatgggggagaaggagtggtacttctactgcctccgcgaccgcaagtacccgacgggcctgcgcaccaaccgcgccacggcggccggctactggaaggccaccggcaaggaccgcgaggtccgcagcggccgcagcggcgcgctggtgggcatgaagaagacgctcgtcttctaccggggccgcgcccccaggggccagaagacgcgctgggtcatgcacgagtaccgcctcgacggcacctacgcctaccatttccttcccggctctacgagggacgagtgggtgatcgcgagggtgttccagaagccaggcgaggtcccatgcggccgcaagcaccgcctgggcggccccagcgccgccgccggcgagtcctgcttctcggactccaccacctcggcctccatcggcggcggcggcggaggaggagcgtccgcgtcgtctcgcccgctgctcaccgtcacggacacttcctcgccgtcgctgttcgtggccaacgcgaacgccgccgccagcaacaacaacggcaacccggtcaccgggcgagagctcgtgccctgcttctccactaccgccagtcccctggaagccgcggcgctcggcgtcgtcgggcacccgtacaacgcggccccgctgcgtctgggcttggacttcgaggcgccgtccccgggcttcgtcgtcccgaacctgcgttccctgcaagtgcaggacgacggcggcctgccgctgttcctctcggcagcagcaggcggcggcatgtcgtccgcgacgctgggaataatggggtcgctgggcgggtctctccactgcccgccccacgccggcatggatgtcgtcaaggtcgagggccgcgccgcgccgccgcagatggctgtcggccccggcctcctcgatggcgccttcgcctggggcttctagtgctcactgctcaggcgctgcacgccgccgtggcatatgggcatgcatgcatcaccagcaaaccgatggatatatatatgcctctccacatgcatgtggtagttcgtggtttctctgcatgcgttgtacgttaagcttcgttagtaagtggaagtggcagagagtcgtcgtttatgtacgctattaagcttgattagtatcaggatgtggctgaccgaccctccatgcatgggcactccaaactgtagccttccagcagctttgttcgtggattagatgtgtcgtcg

SEQ ID NO: 30531 - DNA, 210 bp, Zea Mays
cgcaaacagtagtacccagcgccttgaaagactcatgcgtcgtggtgtccctgcgcacaagcagcagaaccgtcgtagcctgctccatcttcggcgaacttcaccttgatcgtgatctgtttccgagcttcaaggaatcgacggtcaagcttcggcgaccaaatgatccaattcttcaagttctacgagatcgaataccctgagcatctg

SEQ ID NO: 30532 - DNA, 718 bp, Zea Mays
ccacgttcatgcgaacactgggccacaccctacgtgatcaatggacccagcttctttgttttttttgttgttcttattattttattatatcatgccggaatgacgtcgtgctgatgtcatgaatgaggtcatcacgcaaatcacatcgctcggctgtgcgtttctccgtgtcgctgctgggctctagaagctttcatccttccggcttggaactgaaacgcgagctcggcgtaaccacctcccggtagattcgatgcagtatatatctatctctattagcttctcgcctcatctgatcaccagcgctatctttctcatcgcgctcgcgaagccagccgtaacaaacgccgagaccagccgtcctcacccgaacacccctatctctgggtatataaaaagcgagtcctctacacctcctggctcatctaagtccacgtcgaggaaaagaagagagagatcggagcatgcacacagagagagatcgaggagggcaggagggaaccgccgccagggaactctgactcgctgtcgaccgagcttttggggattggtcagggaccctcgcgagcatgtcagggagtcgcttcggcctcaaactggcagatgacatcgtgggctggttgggtggcacggaataaccaccaccggtggccgcgcaagaggccctggacccttcgactgaagcctcgtccggcgtgaggacacgtgtcatctgaag

SEQ ID NO: 30533 - DNA, 706 bp, Zea Mays
cgaacactgggccacaccctacgtgatcaatggacccagcttctttgttttttttgttgttcttattattttattatatcatgccggaatgacgtcgtgctgatgtcatgaatgaggtcatcacgcaaatcacatcgctcggctgtgcgtttctccgtgtcgctgctgggctctagaagctttcatccttccggcttggaactgaaacgcgagctcggcgtaaccacctcccggtagattcgatgcagtatatatctatctctattagcttctcgcctcatctgatcaccagcgctatctttctcatcgcgctcgcgaagccagccgtaacaaacgccgagaccagccgtcctcacccgaacacccctatctctgggtatataaaaagcgagtcctctacacctcctggctcatctaagtccacgtcgaggaaaagaagagagagatcggagcatgcacacagagagagatcgaggagggcaggagggaaccgccgccagggaactctgactcgctgtcgaccgagcttttggggattggtcagggaccctcgcgagcatgtcagggagtcgcttcggcctcaaactggcagatgacatcgtgggctggttgggtggcacggaataaccaccaccggtggccgcgcaagaggccctggacccttcgactgaagcctcgtccggcgtgaggacacgtgtcatctgaa

SEQ ID NO: 30534 - DNA, 658 bp, Zea Mays
tttttttgttgttcttattattttattatatcatgccggaatgacgtcgtgctgatgtcatgaatgaggtcatcacgcaaatcacatcgctcggctgtgcgtttctccgtgtcgctgctgggctctagaagctttcatccttccggcttggaactgaaacgcgagctcggcgtaaccacctcccggtagattcgatgcagtatatatctatctctattagcttctcgcctcatctgatcaccagcgctatctttctcatcgcgttcgcgaagccagccgtaacaaacgccgagaccagccgtcctcacccgaacacccctatctctgggtatataaaaagcgagtcctctacacctcctggctcatctaagtccacgtcgaggaaaagaagagagagatcggagcatgcacacagagagagatcgaggagggcacgagggaaccgccgccagggaactctgactcgctgtcgaccgagcttttggggattggtcagggaccctcgcgagcatgtcagggagtcgcttcggcctcaaactagcagatgacatcgtgggctggttgggtggcacggaataaccaccaccggtggccgcgcaagaggccctggacccttcgactaaagcctcgtccggcgtgaggacacgtgtcatctgaa

SEQ ID NO: 30535 - DNA, 2551 bp, Zea Mays
cccgaggtctggaccgcctacatcatcttcttttgctggaccctcgctctctccgtctttgggtgcgcccccaacattggcatggacgctcgtcaaccttggccaatttgcaaggctggaatggggtttcagctgttcctattaatgttagcatgaggagcatcttactgaagcggctccatgtttggtcgtctacaccaggcagcagagcagattcgcccctgctgaaaacgcactcgatggcgtccgcgacgggggtttcctcctcggagatggcggtggaccacgcgacggggccgggcgccgtggagaagccgcggttcgatgctctgacgccgaatgagatgagcggcgggaggccccaattccggaaagtgcccatgccgcagcaccggttcgcgccgctcaagcgatgctggatggaaatctacaaacccgtatacgagcacatgaagatcgatatacgcatgaacctcaaggtactggactggagtctacccatattgggctttcttgttttatgtgaatgagcttttcgtgctctattccttgcaagaaccatagattgtatacttcagatcgccgtcaagaagctcaacccggagagcgtccagggcctgcagagtggcaggataacatggagaacttcaaccctttcggtgagaatggagagtagggtacagggtcaccatagaatgttctgggctcttcagtactcctgtactaacaacgttgtttgaaatgataaagaaagttaaagtacattcaacgtgatccttccatgcgatgttaacttagatgacataatttcagggtacatacctaacagctgccctgcccttagtgacgcaagagaaaatgattgcttgagggtccaactttagggagcttcaatgtgagttttgtggaatgttcgctagcacacagggttctgagatagtatgttatttgcttcaaagttttgctgctgattagacatatggagcttcttctttggacgggatagagtgtattttgtagtcaccctatgcttacaattgtcttcggtccatcacattgaattgtcgttcaagattctgccaggataaacagtggccctgcattttttaactataataataatgttggtagggataccaatggtgctcctctgttaatggtgcttattgccatattgtcatattggaggaagggcttattgtcatattgaaggaagggcttgaagctcaatggaagtgataatagattctgcaaatgctcctcaataggttccagttagtcatctggcggggtcgagatcggcattgtctccactgtcatatcgtcgagcaaagactggtccaggagcgcagaaacatgcttcaagaaaaaggtttatggctagcaacatcttgttcgattacttcctgtgatgttttaatccataaaatacagataggggttacactgttcagtttggttacttcgattttgggactgcttgcgatcttctgtagtgtttattcttgttcgattacttcgattctaggactgtgattttagttcgattacttcgattctgggattaccaaaatacagataggggttacactgtttacttcgattctaggactgccaaatgtctctactgtttgaaggcggtgtttattcttgtttattatttactagatgtctctgtatgcttgattatgcaagtagattattcaggtagtacatacatttttagttgtatttattcttgtttctattcggtgcttcattcaagtctgcaactttccaatgtctctgtgtgcttgatagcatattatcctatattcttgcgcaagaatctttttggacgcacaagtagttctatagagtttactacatcctttgatgttttaatccatgaaatacaaacttgtatctatctgttttggactgcgttccagagaaagaaatgtagtttagttatgtggttttacagacctatatctatttgtgtaatgcatttgcctgtatatgtgcagcttatgtccataattcttcaagtctgcatatgactgcatcattcttcagccttctagactccttccacttctgccccctcggatacaaggacttcccagacttaggtaacacaacctcttctcttctttcaacatgttgtcatgtggtgctcgagttatggtacaactggagttgggtgaaagcgacatggagccttgaagtggagagttgagctcatgaagcaggacaagagagccaaggtgttgtgccttcatggcttctgcacgagtgagagttttttgaagagtagatcaacaactggcactcttccactcgttatggatatgggtatgagaatccaatcttatgatgaccagttacttcatttagctgctgacttagctcagaggttgttgcccacatttgacactcctacaggttcatcaccttttctattattataatcttcctggaatgacttggttatatcttgcatcagaaatttgattccattttttcatttttttgttgtaaatggaccatttccattggtcagtaattg

SEQ ID NO: 30536 - DNA, 1914 bp, Zea Mays
cccgaggtctggaccgcctacatcatcttcttttgctggaccctcgctctctccgtctttgggtgcgcccccaacattggcatggacgctcgtcaaccttggccaatttgcaaggctggaatggggtttcagctgttcctattaatgttagcatgaggagcatcttactgaagcggctccatgtttggtcgtctacaccaggcagcagagcagattcgcccctgctgaaaacgcactcgatggcgtccgcgacgggggtttcctcctcggagatggcggtggaccacgcgacggggccgggcgccgtggagaagccgcggttcgatgctctgacgccgaatgagatgagcggcgggaggccccaattccggaaagtgcccatgccgcagcaccggttcgcgccgctcaagcgatgctggatggaaatctacaaacccgtatacgagcacatgaagatcgatatacgcatgaacctcaaggtactggactggagtctacccatattgggctttcttgttttatgtgaatgagcttttcgtgctctattccttgcaagaaccatagattgtatacttcagatcgccgtcaagaagctcaacccggagagcgtccagggcctgcagagtggcaggataacatggagaacttcaaccctttcggtgagaatggagagtagggtacagggtcaccatagaatgttctgggctcttcagtactcctgtactaacaacgttgtttgaaatgataaagaaagttaaagtacattcaacgtgatccttccatgcgatgttaacttagatgacataatttcagggtacatacctaacagctgccctgcccttagtgacgcaagagaaaatgattgcttgagggtccaactttagggagcttcaatgtgagttttgtggaatgttcgctagcacacagggttctgagatagtatgttatttgcttcaaagttttgctgctgattagacatatggagcttcttctttggacgggatagagtgtattttgtagtcaccctatgcttacaattgtcttcggtccatcacattgaattgtcgttcaagattctgccaggataaacagtggccctgcattttttaactataataataatgttggtagggataccaatggtgctcctctgttaatggtgcttattgccatattgtcatattggaggaagggcttattgtcatattgaaggaagggcttgaagctcaatggaagtgataatagattctgcaaatgctcctcaataggttccagttagtcatctggcggggtcgagatcggcattgtctccactgtcatatcgtcgagcaaagactggtccaggagcgcagaaacatgcttcaagaaaaagcttatgtccataattcttcaagtctgcatatgactgcatcattcttcagccttctagactccttccacttctgccccctcggatacaaggacttcccagacttaggtaacacaacctcttctcttctttcaacatgttgtcatgtggtgctcgagttatggtacaactggagttgggtgaaagcgacatggagccttgaagtggagagttgagctcatgaagcaggacaagagagccaaggtgttgtgccttcatggcttctgcacgagtgagagttttttgaagagtagatcaacaactggcactcttccactcgttatggatatgggtatgagaatccaatcttatgatgaccagttacttcatttagctgctgacttagctcagaggttgttgcccacatttgacactcctacaggttcatcaccttttctattattataatcttcctggaatgacttggttatatcttgcatcagaaatttgattccattttttcatttttttgttgtaaatggaccatttccattggtcagtaattg

SEQ ID NO: 30537 - DNA, 1952 bp, Zea Mays
ctctctccgtctttgggtgcgcccccaacattggcatggacgctcgtcaaccttggccaatttgcaaggctggaatggggtttcagctgttcctattaatgttagcatgaggagcatcttactgaagcggctccatgtttggtcgtctacaccaggcagcagagcagattcgcccctgctgaaaacgcactcgatggcgtccgcgacgggggtttcctcctcggagatggcggtggaccacgcgacggggccgggcgccgtggagaagccgcggttcgatgctctgacgccgaatgagatgagcggcgggaggccccaattccggaaagtgcccatgccgcagcaccggttcgcgccgctcaagcgatgctggatggaaatctacaaacccgtatacgagcacatgaagatcgatatacgcatgaacctcaaggtactggactggagtctacccatattgggctttcttgttttatgtgaatgagcttttcgtgctctattccttgcaagaaccatagattgtatacttcagatcgccgtcaagaagctcaacccggagagcgtccagggcctgcagagtggcaggataacatggagaacttcaaccctttcggtgagaatggagagtagggtacagggtcaccatagaatgttctgggctcttcagtactcctgtactaacaacggtacgcattggtgccagcttcactataccttggttttattacattgatcatttgggttgggcagggtacatacctaacagctgccctgcccttagtgacgcaagagaaaatgattgcttgagggtccaactttagggagcttcaatgtgagttttgtggaatgttcgctagcacacagggttctgagatagtatgttatttgcttcaaagttttgctgctgattagacatatggagcttcttctttggacgggatagagtgtattttgtagtcaccctatgcttacaattgtcttcggtccatcacattgaattgtcgttcaagattctgccaggataaacagtggccctgcattttttaactataataataatgttggtagggataccaatggtgctcctctgttaatggtgcttattgccatattgtcatattggaggaagggcttattgtcatattgaaggaagggcttgaagctcaatggaagtgataatagattctgcaaatgctcctcaataggttccagttagtcatctggtattcatagttcatggcattagacagaggctggagaaagctaatcttgttgatgttgtcaattttccatcgtgtaaccgtgttcaagggcatattatcaggcggggtcgagatcggcattgtctccactgtcatatcgtcgagcaaagactggtccaggagcgcagaaacatgcttcaagaaaaagcttatgtccataattcttcaagtctgcatatgactgcatcattcttcagccttctagactccttccacttctgccccctcggatacaaggacttcccagacttaggtaacacaacctcttctcttctttcaacatgttgtcatgtggtgctcgagttatggtacaactggagttgggtgaaagcgacatggagccttgaagtggagagttgagctcatgaagcaggacaagagagccaaggtgttgtgccttcatggcttctgcacgagtgagagttttttgaagagtagatcaacaactggcactcttccactcgttatggatatgggtatgagaatccaatcttatgatgaccagttacttcatttagctgctgacttagctcagaggttgttgcccacatttgacactcctacaggttcatcaccttttctattattataatcttcctggaatgacttggttatatcttgcatcagaaatttgattccattttttcatttttttgttgtaaatggaccatttccattggtcagtaattg

SEQ ID NO: 30538 - DNA, 2956 bp, Zea Mays
cgtcaaccttggccaatttgcaaggctggaatggggtttcagctgttcctattaatgttagcatgaggagcatcttactgaagcggctccatgtttggtcgtctacaccaggcagcagagcagattcgcccctgctgaaaacgcactcgatggcgtccgcgacgggggtttcctcctcggagatggcggtggaccacgcgacggggccgggcgccgtggagaagccgcggttcgatgctctgacgccgaatgagatgagcggcgggaggccccaattccggaaagtgcccatgccgcagcaccggttcgcgccgctcaagcgatgctggatggaaatctacaaacccgtatacgagcacatgaagatcgatatacgcatgaacctcaaggtactggactggagtctacccatattgggctttcttgttttatgtgaatgagcttttcgtgctctattccttgcaagaaccatagattgtatacttcagatcgccgtcaagaagctcaacccggagagcgtccagggcctgcagagtggcaggataacatggagaacttcaaccctttcggtgagaatggagagtagggtacagggtcaccatagaatgttctgggctcttcagtactcctgtactaacaacggtaatccaattgcatcggttattaaattagttggtaagcgattaggttataataaataactagccaacatgttcacaatatcatcatttgacatagatggttctaattatagaagcacgagtcatataagtccggattatatacaaaatacaagaaatattgccctaatacattttggactatattttaatcgattgacatgagttaaatcagtggtggtggtagaaataatagtgtctggaccttgaatttctgaaccggttcgttctgaaaaagatatagttgtcccctcatgaaaagatatggttttcctgtttttatatgcacaagttgtttgtatttggataacctttgatcctagctgatacgcgtcctaatctggtgggtgtttcagttgtttgaaatgataaagaaagttaaagtacattcaacgtgatccttccatgcgatgttaacttagatgacataatttcagggtacatacctaacagctgccctgcccttagtgacgcaagagaaaatgattgcttgagggtccaactttagggagcttcaatgtgagttttgtggaatgttcgctagcacacagggttctgagatagtatgttatttgcttcaaagttttgctgctgattagacatatggagcttcttctttggacgggatagagtgtattttgtagtcaccctatgcttacaattgtcttcggtccatcacattgaattgtcgttcaagattctgccaggataaacagtggccctgcattttttaactataataataatgttggtagggataccaatggtgctcctctgttaatggtgcttattgccatattgtcatattggaggaagggcttattgtcatattgaaggaagggcttgaagctcaatggaagtgataatagattctgcaaatgctcctcaataggttccagttagtcatctggtattcatagttcatggcattagacagaggctggagaaagctaatcttgttgatgttgtcaattttccatcgtgtaaccgtgttcaagggcatattatcaggcggggtcgagatcggcattgtctccactgtcatatcgtcgagcaaagactggtccaggagcgcagaaacatgcttcaagaaaaaggtttatggctagcaacatcttgttcgattacttcctgtgatgttttaatccataaaatacagataggggttacactgttcagtttggttacttcgattttgggactgcttgcgatcttctgtagtgtttattcttgttcgattacttcgattctaggactgtgattttagttcgattacttcgattctgggattaccaaaatacagataggggttacactgtttacttcgattctaggactgccaaatgtctctactgtttgaaggcggtgtttattcttgtttattatttactagatgtctctgtatgcttgattatgcaagtagattattcaggtagtacatacatttttagttgtatttattcttgtttctattcggtgcttcattcaagtctgcaactttccaatgtctctgtgtgcttgatagcatattatcctatattcttgcgcaagaatctttttggacgcacaagtagttctatagagtttactacatcctttgatgttttaatccatgaaatacaaacttgtatctatctgttttggactgcgttccagagaaagaaatgtagtttagttatgtggttttacagacctatatctatttgtgtaatgcatttgcctgtatatgtgcagcttatgtccataattcttcaagtctgcatatgactgcatcattcttcagccttctagactccttccacttctgccccctcggatacaaggacttcccagacttaggtaacacaacctcttctcttctttcaacatgttgtcatgtggtgctcgagttatggtacaactggagttgggtgaaagcgacatggagccttgaagtggagagttgagctcatgaagcaggacaagagagccaaggtgttgtgccttcatggcttctgcacgagtgagagttttttgaagagtagatcaacaactggcactcttccactcgttatggatatgggtatgagaatccaatcttatgatgaccagttacttcatttagctgctgacttagctcagaggttgttgcccacatttgacactcctacaggttcatcaccttttctattattataatcttcctggaatgacttggttatatcttgcatcagaaatttgattccattttttcatttttttgttgtaaatggaccatttccattggtcagtaattg

SEQ ID NO: 30539 - DNA, 4680 bp, Zea Mays
acaaggacgggtcccgggggcacgcgcacgcacgcacccgagtcgcaggattttctactgctctgctgactgctactgccttctctccccttcctttcgttcgcttcccttcccttcccttcctccggtagctcccgctcccgctttcctcctcctcctcctcctgctcgcggggaagtccagcggagtcgccctcgccggagtgcggcccggcccggcccggcggcgccacctcggcgccggaggaggcacgtttgcgcgcccgccgcggagggtcgaggcccggatcgacgtggcgcggaggcgggctgtaatccccgcggtggctgctctgcttctggagacgcggggcgcgctgtggacctcccgtgcgcgcttcggttctgaccaacccgcgcctgctttccttgcccctcggccctcggatggtgccgtcggggcagcccaacccgatgggccctggacagcaggtgggcgcgtcgctgctccggacgacctccagcctcctcggcggcgcaggcggcgaccagccggggatggggatggtcggcgccggcggggtgctgccctcgcagtcgtcgcccttctcgtcccttgtctcgccgcgcacgcagtatggtggcggcagtgggaacggcttgctggccggcgcgtccagtgtcgcgtccatgctcagcaggcagcactcgtatgggaatggggggactggggcaatgccgggcagcggcgccggtctccccatcggtgggctgcagcacagaggcggccttgatggtgttggtgatttggttggcactggagggcccgattccatggtgttctcctcctcctcctccgcccctggtagtttcggcaatcagcttggtgccgacggcttacaacagcagcagatgcagctggatgcaccacacgattcacaaaatcaacagcagcagcaacagcaaatgccaatgacatataatcagcagcatatgatgccacaaactcagcagcagcagcagcctgcagtgaagctggagaatggaggcgtcctgggtggggtcaaactggagcagcagatggggcagccggatcagagtgtttccacacagatgcaacgcagttcgagtggcggtgtgaagcttgagccgcagttgcaagcgctgaggagcttgggtgctgtcaagatggagcaccaaagctccgatccatctgtggtcctgcagcaacagcagcatcaacagcaacgacatatgttgcagctgtctaagcagaacccccaggctgcagctactcagctgagcctcctacaacagcagcagctgttcttgcaactgcagcagcaacagcaacaacatcaacaacaacagcagattctcaagaacctgcctttgcagagaaaccaattgcagcagcagcaacagcagcaacaacaacagcaacatcagcaccagcagttgcttcgtcaacaaagtctaaatatgcgggctggtaaaacacctgcttatgaaccagggacctgtgcaaagagattgacacattacatgtatcaccagcaaaacaggccacaggacaataacatcgagtactggaggaactttgtcaatgaatactttgccccgagtgccaagaagaggtggtgcgtatctctgtatggcaatggccgtcaaactaccggagttttccctcaggatgtttggcattgtgagatatgcagtaggaagccagggcgaggttttgaaacgacagttgaggtcttgccacggttgtgccaaatcaaatatgccagtggtacacttgaggaacttctgtatgttgatatgccgaaagagtcccagaattcatctggacagattgttttggactataccaaagcgatccaggagagtgtctttgagcaactgcgtgtagttcgtgaggggcatctaagaattgtattcaaccaagaccttaagattgcatcgtgggagttctgtgctcggcgtcatgaggaacttattcctcggagatcaatcattccacaggtcagtcaacttggtgctgtggtgcaaaagtaccagtcttccgttcaaagttcagcgtcactctcaagtcaggacttgcaaaacaattgtaactcgtttgtggcatgtgctcgtcagttggctaaggcactggaagtgccattggtaaatgatttaggatacacgaaaagatatgtccgctgcctccagattgcagaggtggtcaattgtatgaaagatttgatcgatcacagcaggcagactgggtctggtccaatagagagcttgcataagttccctaggagggggaattcaggggttagttctgttcaagtccagcaggagtctgaggggcagaaacctgtcccacagaattctaaccagagtggccaaaattctgctcctgcaactggaatggaagcctctgcctccggcaatggtgatgctacgtcaaacaattcactcaattgtgcaccatgtacttccgcaccatcttcttcatctgttgttggtctcctccaaggctcagtaagttacagacaagaccatccaacaagcagtggcaatggtatctataatggcggaaacagtggtccagctgccaaggccaactcaacgaactccatgcaatcaaatggaccggcatcgtttcccttgccagcaccctcagcatcaaatggcaatatgatgcctgctccccagcactctagccaaatgaattcgccgaccatgccatcaagcctacctcctatgcaaacgcctgcaagtcggcctcaagaacccgagccaaacgagcctcaaagctcagtccagaggatactgcaagacctgatgatgcagtcccatattaacagcgttgggccagtgggaagcaatatgaagacagcaaacacggttggtcttaacggtgccaactccttagctggcaatcccatgacaaatagccctggaatcatcaacggaatgggattcggggctatgggtggccttggtcagcagatgagaacagcaatggggaacaacgcgttggcgatgaatggaagggccggcaccatgaatcacagcgcgcatgacctggcacagctgagccaccagcagcagcaacagcgagatttaggaaaccaattgctcgggggccttagggctgccaacagtttcaatagcctccagtacgactggaagtcgtctcagtagagtgagcaggagccagagagctcgcacctgatatttatactcgttgggtccatcactgacagcataaacgttacatccctcagaagcggcgggttcttatgttacagcaaaaaggaaacattagcaatgttacgacaagtgtctgtatggctgtgttcctttgtaatccgcaaataggaggaccgtacccaacccattgggggttgggggcaagtgtcggcggattccaaactggggggaagatcagagcgtctttcccctgttttttttcgggttggatgacgatgatttctctcttgcagtctgtgtaccatggctcaccgtactcttgtgtaccttttgatggccaagaatctcactgtagctgtgctatactatgtataagctgttatttactagtggaaagcatgaggaaaagtttctgaatcttggatgacgacccatctgtgtaactgtttttcttttcttttctgatgaatgttcactagtattaattaatatgtacacagatgaattaatacacacagatgcattaatatatatatattgaatcgaaatcgtgaactgaaactaattaatgtactctggattcgacatggaggtatggtatatataacacagcagtagcagacggctggctgcttgaattgatcatatcccgtatgcaaaggctactagagatacacatatgtgtttagtcgtcgatgcatgtatgcatggcatggcatggcatgctcatgaactaccgatgtacttgtcgatgagggtggtgagcgtggacttcgggacggcgccgatgacgctctccttcttctcgccgcccttgaagatgagcacggtggggatgctgcggatgccgtaggtagacgccacgttggggctgtcgtccgtgttcaccttgcagcacgtgatcttgccggcgtagtccttggccagctcgtcgatcaccggcgcgatcatccggcacggcccgcaccacggcgcccagaactccaccagcaccggcgtctcgcacgccatcaccaacccgtcccagttcttctcgtccgccaccacaactgccccgacaagcatatatcgccgagggtcatcgtcagtcagttcacttcatatatacatatatattggcagctagcaactgtgtatccaattattacctttcgtccactgcgttcttggactggcagacgtgccgcggccggcgcgtggcgacgcgggcccacggacagcggcgcgagcgcccgcttcgacggcagcaccaggttgccgacgaggagcctgtcctttgctgcccagcgggggcgtgcagcgcccacgctctgaagcacgtctccatggccattgttgtctctggtggacgaacgtgactagtgatgactagctaggtgggtgagtgaatggccggggcgtaggaggggataggatttgtttccctgccagatatttgggagcagcaacgtgaggtgggcagggccttcgtctctgcgtgtggatgaggtgtttt

SEQ ID NO: 30540 - DNA, 4935 bp, Zea Mays
cacgcacgcacccgagtcgcaggattttctactgctctgctgactgctactgccttctctccccttcctttcgttcgcttcccttcccttcccttcctccggtagctcccgctcccgctttcctcctcctcctcctcctgctcgcggggaagtccagcggagtcgccctcgccggagtgcggcccggcccggcccggcggcgccacctcggcgccggaggaggcacgtttgcgcgcccgccgcggagggtcgaggcccggatcgacgtggcgcggaggcgggctgtaatccccgcggtggctgctctgcttctggagacgcggggcgcgctgtggacctcccgtgcgcgcttcggttctgaccaacccgcgcctgctttccttgcccctcggccctcgggctcggccggcctctgctcggtgctgcagtactgcactgcaactcgcccagtcagtcgctcgctcgcttccgctgggattccaggacggaaggtggcgtgtggaggcgcgcgcgtttcgcccggctccggttttctgccgggcgccggagtcgctcgcagcctcgcctagatttgccgcgcgccgcggcggatgttccccgacgcgcggcggatctcggcggtttttgctgcggcgcggagtgaagcgtgaaggtacggtccccgactggatttcggggagatggtgccgtcggggcagcccaacccgatgggccctggacagcaggtgggcgcgtcgctgctccggacgacctccagcctcctcggcggcgcaggcggcgaccagccggggatggggatggtcggcgccggcggggtgctgccctcgcagtcgtcgcccttctcgtcccttgtctcgccgcgcacgcagtatggtggcggcagtgggaacggcttgctggccggcgcgtccagtgtcgcgtccatgctcagcaggcagcactcgtatgggaatggggggactggggcaatgccgggcagcggcgccggtctccccatcggtgggctgcagcacagaggcggccttgatggtgttggtgatttggttggcactggagggcccgattccatggtgttctcctcctcctcctccgcccctggtagtttcggcaatcagcttggtgccgacggcttacaacagcagcagatgcagctggatgcaccacacgattcacaaaatcaacagcagcagcaacagcaaatgccaatgacatataatcagcagcatatgatgccacaaactcagcagcagcagcagcctgcagtgaagctggagaatggaggcgtcctgggtggggtcaaactggagcagcagatggggcagccggatcagagtgtttccacacagatgcaacgcagttcgagtggcggtgtgaagcttgagccgcagttgcaagcgctgaggagcttgggtgctgtcaagatggagcaccaaagctccgatccatctgtggtcctgcagcaacagcagcatcaacagcaacgacatatgttgcagctgtctaagcagaacccccaggctgcagctactcagctgagcctcctacaacagcagcagctgttcttgcaactgcagcagcaacagcaacaacatcaacaacaacagcagattctcaagaacctgcctttgcagagaaaccaattgcagcagcagcaacagcagcaacaacaacagcaacatcagcaccagcagttgcttcgtcaacaaagtctaaatatgcgggctggtaaaacacctgcttatgaaccagggacctgtgcaaagagattgacacattacatgtatcaccagcaaaacaggccacaggacaataacatcgagtactggaggaactttgtcaatgaatactttgccccgagtgccaagaagaggtggtgcgtatctctgtatggcaatggccgtcaaactaccggagttttccctcaggatgtttggcattgtgagatatgcagtaggaagccagggcgaggttttgaaacgacagttgaggtcttgccacggttgtgccaaatcaaatatgccagtggtacacttgaggaacttctgtatgttgatatgccgaaagagtcccagaattcatctggacagattgttttggactataccaaagcgatccaggagagtgtctttgagcaactgcgtgtagttcgtgaggggcatctaagaattgtattcaaccaagaccttaagattgcatcgtgggagttctgtgctcggcgtcatgaggaacttattcctcggagatcaatcattccacaggtcagtcaacttggtgctgtggtgcaaaagtaccagtcttccgttcaaagttcagcgtcactctcaagtcaggacttgcaaaacaattgtaactcgtttgtggcatgtgctcgtcagttggctaaggcactggaagtgccattggtaaatgatttaggatacacgaaaagatatgtccgctgcctccagattgcagaggtggtcaattgtatgaaagatttgatcgatcacagcaggcagactgggtctggtccaatagagagcttgcataagttccctaggagggggaattcaggggttagttctgttcaagtccagcaggagtctgaggggcagaaacctgtcccacagaattctaaccagagtggccaaaattctgctcctgcaactggaatggaagcctctgcctccggcaatggtgatgctacgtcaaacaattcactcaattgtgcaccatgtacttccgcaccatcttcttcatctgttgttggtctcctccaaggctcagtaagttacagacaagaccatccaacaagcagtggcaatggtatctataatggcggaaacagtggtccagctgccaaggccaactcaacgaactccatgcaatcaaatggaccggcatcgtttcccttgccagcaccctcagcatcaaatggcaatatgatgcctgctccccagcactctagccaaatgaattcgccgaccatgccatcaagcctacctcctatgcaaacgcctgcaagtcggcctcaagaacccgagccaaacgagcctcaaagctcagtccagaggatactgcaagacctgatgatgcagtcccatattaacagcgttgggccagtgggaagcaatatgaagacagcaaacacggttggtcttaacggtgccaactccttagctggcaatcccatgacaaatagccctggaatcatcaacggaatgggattcggggctatgggtggccttggtcagcagatgagaacagcaatggggaacaacgcgttggcgatgaatggaagggccggcaccatgaatcacagcgcgcatgacctggcacagctgagccaccagcagcagcaacagcgagatttaggaaaccaattgctcgggggccttagggctgccaacagtttcaatagcctccagtacgactggaagtcgtctcagtagagtgagcaggagccagagagctcgcacctgatatttatactcgttgggtccatcactgacagcataaacgttacatccctcagaagcggcgggttcttatgttacagcaaaaaggaaacattagcaatgttacgacaagtgtctgtatggctgtgttcctttgtaatccgcaaataggaggaccgtacccaacccattgggggttgggggcaagtgtcggcggattccaaactggggggaagatcagagcgtctttcccctgttttttttcgggttggatgacgatgatttctctcttgcagtctgtgtaccatggctcaccgtactcttgtgtaccttttgatggccaagaatctcactgtagctgtgctatactatgtataagctgttatttactagtggaaagcatgaggaaaagtttctgaatcttggatgacgacccatctgtgtaactgtttttcttttcttttctgatgaatgttcactagtattaattaatatgtacacagatgaattaatacacacagatgcattaatatatatatattgaatcgaaatcgtgaactgaaactaattaatgtactctggattcgacatggaggtatggtatatataacacagcagtagcagacggctggctgcttgaattgatcatatcccgtatgcaaaggctactagagatacacatatgtgtttagtcgtcgatgcatgtatgcatggcatggcatggcatgctcatgaactaccgatgtacttgtcgatgagggtggtgagcgtggacttcgggacggcgccgatgacgctctccttcttctcgccgcccttgaagatgagcacggtggggatgctgcggatgccgtaggtagacgccacgttggggctgtcgtccgtgttcaccttgcagcacgtgatcttgccggcgtagtccttggccagctcgtcgatcaccggcgcgatcatccggcacggcccgcaccacggcgcccagaactccaccagcaccggcgtctcgcacgccatcaccaacccgtcccagttcttctcgtccgccaccacaactgccccgacaagcatatatcgccgagggtcatcgtcagtcagttcacttcatatatacatatatattggcagctagcaactgtgtatccaattattacctttcgtccactgcgttcttggactggcagacgtgccgcggccggcgcgtggcgacgcgggcccacggacagcggcgcgagcgcccgcttcgacggcagcaccaggttgccgacgaggagcctgtcctttgctgcccagcgggggcgtgcagcgcccacgctctgaagcacgtctccatggccattgttgtctctggtggacgaacgtgactagtgatgactagctaggtgggtgagtgaatggccggggcgtaggaggggataggatttgtttccctgccagatatttgggagcagcaacgtgaggtgggcagggccttcgtctctgcgtgtggatgaggtgtttt

SEQ ID NO: 30541 - DNA, 4550 bp, Zea Mays
gctcgcggggaagtccagcggagtcgccctcgccggagtgcggcccggcccggcccggcggcgccacctcggcgccggaggaggcacgtttgcgcgcccgccgcggagggtcgaggcccggatcgacgtggcgcggaggcgggctgtaatccccgcggtggctgctctgcttctggagacgcggggcgcgctgtggacctcccgtgcgcgcttcggttctgaccaacccgcgcctgctttccttgcccctcggccctcggatggtgccgtcggggcagcccaacccgatgggccctggacagcaggtgggcgcgtcgctgctccggacgacctccagcctcctcggcggcgcaggcggcgaccagccggggatggggatggtcggcgccggcggggtgctgccctcgcagtcgtcgcccttctcgtcccttgtctcgccgcgcacgcagtatggtggcggcagtgggaacggcttgctggccggcgcgtccagtgtcgcgtccatgctcagcaggcagcactcgtatgggaatggggggactggggcaatgccgggcagcggcgccggtctccccatcggtgggctgcagcacagaggcggccttgatggtgttggtgatttggttggcactggagggcccgattccatggtgttctcctcctcctcctccgcccctggtagtttcggcaatcagcttggtgccgacggcttacaacagcagcagatgcagctggatgcaccacacgattcacaaaatcaacagcagcagcaacagcaaatgccaatgacatataatcagcagcatatgatgccacaaactcagcagcagcagcagcctgcagtgaagctggagaatggaggcgtcctgggtggggtcaaactggagcagcagatggggcagccggatcagagtgtttccacacagatgcaacgcagttcgagtggcggtgtgaagcttgagccgcagttgcaagcgctgaggagcttgggtgctgtcaagatggagcaccaaagctccgatccatctgtggtcctgcagcaacagcagcatcaacagcaacgacatatgttgcagctgtctaagcagaacccccaggctgcagctactcagctgagcctcctacaacagcagcagctgttcttgcaactgcagcagcaacagcaacaacatcaacaacaacagcagattctcaagaacctgcctttgcagagaaaccaattgcagcagcagcaacagcagcaacaacaacagcaacatcagcaccagcagttgcttcgtcaacaaagtctaaatatgcgggctggtaaaacacctgcttatgaaccagggacctgtgcaaagagattgacacattacatgtatcaccagcaaaacaggccacaggacaataacatcgagtactggaggaactttgtcaatgaatactttgccccgagtgccaagaagaggtggtgcgtatctctgtatggcaatggccgtcaaactaccggagttttccctcaggatgtttggcattgtgagatatgcagtaggaagccagggcgaggttttgaaacgacagttgaggtcttgccacggttgtgccaaatcaaatatgccagtggtacacttgaggaacttctgtatgttgatatgccgaaagagtcccagaattcatctggacagattgttttggactataccaaagcgatccaggagagtgtctttgagcaactgcgtgtagttcgtgaggggcatctaagaattgtattcaaccaagaccttaagattgcatcgtgggagttctgtgctcggcgtcatgaggaacttattcctcggagatcaatcattccacagtcaacttggtgctgtggtgcaaaagtaccagtcttccgttcaaagttcagcgtcactctcaagtcaggacttgcaaaacaattgtaactcgtttgtggcatgtgctcgtcagttggctaaggcactggaagtgccattggtaaatgatttaggatacacgaaaagatatgtccgctgcctccagattgcagaggtggtcaattgtatgaaagatttgatcgatcacagcaggcagactgggtctggtccaatagagagcttgcataagttccctaggagggggaattcaggggttagttctgttcaagtccagcaggagtctgaggggcagaaacctgtcccacagaattctaaccagagtggccaaaattctgctcctgcaactggaatggaagcctctgcctccggcaatggtgatgctacgtcaaacaattcactcaattgtgcaccatgtacttccgcaccatcttcttcatctgttgttggtctcctccaaggctcagtaagttacagacaagaccatccaacaagcagtggcaatggtatctataatggcggaaacagtggtccagctgccaaggccaactcaacgaactccatgcaatcaaatggaccggcatcgtttcccttgccagcaccctcagcatcaaatggcaatatgatgcctgctccccagcactctagccaaatgaattcgccgaccatgccatcaagcctacctcctatgcaaacgcctgcaagtcggcctcaagaacccgagccaaacgagcctcaaagctcagtccagaggatactgcaagacctgatgatgcagtcccatattaacagcgttgggccagtgggaagcaatatgaagacagcaaacacggttggtcttaacggtgccaactccttagctggcaatcccatgacaaatagccctggaatcatcaacggaatgggattcggggctatgggtggccttggtcagcagatgagaacagcaatggggaacaacgcgttggcgatgaatggaagggccggcaccatgaatcacagcgcgcatgacctggcacagctgagccaccagcagcagcaacagcgagatttaggaaaccaattgctcgggggccttagggctgccaacagtttcaatagcctccagtacgactggaagtcgtctcagtagagtgagcaggagccagagagctcgcacctgatatttatactcgttgggtccatcactgacagcataaacgttacatccctcagaagcggcgggttcttatgttacagcaaaaaggaaacattagcaatgttacgacaagtgtctgtatggctgtgttcctttgtaatccgcaaataggaggaccgtacccaacccattgggggttgggggcaagtgtcggcggattccaaactggggggaagatcagagcgtctttcccctgttttttttcgggttggatgacgatgatttctctcttgcagtctgtgtaccatggctcaccgtactcttgtgtaccttttgatggccaagaatctcactgtagctgtgctatactatgtataagctgttatttactagtggaaagcatgaggaaaagtttctgaatcttggatgacgacccatctgtgtaactgtttttcttttcttttctgatgaatgttcactagtattaattaatatgtacacagatgaattaatacacacagatgcattaatatatatatatatatatatatatatatatatatatatatatatatatatactgaatcgaaatcgtgaactgaaactaattaatgtactctggattcgacatggaggtatggtatatataacacagcagtagcagacggctggctgcttgaattgatcatatcccgtatgcaaaggctactagagatacacatatgtgtttagtcgtcgatgcatgtatgcatggcatggcatggcatgctcatgaactaccgatgtacttgtcgatgagggtggtgagcgtggacttcgggacggcgccgatgacgctctccttcttctcgccgcccttgaagatgagcacggtggggatgctgcggatgccgtaggtagacgccacgttggggctgtcgtccgtgttcaccttgcagcacgtgatcttgccggcgtagtccttggccagctcgtcgatcaccggcgcgatcatccggcacggcccgcaccacggcgcccagaactccaccagcaccggcgtctcgcacgccatcaccaacccgtcccagttcttctcgtccgccaccacaactgccccgacaagcatatatcgccgagggtcatcgtcagtcagttcacttcatatatacatatatattggcagctagcaactgtgtatccaattattacctttcgtccactgcgttcttggactggcagacgtgccgcggccggcgcgtggcgacgcgggcccacggacagcggcgcgagcgcccgcttcgacggcagcaccaggttgccgacgaggagcctgtcctttgctgcccagcgggggcgtgcagcgcccacgctctgaagcacgtctccatggccattgttgtctctggtggacgaacgtgactagtgatgactagctaggtgggtgagtgaatggccggggcgtaggaggggataggatttgtttccctgccagatatttgggagcagcaacgtgaggtgggcagggccttcgtctctgcgtgtggatgaggtgtttt

SEQ ID NO: 30542 - DNA, 2235 bp, Zea Mays
ctgttgtagagttaccttcggactccaggccctcatccgcccctcctccccaaacgaaatgctatatttgcagaaaggtcccaatccaagtccaacaaccgaaaagaagacgacactcggagggctttcctgtaagtttcgagggcggcgaagcactagggcatccacctcggcggtggcggcggcggcctccatgtcgggcagcaacgggaacggcggcggcgcctcctccgcgctctatggcttatacggtcccaacgtgaaacctgatgttgtttttaaggaggctgctttaaactctacactaaacctgcaggatgttcagggtctagttacttgggttattggtgacggcatgctgccttcttgggtgtttgttaagaacaaacctcttatacccaaagtcgtcctactatatgttcctggccttgatgcagctttatatatgtcacaaactcgacttctctcttctctgaaagaattatgtggcaatccaaaacctgttctagcttcaagctgtataccggatgataggcacacaattgatgcactcctaacctgcagagtaaagagaaagcttgatgtaaaaacatcaaatcagtcatctaaacctgacagggatggaaaactatcaagtctggatgatcttggggacataccatttcctgttacgtattacacactttcagagaaagacttggaagataatggctaccccttcaatttaccaggttttgtccctactgtttcagctccttcaggttccttgccacataaagttcttgcacttgattgtgaaatgtgcataacagaagctggatttgagcttacaagagtgacattaattgacattaaaggatcggtggtgctagatagactagttaagcctgctaatccaatcattgattacaatacaaggttcagtggaatcactgctgagatgttggctgacgtgtccacatccctgcatgaaattcaggaagagtttgttggacttgtatatacagaaacaattcttgttggtcattctttggaaaatgaccttatggcattgcagatatcccatggtttaatcatcgacacagctgttttgtacaagtataatcgaggatctcgctgtaagattgctttgcgtgtcttgacaaaaagatttctcggccgggagatccagaacacaggatctgggcatgacagtgtggaagatgctagagctgctctagaacttgctatattgaaaataagacatgatcgatattcagatacttcttgcaattcaattgctgtcttttctgatgatgatgccctctccagatcaatgaaggaggtgaagaacgacaaagtggctttcatttggacccagttctcaggattgatctcttacttccgccgaagagctgaagatcccgaaaagttgaaatcatgtgtcgcagaggctattgcattaaaaacatgtgatacaaaaactgcttcaaaaaaagcaaaaagtcaaatttgtcctgaattaaaggaaattttgtgtgaattggataaaaagataaagcagttatatggtgccctacctgacaattctatgcttattgtatgcaccggccatggtgatactcctctagtacgaagattgcggaaaatgcttcaccatgaagaagaaacaatagatagccgggaaaatattgtccaagctctgggagatttacaagcccaagccgaagttgctctgtgcttctgctgtgttaagcattaactaactgcatctttggattaatgtactgatggatatggcttcagccattatagaaggggggtggcaaaagttccggctatatggtatcggaccatgttttcgattcataatatggcccttactatttacactcagggagactgttcatgcggggaagaacattggccactgcctacggaagtgcggtaaatggcaatatgacgcacgtgctcctgatcctgatgcagccagcctgacgaatcccaaatacgggcaggctattgggtttgttgaccccaagctgtccttggagagttgaattcattaatttatttatggctagaccaggatgttatggttgcttgttactttcactgaatcttcaagtgggttcgttgtataaataatactctcttcatttttttaatctgttgcggtatagtttaaaaataaactaacgagcgacaaatattgagaaccaaggtggtacacccttcgttccagaatagtaatcc

SEQ ID NO: 30543 - DNA, 2340 bp, Zea Mays
ctgttgtagagttaccttcggactccaggccctcatccgcccctcctccccaaacgaaatgctatatttgcagaaaggtcccaatccaagtccaacaaccgaaaagaagacgacactcggagggctttcctgtaagtttcgagggcggcgaagcactagggcatccacctcggcggtggcggcggcggcctccatgtcgggcagcaacgggaacggcggcggcgcctcctccgcgctctatggcttatacggtcccaacgtgaaacctgatgttgtttttaaggaggctgctttaaactctacactaaacctgcaggatgttcagggtctagttacttgggttattggtgacggcatgctgccttcttgggtgtttgttaagaacaaacctcttatacccaaagtcgtcctactatatgttcctggccttgatgcagctttatatatgtcacaaactcgacttctctcttctctgaaagaattatgtggcaatccaaaacctgttctagcttcaagctgtataccggatgataggcacacaattgatgcactcctaacctgcagagtaaagagaaagcttgatgtaaaaacatcaaatcagtcatctaaacctgacagggatggaaaactatcaagtctggatgatcttggggacataccatttcctgttacgtattacacactttcagagaaagacttggaagataatggctaccccttcaatttaccaggttttgtccctactgtttcagctccttcaggttccttgccacataaagttcttgcacttgattgtgaaatgtgcataacagaagctggatttgagcttacaagagtgacattaattgacattaaaggatcggtggtgctagatagactagttaagcctgctaatccaatcattgattacaatacaaggttcagtggaatcactgctgagatgttggctgacgtgtccacatccctgcatgaaattcaggaagagtttgttggacttgtatatacagaaacaattcttgttggtcattctttggaaaatgaccttatggcattgcagatatcccatggtttaatcatcgacacagctgttttgtacaagtataatcgaggatctcgctgtaagattgctttgcgtgtcttgacaaaaagatttctcggccgggagatccagaacacaggatctgggcatgacagtgtggaagatgctagagctgctctagaacttgctatattgaaaataagacatggtcctgattttggttcccaaccatcgttgtcaaggcggaaattgacatctatactgcatgagagtgggaaaaaatgctcccttattgatgacatgtctattctagatcgatattcagatacttcttgcaattcaattgctgtcttttctgatgatgatgccctctccagatcaatgaaggaggtgaagaacgacaaagtggctttcatttggacccagttctcaggattgatctcttacttccgccgaagagctgaagatcccgaaaagttgaaatcatgtgtcgcagaggctattgcattaaaaacatgtgatacaaaaactgcttcaaaaaaagcaaaaagtcaaatttgtcctgaattaaaggaaattttgtgtgaattggataaaaagataaagcagttatatggtgccctacctgacaattctatgcttattgtatgcaccggccatggtgatactcctctagtacgaagattgcggaaaatgcttcaccatgaagaagaaacaatagatagccgggaaaatattgtccaagctctgggagatttacaagcccaagccgaagttgctctgtgcttctgctgtgttaagcattaactaactgcatctttggattaatgtactgatggatatggcttcagccattatagaaggggggtggcaaaagttccggctatatggtatcggaccatgttttcgattcataatatggcccttactatttacactcagggagactgttcatgcggggaagaacattggccactgcctacggaagtgcggtaaatggcaatatgacgcacgtgctcctgatcctgatgcagccagcctgacgaatcccaaatacgggcaggctattgggtttgttgaccccaagctgtccttggagagttgaattcattaatttatttatggctagaccaggatgttatggttgcttgttactttcactgaatcttcaagtgggttcgttgtataaataatactctcttcatttttttaatctgttgcggtatagtttaaaaataaactaacgagcgacaaatattgagaaccaaggtggtacacccttcgttccagaatagtaatcc

SEQ ID NO: 30544 - DNA, 2471 bp, Zea Mays
ctgttgtagagttaccttcggactccaggccctcatccgcccctcctccccaaacgaaatgctatatttgcagaaaggtcccaatccaagtccaacaaccgaaaagaagacgacactcggagggctttcctgtaagtttcgagggcggcgaagcactagggcatccacctcggcggtggcggcggcggcctccatgtcgggcagcaacgggaacggcggcggcgcctcctccgcgctctatggcttatacggtcccaacgtgaaacctgatgttgtttttaaggaggctgctttaaactctacactaaacctgcaggatgttcagggtctagttacttgggttattggtgacggcatgctgccttcttgggtgtttgttaagaacaaacctcttatacccaaagtcgtcctactatatgttcctggccttgatgcagctttatatatgtcacaaactcgacttctctcttctctgaaagaattatgtggcaatccaaaacctgttctagcttcaagctgtataccggatgataggcacacaattgatgcactcctaacctgcagagtaaagagaaagcttgatgtaaaaacatcaaatcagtcatctaaacctgacagggatggaaaactatcaagtctggatgatcttggggacataccatttcctgttacgtattacacactttcagagaaagacttggaagataatggctaccccttcaatttaccaggttttgtccctactgtttcagctccttcaggttccttgccacataaagttcttgcacttgattgtgaaatgtgcataacagaagctggatttgagcttacaagagtgacattaattgacattaaaggatcggtggtgctagatagactagttaagcctgctaatccaatcattgattacaatacaagtggaatcactgctgagatgttggctgacgtgtccacatccctgcatgaaattcaggaagagtttgttggacttgtatatacagaaacaattcttgttggtcattctttggaaaatgaccttatggcattgcagatatcccatggtttaatcatcgacacagctgttttgtacaagtataatcgaggatctcgctgtaagattgctttgcgtgtcttgacaaaaagatttctcggccgggagatccagaacacaggatctgggcatgacagtgtggaagatgctagagctgctctagaacttgctatattgaaaataagacatggtaagaactaagaaggcatttttgctatcacttttgtttggctaacatccatttctgtaaatagctaatgtggatagggagacaacatggcataagcatatcattttgttggtactttctactaacttgttaaccaggtcctgattttggttcccaaccatcgttgtcaaggcggaaattgacatctatactgcatgagagtgggaaaaaatgctcccttattgatgacatgtctattctagatcgatattcagatacttcttgcaattcaattgctgtcttttctgatgatgatgccctctccagatcaatgaaggaggtgaagaacgacaaagtggctttcatttggacccagttctcaggattgatctcttacttccgccgaagagctgaagatcccgaaaagttgaaatcatgtgtcgcagaggctattgcattaaaaacatgtgatacaaaaactgcttcaaaaaaagcaaaaagtcaaatttgtcctgaattaaaggaaattttgtgtgaattggataaaaagataaagcagttatatggtgccctacctgacaattctatgcttattgtatgcaccggccatggtgatactcctctagtacgaagattgcggaaaatgcttcaccatgaagaagaaacaatagatagccgggaaaatattgtccaagctctgggagatttacaagcccaagccgaagttgctctgtgcttctgctgtgttaagcattaactaactgcatctttggattaatgtactgatggatatggcttcagccattatagaaggggggtggcaaaagttccggctatatggtatcggaccatgttttcgattcataatatggcccttactatttacactcagggagactgttcatgcggggaagaacattggccactgcctacggaagtgcggtaaatggcaatatgacgcacgtgctcctgatcctgatgcagccagcctgacgaatcccaaatacgggcaggctattgggtttgttgaccccaagctgtccttggagagttgaattcattaatttatttatggctagaccaggatgttatggttgcttgttactttcactgaatcttcaagtgggttcgttgtataaataatactctcttcatttttttaatctgttgcggtatagtttaaaaataaactaacgagcgacaaatattgagaaccaaggtggtacacccttcgttccagaatagtaatcc

SEQ ID NO: 30545 - DNA, 2140 bp, Zea Mays
ctcgttctctgttgctctgttagtggatttttttaacccccactgcatggcaaaattgggtgctgctgcagcctgcgggggttttagctacgagtgaaacctgatgttgtttttaaggaggctgctttaaactctacactaaacctgcaggatgttcagggtctagttacttgggttattggtgacggcatgctgccttcttgggtgtttgttaagaacaaacctcttatacccaaagtcgtcctactatatgttcctggccttgatgcagctttatatatgtcacaaactcgacttctctcttctctgaaagaattatgtggcaatccaaaacctgttctagcttcaagctgtataccggatgataggcacacaattgatgcactcctaacctgcagagtaaagagaaagcttgatgtaaaaacatcaaatcagtcatctaaacctgacagggatggaaaactatcaagtctggatgatcttggggacataccatttcctgttacgtattacacactttcagagaaagacttggaagataatggctaccccttcaatttaccaggttttgtccctactgtttcagctccttcaggttccttgccacataaagttcttgcacttgattgtgaaatgtgcataacagaagctggatttgagcttacaagagtgacattaattgacattaaaggatcggtggtgctagatagactagttaagcctgctaatccaatcattgattacaatacaaggttcagtggaatcactgctgagatgttggctgacgtgtccacatccctgcatgaaattcaggaagagtttgttggacttgtatatacagaaacaattcttgttggtcattctttggaaaatgaccttatggcattgcagatatcccatggtttaatcatcgacacagctgttttgtacaagtataatcgaggatctcgctgtaagattgctttgcgtgtcttgacaaaaagatttctcggccgggagatccagaacacaggatctgggcatgacagtgtggaagatgctagagctgctctagaacttgctatattgaaaataagacatggcggaaattgacatctatactgcatgagagtgggaaaaaatgctcccttattgatgacatgtctattctagatcgatattcagatacttcttgcaattcaattgctgtcttttctgatgatgatgccctctccagatcaatgaaggaggtgaagaacgacaaagtggctttcatttggacccagttctcaggattgatctcttacttccgccgaagagctgaagatcccgaaaagttgaaatcatgtgtcgcagaggctattgcattaaaaacatgtgatacaaaaactgcttcaaaaaaagcaaaaagtcaaatttgtcctgaattaaaggaaattttgtgtgaattggataaaaagataaagcagttatatggtgccctacctgacaattctatgcttattgtatgcaccggccatggtgatactcctctagtacgaagattgcggaaaatgcttcaccatgaagaagaaacaatagatagccgggaaaatattgtccaagctctgggagatttacaagcccaagccgaagttgctctgtgcttctgctgtgttaagcattaactaactgcatctttggattaatgtactgatggatatggcttcagccattatagaaggggggtggcaaaagttccggctatatggtatcggaccatgttttcgattcataatatggcccttactatttacactcagggagactgttcatgcggggaagaacattggccactgcctacggaagtgcggtaaatggcaatatgacgcacgtgctcctgatcctgatgcagccagcctgacgaatcccaaatacgggcaggctattgggtttgttgaccccaagctgtccttggagagttgaattcattaatttatttatggctagaccaggatgttatggttgcttgttactttcactgaatcttcaagtgggttcgttgtataaataatactctcttcatttttttaatctgttgcggtatagtttaaaaataaactaacgagcgacaaatattgagaaccaaggtggtacacccttcgttccagaatagtaatcc

SEQ ID NO: 30546 - DNA, 1419 bp, Zea Mays
ggtgcttttacctcccctttatggttcagtggaatcactgctgagatgttggctgacgtgtccacatccctgcatgaaattcaggaagagtttgttggacttgtatatacagaaacaattcttgttggtcattctttggaaaatgaccttatggcattgcagatatcccatggtttaatcatcgacacagctgttttgtacaagtataatcgaggatctcgctgtaagattgctttgcgtgtcttgacaaaaagatttctcggccgggagatccagaacacaggatctgggcatgacagtgtggaagatgctagagctgctctagaacttgctatattgaaaataagacatggtcctgattttggttcccaaccatcgttgtcaaggcggaaattgacatctatactgcatgagagtgggaaaaaatgctcccttattgatgacatgtctattctagatcgatattcagatacttcttgcaattcaattgctgtcttttctgatgatgatgccctctccagatcaatgaaggaggtgaagaacgacaaagtggctttcatttggacccagttctcaggattgatctcttacttccgccgaagagctgaagatcccgaaaagttgaaatcatgtgtcgcagaggctattgcattaaaaacatgtgatacaaaaactgcttcaaaaaaagcaaaaagtcaaatttgtcctgaattaaaggaaattttgtgtgaattggataaaaagataaagcagttatatggtgccctacctgacaattctatgcttattgtatgcaccggccatggtgatactcctctagtacgaagattgcggaaaatgcttcaccatgaagaagaaacaatagatagccgggaaaatattgtccaagctctgggagatttacaagcccaagccgaagttgctctgtgcttctgctgtgttaagcattaactaactgcatctttggattaatgtactgatggatatggcttcagccattatagaaggggggtggcaaaagttccggctatatggtatcggaccatgttttcgattcataatatggcccttactatttacactcagggagactgttcatgcggggaagaacattggccactgcctacggaagtgcggttgatggtgtacttgcaatccatattctggcttggctttgtttcaaggaaggacaaattggtggtaggagagaggtggaagtagatgggatcacgattgattttgttgattgccatatatcacgaacttatattgcaagaaatattttctataccttttataaaagacatgtcctgtgcattatttatagcagatgatggaagttcaaggatcctgagatatcctgttcgctttagattaaagtcatctgtttgaactgcaatttatagagacaaagttttt

SEQ ID NO: 30547 - DNA, 862 bp, Zea Mays
tttccctccaccgcacccacgatcaaaaacgtacaaaaccatcgctaccccctcaccctcactctccctgctgcaacccaaccaagcccgcacgacacgacaccaagtcgaggagctcgagagggcaccaataatggccggcgtgaactccagcgtcgtcgggctcaagcccgccgcggcagtgccgcaggccgccgccgcctcatcgccggcgaagcgggtgcagctggccgcgcccgagggccgccgcgccgctctgctcggcctggcggccgtcttcgccgtcacggccaccaccgggtcggccaaggccacgatcttcgatgagtacctcgagaagagcaaggccaacaaggagctgaacgacaagaagaggctggccaccagtggagccaactttgcgcgcgcctacaccgtggagttcggcagctgccagttcccctacaacttcactgggtgccaggacctcgccaagcagaagaagtccccttcatcagcgacgacctcgagattgagtgcgaggggaaggagaagttcaagtgcggctccaacgttttctggaagtggtgaagcagctagcagcagcgtctgatgggaatggaggagatcatcacctgtcttgtcgaccctagatatgtccaaactgcagggaaattaaatcttcatgtgtaattgtgctcattctgtttcaatcatctcaacatccgatcatgaacctcttgcattattaactggctcgatcgtcttctcagtttaagacattggaggctgctttgtttgtttcagaggtccttcttaagatgatgctatattttgtcatggttaatgtgataaacagggtcaggtcggattattcttgaat

SEQ ID NO: 30548 - DNA, 1666 bp, Zea Mays
catcgatttccacgacgcacaacctctccaccaacctcgtcgtgcttgcggtgtcatcgggaagccgttagccgcctgccttgccggtttgtcgtcgaattcttttcagttggaaaatgatagccgagtgcctagtttatttagtgtcattttctcctccagttcctcacgcccagcaagccatcgtgctcgacgcgcttcctttatccgaactcgcgcaattctctcgcttcgtcgtcattcgcagaacacccagaagaagtggtgtctgaagaaggagttcacttcagtgcctgctgatccagtggtggagtttcatctaactgcttacctgattagaagggttttagatcttctcctgcaaaaaggcaagccccagtgcatttgccatcttccttgtattacaatattttatcacttatatgttgcattaggtgataggagttgaatgattaaacacttgatgcattaccatccttcaaagattgattatcataccttgttacctgttttataaaagctagtgatgcttagtcctgcttatagattaagaaaaatgtttttgatctatgactcatgatttttaaagaagaaaaagggcttggaatgatggaggcatcctccgcggggatgaatccatcattcaagcaaggtacctctgctaggtaccaaattttgagaattgcttaaaatgagaccatacgtcgagctggagaggtcgcccgtctgtgtcgattaaggaacgtaccgattgtaggcctgttaatctaggaccttttagctggccacatacctcgtcatgggtaagcctgaacccggctactccatatgtgaaaagacaatcgcgcactgggagtggagagatggcgggagtagcgtgtacccacttgacacgtggctggatggtggagtaccgtactcttgggtggcgcggaccggttcacgtagtggaggacccgtgggaatggtagacatatgcaagggttaagtgctacatatgtcgtgtggttggagatccccagctgggtattaatcgattcgaatcgccgttacttctcggtcatgaagactagatcactactctacatcgtagataacaagtataacaaagttttggttaaaagaaatctagtgtaggccaagtgaatgatctagattaggagaatctagagatagattagtaaattcaggtaatcacttaacttgtaaaataaaacttggcttaaggatccattattagtaagcttttatgcaaaaaaagagtccttggtaattgataaccttttcccttgattccccaaaagctagcatgcccttgagagtctttttcttagtcgggtaagacttgctgagtaattccctactcagggttttattccctatgttgttgcaggaaagaatttgatgacttgggctttattagttgctccttatggaggtcttgaagcttagattatttatgtgaatcttttattgaaaggcttcacctttccaagtattgtagttaagttatgcactctaaagactatcaggacttgtaataattttgatcccttttatgttgtaagacttgagttctagaatgtaaagtgtattttataaaagtcttccgctctatctccaatgtgtgtatcaaatgtgattactataatatgcctgttatgtg

SEQ ID NO: 30549 - DNA, 1245 bp, Zea Mays
ccggtttgtcgtcgaattcttttcagttggaaaatgatagccgagtgcctagtttatttagtgtcattttctcctccagttcctcacgcccagcaagccatcgtgctcgacgcgcttcctttatccgaactcgcgcaattctctcgcttcgtcgtcattcgcaggtagtgtaagtatgattatttattccagatgtatacatagttgcgagagtgttcgggggaaattgttttgtgagtgtttacggccgttttgtgactcgcgccatcggatcagaccatgtgattttgtatgtgtgtcacagtcgtctggttagtggacaaaaggaattaaatggtgaaacaattaaagttcctggtaaaaataatcttaggatttttgtagcaaatagatattttctttggtgaatagaaaatgctttaagtgtacttatatgaattttagtgatgaaaatagagcactaaaaattgtgggaaaatttgtataagcttgtcttggacatattatcgatctcttgggtgaagttgaagttgtttggacatggtttgcttagcaaactaattattgctcaaaatagaaggaaggatttcatccttggtaattagggcatatagtgtcttaatgatgagatgatgttacttattgagtttgtggtgtttgggtgaagtcttagatgaattgattccctggtggttggtagttttaaagataccttggtagacctctaatgttttggctagttttgtgcaccctgtagaaaagtgtactcaggatgggttgtttattaccttctttatgaaatgcatttccataccatagcaaacattcatctacatgtaattgacttgtagaacacccagaagaagtggtgtctgaagaaggagttcacttcagtgcctgctgatccagtggtggagtttcatctaactgcttacctgattagaagggttttagatcttctcctgcaaaaaggaaagaatttgatgacttgggctttattagttgctccttatggaggtcttgaagcttagattatttatgtgaatcttttattgaaaggcttcacctttccaagtattgtagttaagttatgcactctaaagactatcaggacttgtaataattttgatcccttttatgttgtaagacttgagttctagaatgtaaagtgtattttataaaagtcttccgctctatctccaatgtgtgtatcaaatgtgattactataatatgcctgttatgtg

SEQ ID NO: 30550 - DNA, 480 bp, Zea Mays
gttcctcacgcccagcaagccatcgtgctcgacgcgcttcctttatccgaactcgcgcaattctctcgcttcgtcgtcattcgcagaacacccagaagaagtggtgtctgaagaaggagttcacttcagtgcctgctgatccagtggtggagtttcatctaactgcttacctgattagaagggttttagatcttctcctgcaaaaaggaaagaatttgatgacttgggctttattagttgctccttatggaggtcttgaagcttagattatttatgtgaatcttttattgaaaggcttcacctttccaagtattgtagttaagttatgcactctaaagactatcaggacttgtaataattttgatcccttttatgttgtaagacttgagttctagaatgtaaagtgtattttataaaagtcttccgctctatctccaatgtgtgtatcaaatgtgattactataatatgcctgttatgtg

SEQ ID NO: 30551 - DNA, 343 bp, Zea Mays
aagccatcgtgctcgacgcgcttcctttatccgaactcgcgcaattctctcgcttcgtcgtcattcgcaggaaagaatttgatgacttgggctttattagttgctccttatggaggtcttgaagcttagattatttatgtgaatcttttattgaaaggcttcacctttccaagtattgtagttaagttatgcactctaaagactatcaggacttgtaataattttgatcccttttatgttgtaagacttgagttctagaatgtaaagtgtattttataaaagtcttccgctctatctccaatgtgtgtatcaaatgtgattactataatatgcctgttatgtg

SEQ ID NO: 30552 - DNA, 290 bp, Zea Mays
cgtcattcgcaggtagtgaaagaatttgatgacttgggctttattagttgctccttatggaggtcttgaagcttagattatttatgtgaatcttttattgaaaggcttcacctttccaagtattgtagttaagttatgcactctaaagactatcaggacttgtaataattttgatcccttttatgttgtaagacttgagttctagaatgtaaagtgtattttataaaagtcttccgctctatctccaatgtgtgtatcaaatgtgattactataatatgcctgttatgtg

SEQ ID NO: 30553 - DNA, 2941 bp, Zea Mays
aaggctacggtttgccactgggccggaccgttcccatcttgcagttgcgtcccctctcgctcgcggccatggcgaaacctcgcggggcgccgaagctcctctacccccgccaccggcggctcctacggtcaccgatctcgcgctgcgcttgcctgttcctcgccttcgctgcgctcctcctcgtctcctccctgcaccaggtcgttcgggtcgacctactacgcccggacccgccccaccaggtgtcaaatgatcaactgtgggcttctaatggttatggttatcatgcttgtgttacaccaacctctagatataaggttcaaggcaagtcagacagctacatgactgttagaagtaatggaggactcaaccaaatgcgcactggaatctgtgatatggttgcagttgcccgtttggtgaatgcaacacttgttatccctcagttagataagcgatccttctggcaagataccagtacatttaaagacatatttgatgagcctcattttattaaggctttggaaggagatgtccacattgtgagtgacttgcctggaagtttgcaatctgctccaagagcccggaaacatttcacctcatggtccggtgcaagttattatgaggaagtgaaagagctctggaagaatcagaaggtagttcacatcccaaaatctgattcgcgtcttgctaacaacggtcttccaattgatatccagagattgagatgccgctgtctttaccaagcactgcgtttttcggatctgattgaggaccttggaaagaagctagtagagcgtctaagatctcatggaaaatatattgctcttcatctacgatatgagaaggatatgctagcatttacgggatgcacttacggtctgagtgatttggaagcaaatgagttgagaattatgagagagagaacaagccactggaaactgaaggatataaactcaactgaacagagatatgaaggcaactgtccactgacaccaaatgaggtgggcatttttctgcgtgctatgggctatcctgaatccacgtggatataccttgcagcaggtgaaatttatggtggtgaaaagtatatatcaaaattgagatcatacttcccaaatttggttagcaaggacatgctagcaacagaagaagagcttgcgaaattcagtaatcatgcttctcaagttgctgcccttgattacataatcgcagttgaaagtgatgtgtttattccatcacactctggcaatatggcaaaagctgtagaaggccatcgtcgatttctagggcatcgtaaaactatcactcctgacaggaaaggattggtggaactctttgatttactggaaaaaggggatctcacggaaggtcctaagctgtcggcacttgttactgacatgcacaagtacagacaagggactccaaggaagaggtatggctccttgccaggaagcaagggcagagcacggcttaggactgaggaatctttttacgagaacccgtttcctgagtgcatctgtttgactgggaggtcctgatgtatagctttgcatgatgatgacacggtgcacccatcattggaggtgtgctagtgcttcagtctggccattggagctctaccggtactttgtgatgaaaaaagctgatctggtactcaaggacacaagttagtgaaggacgtcttccttctcgtgatcaacatgcaatgcaatgaccttgttggaccagatggagggctggggccactgcaaccaagaaaccgtacatgaactgttttgtcccccgcaaactcgagagatttggcatgtttgccattagtaacgaaagtttcgaggtatatatgcgttggcaagcatctgtacccttcgaggcaacatcagggggaaaaaaaatatagtaaaagcatttagccttagcgagcaggtttacacaagctgttgaactgctgctgcagctttgtaaccttacagagttagagtggtcatcagaagcgatgctcacttgtcctctctccgtattaccgtctcccatgtcctctaatcatatcaacaagagccaggcgctgtaaaaaaaaagtagtagtaggaattggaaccctacacgactcgaaatgattgtgctatctgtttgaggtctttgtaatgcctcttccactgcagacctgcaaaagattcccagctatttattgtattattcaggataataataaaaaaaagagttggcttgcatttctgcgaacaatggctttaccgtttgcagttacactgaagaggtagagcctgttcccagctgccgtggcggtgatgaacacatggggcggctccagctcgaactggtagtaagttcttcccgaatgcgccgccgtctccgaggacaggaccttcccttccacgttctctccgatgacctccggaccgaaggcggtgatcaccttctccgggctgccgatcttctcgatggtcgcgtcgtccaggtcatctgtaggacgggaaccatatcacaacatttcttgagcattttgttcaggtctcagctcacctgcgaaccggcgaactggggccacgatgacgaacagccggccttccttggggtttgcgaagcgcaggtcgatctccgtgccgcccagatcagcaatggacaccgggacctcatcccagccgtctggaactttgaagctgtacgggatgatggggctccagccaactccgtggccaccggacttgtcgtctggcctgcggtacgttctccaacctgtcattttcgtcaggttcagacaagccggggaccctcccggcgagcaggccctggttggccgccagaccacggcctgcaaacccaagcactgaggcgacagctgctgcggaagccaacgcacgcctccccaccaccactgctacaccctcctgatcttcacgccccactgacagggagggcccgctga

SEQ ID NO: 30554 - DNA, 1532 bp, Zea Mays
ccgttcccatcttgcagttgcgtcccctctcgctcgcggccatggcgaaacctcgcggggcgccgaagctcctctacccccgccaccggcggctcctacggtcaccgatctcgcgctgcgcttgcctgttcctcgccttcgctgcgctcctcctcgtctcctccctgcaccaggtcgttcgggtcgacctactacgcccggacccgccccaccagttcaaggcaagtcagacagctacatgactgttagaagtaatggaggactcaaccaaatgcgcactggaatctgtgatatggttgcagttgcccgtttggtgaatgcaacacttgttatccctcagttagataagcgatccttctggcaagataccagtacatttaaagacatatttgatgagcctcattttattaaggctttggaaggagatgtccacattgtgagtgacttgcctggaagtttgcaatctgctccaagagcccggaaacatttcacctcatggtccggtgcaagttattatgaggaagtgaaagagctctggaagaatcagaaggtagttcacatcccaaaatctgattcgcgtcttgctaacaacggtcttccaattgatatccagagattgagatgccgctgtctttaccaagcactgcgtttttcggatctgattgaggaccttggaaaggcatgaattctcttgataaactgtacatatctttaactcagaatttactgtcttcaattgcagttggagatttatagcagtctctaattagattctgagccaatgtaacacttacgaaacagaagctagtagagcgtctaagatctcatggaaaatatattgctcttcatctacgatatgagaaggatatgctagcatttacgggatgcacttacggtctgagtgatttggaagcaaatgagttgagaattatgagagagagaacaagccactggaaactgaaggatataaactcaactgaacagagatatgaaggcaactgtccactgacaccaaatgaggtgggcatttttctgcgtgctatgggctatcctgaatccacgtggatataccttgcagcaggtgaaatttatggtggtgaaaagtatatatcaaaattgagatcatacttcccaaatttggttagcaaggacatgctagcaacagaagaagagcttgcgaaattcagtaatcatgcttctcaagttgctgcccttgattacataatcgcagttgaaagtgatgtgtttattccatcacactctggcaatatggcaaaagctgtagaaggccatcgtcgatttctagggcatcgtaaaactatcactcctgacagtctctgataagtgcacacttatcttgcacatatttcatagatcccagtatcgttttggatgtttcttttctgtggacatttgcaagtgtatggagttataagtcctttatttgtgcagtatccttttacttactcctctttatttttacacttttgacattatgctctatcaatcttcgccatgtaactaagtgttcg

SEQ ID NO: 30555 - DNA, 2789 bp, Zea Mays
ccgttcccatcttgcagttgcgtcccctctcgctcgcggccatggcgaaacctcgcggggcgccgaagctcctctacccccgccaccggcggctcctacggtcaccgatctcgcgctgcgcttgcctgttcctcgccttcgctgcgctcctcctcgtctcctccctgcaccaggtcgttcgggtcgacctactacgcccggacccgccccaccagttcaaggcaagtcagacagctacatgactgttagaagtaatggaggactcaaccaaatgcgcactggaatctgtgatatggttgcagttgcccgtttggtgaatgcaacacttgttatccctcagttagataagcgatccttctggcaagataccagtacatttaaagacatatttgatgagcctcattttattaaggctttggaaggagatgtccacattgtgagtgacttgcctggaagtttgcaatctgctccaagagcccggaaacatttcacctcatggtccggtgcaagttattatgaggaagtgaaagagctctggaagaatcagaaggtagttcacatcccaaaatctgattcgcgtcttgctaacaacggtcttccaattgatatccagagattgagatgccgctgtctttaccaagcactgcgtttttcggatctgattgaggaccttggaaagaagctagtagagcgtctaagatctcatggaaaatatattgctcttcatctacgatatgagaaggatatgctagcatttacgggatgcacttacggtctgagtgatttggaagcaaatgagttgagaattatgagagatatgaaggcaactgtccactgacaccaaatgaggtgggcatttttctgcgtgctatgggctatcctgaatccacgtggatataccttgcagcaggtgaaatttatggtggtgaaaagtatatatcaaaattgagatcatacttcccaaatttggttagcaaggacatgctagcaacagaagaagagcttgcgaaattcagtaatcatgcttctcaagttgctgcccttgattacataatcgcagttgaaagtgatgtgtttattccatcacactctggcaatatggcaaaagctgtagaaggccatcgtcgatttctagggcatcgtaaaactatcactcctgacaggaaaggattggtggaactctttgatttactggaaaaaggggatctcacggaaggtcctaagctgtcggcacttgttactgacatgcacaagtacagacaagggactccaaggaagaggtatggctccttgccaggaagcaagggcagagcacggcttaggactgaggaatctttttacgagaacccgtttcctgagtgcatctgtttgactgggaggtcctgatgtatagctttgcatgatgatgacacggtgcacccatcattggaggtgtgctagtgcttcagtctggccattggagctctaccggtactttgtgatgaaaaaagctgatctggtactcaaggacacaagttagtgaaggacgtcttccttctcgtgatcaacatgcaatgcaatgaccttgttggaccagatggagggctggggccactgcaaccaagaaaccgtacatgaactgttttgtcccccgcaaactcgagagatttggcatgtttgccattagtaacgaaagtttcgaggtatatatgcgttggcaagcatctgtacccttcgaggcaacatcagggggaaaaaaaatatagtaaaagcatttagccttagcgagcaggtttacacaagctgttgaactgctgctgcagctttgtaaccttacagagttagagtggtcatcagaagcgatgctcacttgtcctctctccgtattaccgtctcccatgtcctctaatcatatcaacaagagccaggcgctgtaaaaaaaaagtagtagtaggaattggaaccctacacgactcgaaatgattgtgctatctgtttgaggtctttgtaatgcctcttccactgcagacctgcaaaagattcccagctatttattgtattattcaggataataataaaaaaaagagttggcttgcatttctgcgaacaatggctttaccgtttgcagttacactgaagaggtagagcctgttcccagctgccgtggcggtgatgaacacatggggcggctccagctcgaactggtagtaagttcttcccgaatgcgccgccgtctccgaggacaggaccttcccttccacgttctctccgatgacctccggaccgaaggcggtgatcaccttctccgggctgccgatcttctcgatggtcgcgtcgtccaggtcatctgtaggacgggaaccatatcacaacatttcttgagcattttgttcaggtctcagctcacctgcgaaccggcgaactggggccacgatgacgaacagccggccttccttggggtttgcgaagcgcaggtcgatctccgtgccgcccagatcagcaatggacaccgggacctcatcccagccgtctggaactttgaagctgtacgggatgatggggctccagccaactccgtggccaccggacttgtcgtctggcctgcggtacgttctccaacctgtcattttcgtcaggttcagacaagccggggaccctcccggcgagcaggccctggttggccgccagaccacggcctgcaaacccaagcactgaggcgacagctgctgcggaagccaacgcacgcctccccaccaccactgctacaccctcctgatcttcacgccccactgacagggagggcccgctga

SEQ ID NO: 30556 - DNA, 2838 bp, Zea Mays
ccgttcccatcttgcagttgcgtcccctctcgctcgcggccatggcgaaacctcgcggggcgccgaagctcctctacccccgccaccggcggctcctacggtcaccgatctcgcgctgcgcttgcctgttcctcgccttcgctgcgctcctcctcgtctcctccctgcaccaggtcgttcgggtcgacctactacgcccggacccgccccaccagttcaaggcaagtcagacagctacatgactgttagaagtaatggaggactcaaccaaatgcgcactggaatctgtgatatggttgcagttgcccgtttggtgaatgcaacacttgttatccctcagttagataagcgatccttctggcaagataccagtacatttaaagacatatttgatgagcctcattttattaaggctttggaaggagatgtccacattgtgagtgacttgcctggaagtttgcaatctgctccaagagcccggaaacatttcacctcatggtccggtgcaagttattatgaggaagtgaaagagctctggaagaatcagaaggtagttcacatcccaaaatctgattcgcgtcttgctaacaacggtcttccaattgatatccagagattgagatgccgctgtctttaccaagcactgcgtttttcggatctgattgaggaccttggaaagaagctagtagagcgtctaagatctcatggaaaatatattgctcttcatctacgatatgagaaggatatgctagcatttacgggatgcacttacggtctgagtgatttggaagcaaatgagttgagaattatgagagagagaacaagccactggaaactgaaggatataaactcaactgaacagagatatgaaggcaactgtccactgacaccaaatgaggtgggcatttttctgcgtgctatgggctatcctgaatccacgtggatataccttgcagcaggtgaaatttatggtggtgaaaagtatatatcaaaattgagatcatacttcccaaatttggttagcaaggacatgctagcaacagaagaagagcttgcgaaattcagtaatcatgcttctcaagttgctgcccttgattacataatcgcagttgaaagtgatgtgtttattccatcacactctggcaatatggcaaaagctgtagaaggccatcgtcgatttctagggcatcgtaaaactatcactcctgacaggaaaggattggtggaactctttgatttactggaaaaaggggatctcacggaaggtcctaagctgtcggcacttgttactgacatgcacaagtacagacaagggactccaaggaagaggtatggctccttgccaggaagcaagggcagagcacggcttaggactgaggaatctttttacgagaacccgtttcctgagtgcatctgtttgactgggaggtcctgatgtatagctttgcatgatgatgacacggtgcacccatcattggaggtgtgctagtgcttcagtctggccattggagctctaccggtactttgtgatgaaaaaagctgatctggtactcaaggacacaagttagtgaaggacgtcttccttctcgtgatcaacatgcaatgcaatgaccttgttggaccagatggagggctggggccactgcaaccaagaaaccgtacatgaactgttttgtcccccgcaaactcgagagatttggcatgtttgccattagtaacgaaagtttcgaggtatatatgcgttggcaagcatctgtacccttcgaggcaacatcagggggaaaaaaaatatagtaaaagcatttagccttagcgagcaggtttacacaagctgttgaactgctgctgcagctttgtaaccttacagagttagagtggtcatcagaagcgatgctcacttgtcctctctccgtattaccgtctcccatgtcctctaatcatatcaacaagagccaggcgctgtaaaaaaaaagtagtagtaggaattggaaccctacacgactcgaaatgattgtgctatctgtttgaggtctttgtaatgcctcttccactgcagacctgcaaaagattcccagctatttattgtattattcaggataataataaaaaaaagagttggcttgcatttctgcgaacaatggctttaccgtttgcagttacactgaagaggtagagcctgttcccagctgccgtggcggtgatgaacacatggggcggctccagctcgaactggtagtaagttcttcccgaatgcgccgccgtctccgaggacaggaccttcccttccacgttctctccgatgacctccggaccgaaggcggtgatcaccttctccgggctgccgatcttctcgatggtcgcgtcgtccaggtcatctgtaggacgggaaccatatcacaacatttcttgagcattttgttcaggtctcagctcacctgcgaaccggcgaactggggccacgatgacgaacagccggccttccttggggtttgcgaagcgcaggtcgatctccgtgccgcccagatcagcaatggacaccgggacctcatcccagccgtctggaactttgaagctgtacgggatgatggggctccagccaactccgtggccaccggacttgtcgtctggcctgcggtacgttctccaacctgtcattttcgtcaggttcagacaagccggggaccctcccggcgagcaggccctggttggccgccagaccacggcctgcaaacccaagcactgaggcgacagctgctgcggaagccaacgcacgcctccccaccaccactgctacaccctcctgatcttcacgccccactgacagggagggcccgctga

SEQ ID NO: 30557 - DNA, 2694 bp, Zea Mays
aaaacactagcgacgagatgagctcctcatctcaaggtgtcaaatgatcaactgtgggcttctaatggttatggttatcatgcttgtgttacaccaacctctagatataaggttcaaggcaagtcagacagctacatgactgttagaagtaatggaggactcaaccaaatgcgcactggaatctgtgatatggttgcagttgcccgtttggtgaatgcaacacttgttatccctcagttagataagcgatccttctggcaagataccagtacatttaaagacatatttgatgagcctcattttattaaggctttggaaggagatgtccacattgtgagtgacttgcctggaagtttgcaatctgctccaagagcccggaaacatttcacctcatggtccggtgcaagttattatgaggaagtgaaagagctctggaagaatcagaagagattgagatgccgctgtctttaccaagcactgcgtttttcggatctgattgaggaccttggaaaggcatgaattctcttgataaactaagctagtagagcgtctaagatctcatggaaaatatattgctcttcatctacgatatgagaaggatatgctagcatttacgggatgcacttacggtctgagtgatttggaagcaaatgagttgagaattatgagagagagaacaagccactggaaactgaaggatataaactcaactgaacagagatatgaaggcaactgtccactgacaccaaatgaggtgggcatttttctgcgtgctatgggctatcctgaatccacgtggatataccttgcagcaggtgaaatttatggtggtgaaaagtatatatcaaaattgagatcatacttcccaaatttggttagcaaggacatgctagcaacagaagaagagcttgcgaaattcagtaatcatgcttctcaagttgctgcccttgattacataatcgcagttgaaagtgatgtgtttattccatcacactctggcaatatggcaaaagctgtagaaggccatcgtcgatttctagggcatcgtaaaactatcactcctgacaggaaaggattggtggaactctttgatttactggaaaaaggggatctcacggaaggtcctaagctgtcggcacttgttactgacatgcacaagtacagacaagggactccaaggaagaggtatggctccttgccaggaagcaagggcagagcacggcttaggactgaggaatctttttacgagaacccgtttcctgagtgcatctgtttgactgggaggtcctgatgtatagctttgcatgatgatgacacggtgcacccatcattggaggtgtgctagtgcttcagtctggccattggagctctaccggtactttgtgatgaaaaaagctgatctggtactcaaggacacaagttagtgaaggacgtcttccttctcgtgatcaacatgcaatgcaatgaccttgttggaccagatggagggctggggccactgcaaccaagaaaccgtacatgaactgttttgtcccccgcaaactcgagagatttggcatgtttgccattagtaacgaaagtttcgaggtatatatgcgttggcaagcatctgtacccttcgaggcaacatcagggggaaaaaaaatatagtaaaagcatttagccttagcgagcaggtttacacaagctgttgaactgctgctgcagctttgtaaccttacagagttagagtggtcatcagaagcgatgctcacttgtcctctctccgtattaccgtctcccatgtcctctaatcatatcaacaagagccaggcgctgtaaaaaaaaagtagtagtaggaattggaaccctacacgactcgaaatgattgtgctatctgtttgaggtctttgtaatgcctcttccactgcagacctgcaaaagattcccagctatttattgtattattcaggataataataaaaaaaagagttggcttgcatttctgcgaacaatggctttaccgtttgcagttacactgaagaggtagagcctgttcccagctgccgtggcggtgatgaacacatggggcggctccagctcgaactggtagtaagttcttcccgaatgcgccgccgtctccgaggacaggaccttcccttccacgttctctccgatgacctccggaccgaaggcggtgatcaccttctccgggctgccgatcttctcgatggtcgcgtcgtccaggtcatctgtaggacgggaaccatatcacaacatttcttgagcattttgttcaggtctcagctcacctgcgaaccggcgaactggggccacgatgacgaacagccggccttccttggggtttgcgaagcgcaggtcgatctccgtgccgcccagatcagcaatggacaccgggacctcatcccagccgtctggaactttgaagctgtacgggatgatggggctccagccaactccgtggccaccggacttgtcgtctggcctgcggtacgttctccaacctgtcattttcgtcaggttcagacaagccggggaccctcccggcgagcaggccctggttggccgccagaccacggcctgcaaacccaagcactgaggcgacagctgctgcggaagccaacgcacgcctccccaccaccactgctacaccctcctgatcttcacgccccactgacagggagggcccgctga

SEQ ID NO: 30558 - DNA, 820 bp, Zea Mays
atgcatggtggaagtaggaatgtaagcaagtgcacaaatccaaaagaagaggttttaacagtatcatcatcttgggggcttggtgtttatggcttcatcgtaataaggtggtttttgatggtgttagtccttcaattattggcataaaggcaatttttttggatgaagttgaattctggaggcttgccggtgctaggcatcttgaggctttggttcctggtgctggaatttttaggtcaagggttcttttgggtgattagtgaagagcaggtgtgtggtctgctggcactttttgctgttcggtctcctattgcgtgctgctgtttccaggcgcatttatgaaggctgcagttttgtgcgcagcagaagttggtggttttgggttttgtgttttgcctattttggcattgtactttggtccattttggactgttttcttctcttaatttaatgatgcgcagctctcctgcgcgtttaagaaaaaaaaataacacgagagggatgaagctaaagctacatgcgcacgtgcgttttgcgttttttcgcatgacttgtgacttgcgactagtgtcaattccctttctatcttttgacgttttctacaacaatctaactttattactttgtgcaacaagttcataactgaatcaatcagatcgtgaagatcataaccgagtccatttcttcctttatttgcacgtgattatcatgagcctaatcccctatatactagagggtgttctaactaaaaggtacaagaaataatcaatctactatgagatagggttttagattaaggagtcatttgtgttgcatgatc

SEQ ID NO: 30559 - DNA, 436 bp, Zea Mays
cccgcctataaatcgcgtaatgcatgtcctaaaacataacaggccaaacaatacacatttaattggaatctacgtcaagcaacctcgggccggcgcgtgatcgagatggcaaccagtggaccgagcgccgccgccgccgctcccaaggactcgtggccggaggttgtgggcatgtcatcggaggaggccaagaagaagatcaaggaggacaagccgggcgccgacgtgcaggtggtcccagccgacgccttcgtcaccatggactacagcaccggccgagtcagggtcttcgtcgactccaacgacaaggtcgccaaagctccccggatcggctagctggataggagggacatgcatacatgcagcaggtgccagctgccaacgtgcatggaattatttatagttttgtatgaacaattgataaataaaaggcaag

SEQ ID NO: 30560 - DNA, 1847 bp, Zea Mays
ctctccccgtcctctctgtactctctccgtctctctcgtcgtttatccgcctcccatccttgctaccctcctccgtgctctctgctcaccaattcctccaggattcggatttaggattgggattctggcgccggaaccgaagcggcgacgcgctggagccgcggccggatcgtttgggtcaccacgccaacgccatgatggcgaacgggaggttccagaagcaggcgttgcttccgccgcggagcccgttcccggtggcggcgccgcacgccgagctcggcccaatcgcgcggccgcgggagacgccccaccggcacggccaccagcgcacgtcgtccgagagcttcctcgctgacgagcagtcgtccagcgactcgttcgcgctcttcgaaggcggcagcgctgcggggggcatgtacgagtttgacaatgtgcttgatggcatgaggggaggagggcaggtggcttctttggccggtgcgcccgaattcttccctgagccagcctcatttgggcggccttgggagtccaggcagatgtaccggcagggtggtggcatgccaatgccaggcagggagaagaatggagggcgccatggtccgtccagctcatttggtgagcatgagcttggtcatgtgcccaatggggtgaataggaaggcccatggcgatgcggcttatgaccagaggattgtaatagagagaaaggagggcctgaggcactctcagtcggagactgacaccaaacgagccaaacaacaatatgctcagagatctcgtgtccggaagctccagtatattgcagagcttgagagaagagttcagtccttacagacagagggaatagaagtaactgctgaaatggattttctcggtcagcaaaatatcatgttagacttggaaaataaagccttgaagcaacggcttgagagtctatctcaggagcatctcattaaacgttatcagcaggagatgtttgagagggaaattggccgccttagaacattgttccagcagcagcaacagcaacaacatgtgccgcagcagcaggctcctacccatagccgcagtaacagtagagacctggattcgcaatttgcaaacctgtctctgaaacacagtgatcccagttcagggcgcgacgctatctctggcctccgcatttaagatccctttgttccagcttttggatccctgagctttgcagaacctgctgcccctttatgccactctttgtggttgttagtagcatcatgagaggagcagcaccggtgaaccgggaatctcatcccacggtgaataaagctggaaaggttaataactgtggatctggtccttagttctttcagaatgtgcacctggcggtcatcgttagcttctgtccattattgatgcttgaccagtcggaggtgtttaggatctgtttgcagattgatgacttccatggatccttgtatcagtttgaatctagaacactaaggttctaatccattcctttttagtcgattctctgtcgagtttaggcgccatggcccttgtattagtgtggcacacgaatggaatgtgagctggtcctctttaggttatgccacatcctggaaaaccgttgcgtgaggagttgtcgggccatgtccattgtcctaataagatggtgaggttgaagggctggtgcagttcagtttcattttatttgtgatgtgcacagcaagatattggatactttgggttcttacatttatttgagcactgtatttttatcgcattgtgatgacagtatattccaagttcattttagctgccaagatcctgcttgtgttcgtttcaacatgtcgttgtaggttatatgag

SEQ ID NO: 30561 - DNA, 2279 bp, Zea Mays
ctctccccgtcctctctgtactctctccgtctctctcgtcgtttatccgcctcccatccttgctaccctcctccgtgctctctgctcaccaattcctccaggattcggatttaggattgggattctggcgccggaaccgaagcggcgacgcgctggagccgcggccggatcggtgcgtgcttctcccgtacctattttttgatggccaatttttagcgtctgttgcggttgttgtatggaacgcgatccggttcagttggcgcaattccaaccggatttccgtttttcccaaccgcggatttcttcgagattgctttagcttcgtttgtttcccgccgtttattttttttctcgctttcattctcgggaaatcttgggtcttacttgcgactattcagtgccgttctgtatgcgtccttgattcgaattcgccgcaagttttcggttttctgcacatgcggtggttcctggacgagatctgtggccggagccgcaacaatcccgcctgaatttttaatctttcactgagtttgggtcaccacgccaacgccatgatggcgaacgggaggttccagaagcaggcgttgcttccgccgcggagcccgttcccggtggcggcgccgcacgccgagctcggcccaatcgcgcggccgcgggagacgccccaccggcacggccaccagcgcacgtcgtccgagagcttcctcgctgacgagcagccgtcgtggctggacgacctgctcgacgagcccgagactccggcgcgggcgcacggccggcctggccaccgcaggtcgtccagcgactcgttcgcgctcttcgaaggcggcagcgctgcggggggcatgtacgagtttgacaatgtgcttgatggcatgaggggaggagggcaggtggcttctttggccggtgcgcccgaattcttccctgagccagcctcatttgggcggccttgggagtccaggcagatgtaccggcagggtggtggcatgccaatgccaggcagggagaagaatggagggcgccatggtccgtccagctcatttggtgagcatgagcttggtcatgtgcccaatggggtgaataggaaggcccatggcgatgcggcttatgaccagaggattgtaatagagagaaaggagggcctgaggcactctcagtcggagactgacaccaaacgagccaaacaacaatatgctcagagatctcgtgtccggaagctccagtatattgcagagcttgagagaagagttcagtccttacagacagagggaatagaagtaactgctgaaatggattttctcggtcagcaaaatatcatgttagacttggaaaataaagccttgaagcaacggcttgagagtctatctcaggagcatctcattaaacgttatcagcaggagatgtttgagagggaaattggccgccttagaacattgttccagcagcagcaacagcaacaacatgtgccgcagcagcaggctcctacccatagccgcagtaacagtagagacctggattcgcaatttgcaaacctgtctctgaaacacagtgatcccagttcagggcgcgacgctatctctggcctccgcatttaagatccctttgttccagcttttggatccctgagctttgcagaacctgctgcccctttatgccactctttgtggttgttagtagcatcatgagaggagcagcaccggtgaaccgggaatctcatcccacggtgaataaagctggaaaggttaataactgtggatctggtccttagttctttcagaatgtgcacctggcggtcatcgttagcttctgtccattattgatgcttgaccagtcggaggtgtttaggatctgtttgcagattgatgacttccatggatccttgtatcagtttgaatctagaacactaaggttctaatccattcctttttagtcgattctctgtcgagtttaggcgccatggcccttgtattagtgtggcacacgaatggaatgtgagctggtcctctttaggttatgccacatcctggaaaaccgttgcgtgaggagttgtcgggccatgtccattgtcctaataagatggtgaggttgaagggctggtgcagttcagtttcattttatttgtgatgtgcacagcaagatattggatactttgggttcttacatttatttgagcactgtatttttatcgcattgtgatgacagtatattccaagttcattttagctgccaagatcctgcttgtgttcgtttcaacatgtcgttgtaggttatatgag

SEQ ID NO: 30562 - DNA, 2053 bp, Zea Mays
ctctccccgtcctctctgtactctctccgtctctctcgtcgtttatccgcctcccatccttgctaccctcctccgtgctctctgctcaccaattcctccaggattcggatttaggattgggattctggcgccggaaccgaagcggcgacgcgctggagccgcggccggatcgtgccgttctgtatgcgtccttgattcgaattcgccgcaagttttcggttttctgcacatgcggtggttcctggacgagatctgtggccggagccgcaacaatcccgcctgaatttttaatctttcactgagtttgggtcaccacgccaacgccatgatggcgaacgggaggttccagaagcaggcgttgcttccgccgcggagcccgttcccggtggcggcgccgcacgccgagctcggcccaatcgcgcggccgcgggagacgccccaccggcacggccaccagcgcacgtcgtccgagagcttcctcgctgacgagcagccgtcgtggctggacgacctgctcgacgagcccgagactccggcgcgggcgcacggccggcctggccaccgcaggtcgtccagcgactcgttcgcgctcttcgaaggcggcagcgctgcggggggcatgtacgagtttgacaatgtgcttgatggcatgaggggaggagggcaggtggcttctttggccggtgcgcccgaattcttccctgagccagcctcatttgggcggccttgggagtccaggcagatgtaccggcagggtggtggcatgccaatgccaggcagggagaagaatggagggcgccatggtccgtccagctcatttggtgagcatgagcttggtcatgtgcccaatggggtgaataggaaggcccatggcgatgcggcttatgaccagaggattgtaatagagagaaaggagggcctgaggcactctcagtcggagactgacaccaaacgagccaaacaacaatatgctcagagatctcgtgtccggaagctccagtatattgcagagcttgagagaagagttcagtccttacagacagagggaatagaagtaactgctgaaatggattttctcggtcagcaaaatatcatgttagacttggaaaataaagccttgaagcaacggcttgagagtctatctcaggagcatctcattaaacgttatcagcaggagatgtttgagagggaaattggccgccttagaacattgttccagcagcagcaacagcaacaacatgtgccgcagcagcaggctcctacccatagccgcagtaacagtagagacctggattcgcaatttgcaaacctgtctctgaaacacagtgatcccagttcagggcgcgacgctatctctggcctccgcatttaagatccctttgttccagcttttggatccctgagctttgcagaacctgctgcccctttatgccactctttgtggttgttagtagcatcatgagaggagcagcaccggtgaaccgggaatctcatcccacggtgaataaagctggaaaggttaataactgtggatctggtccttagttctttcagaatgtgcacctggcggtcatcgttagcttctgtccattattgatgcttgaccagtcggaggtgtttaggatctgtttgcagattgatgacttccatggatccttgtatcagtttgaatctagaacactaaggttctaatccattcctttttagtcgattctctgtcgagtttaggcgccatggcccttgtattagtgtggcacacgaatggaatgtgagctggtcctctttaggttatgccacatcctggaaaaccgttgcgtgaggagttgtcgggccatgtccattgtcctaataagatggtgaggttgaagggctggtgcagttcagtttcattttatttgtgatgtgcacagcaagatattggatactttgggttcttacatttatttgagcactgtatttttatcgcattgtgatgacagtatattccaagttcattttagctgccaagatcctgcttgtgttcgtttcaacatgtcgttgtaggttatatgag

SEQ ID NO: 30563 - DNA, 1808 bp, Zea Mays
ctctccccgtcctctctgtactctctccgtctctctcgtcgtttatccgcctcccatccttgctaccctcctccgtgctctctgctcaccaattcctccaggattcggatttaggattgggattctggcgccggaaccgaagcggcgacgcgctggagccgcggccggatcgtttgggtcaccacgccaacgccatgatggcgaacgggaggttccagaagcaggcgttgcttccgccgcggagcccgttcccggtggcggcgccgcacgccgagctcggcccaatcgcgcggccgcgggagacgccccaccggcacggccaccagcgcacgtcgtccgagagcttcctcgctgacgagcacgctgcggggggcatgtacgagtttgacaatgtgcttgatggcatgaggggaggagggcaggtggcttctttggccggtgcgcccgaattcttccctgagccagcctcatttgggcggccttgggagtccaggcagatgtaccggcagggtggtggcatgccaatgccaggcagggagaagaatggagggcgccatggtccgtccagctcatttggtgagcatgagcttggtcatgtgcccaatggggtgaataggaaggcccatggcgatgcggcttatgaccagaggattgtaatagagagaaaggagggcctgaggcactctcagtcggagactgacaccaaacgagccaaacaacaatatgctcagagatctcgtgtccggaagctccagtatattgcagagcttgagagaagagttcagtccttacagacagagggaatagaagtaactgctgaaatggattttctcggtcagcaaaatatcatgttagacttggaaaataaagccttgaagcaacggcttgagagtctatctcaggagcatctcattaaacgttatcagcaggagatgtttgagagggaaattggccgccttagaacattgttccagcagcagcaacagcaacaacatgtgccgcagcagcaggctcctacccatagccgcagtaacagtagagacctggattcgcaatttgcaaacctgtctctgaaacacagtgatcccagttcagggcgcgacgctatctctggcctccgcatttaagatccctttgttccagcttttggatccctgagctttgcagaacctgctgcccctttatgccactctttgtggttgttagtagcatcatgagaggagcagcaccggtgaaccgggaatctcatcccacggtgaataaagctggaaaggttaataactgtggatctggtccttagttctttcagaatgtgcacctggcggtcatcgttagcttctgtccattattgatgcttgaccagtcggaggtgtttaggatctgtttgcagattgatgacttccatggatccttgtatcagtttgaatctagaacactaaggttctaatccattcctttttagtcgattctctgtcgagtttaggcgccatggcccttgtattagtgtggcacacgaatggaatgtgagctggtcctctttaggttatgccacatcctggaaaaccgttgcgtgaggagttgtcgggccatgtccattgtcctaataagatggtgaggttgaagggctggtgcagttcagtttcattttatttgtgatgtgcacagcaagatattggatactttgggttcttacatttatttgagcactgtatttttatcgcattgtgatgacagtatattccaagttcattttagctgccaagatcctgcttgtgttcgtttcaacatgtcgttgtaggttatatgag

SEQ ID NO: 30564 - DNA, 2114 bp, Zea Mays
gttagactagacagccacttgttctcaaatcacttcttcccggactcccagactcctcccaaaaccctcgcatcctctcccacgcatgtcacaatcgccatgaccgacagaaaccccgccgccgcctcaagcaagcgtcactgtgacctctccctcgacgatcccacgccgtcggccaagctccagcggtgctccgagccgtcagaaccaacgccggcggggaaaccgaacggcggcgcggcgacgggagaggagagcgagatgatggccggcgcacggaaccctagggcgcagaggtacctggtcgccgtggagtacattggcacccgcttctccggctcacagaagcagcccaaccagcgcaccgtcactggggtcctcgaggaggcatttcaccgatttattgggcagccagtttcaataatcttttctagccgaacggatgcaggtgttcatgctttatcaaatgtttgtcatgttgatgttgagcggataagtaaaaggaagcctggcgaagttgtctgtacacaaaactcattttttttcttaacactgattaccgaccaggccttgtctacatctcttgacactctaaacttatttctttttttgatctttgcatgataagtatatttgtgacagttgttgttatgcctgatttaaatcttctaggttttccaaaataaaattctacaagcaatagaattaccttttctcctgaccttgcctctaaatcatctattttgtccgttccaaatcataattcactttagctttgccttaagtcatatttaaccaagtttaaataaaaatgcaccaacatctacaacatcaattagtttcattaaatttctatatgaaatgtcttgatagttcacaaaatgttgatgtcgttgaagacctggcggctggcgccactgctgaaacaagtcgctgtagtctgggcgtctggattgatgtattttggtgggagagttgtttgttaacacctcatgagcctggagttgtaaaacgtgctgtgaaccactttctactgaagagtgaaggtgacataatggtgactgatgtctgctgtgttgcaccagattttcatgctagatacaaatctctagagcgcacatatcactatcgcttgcttgctggacctgaatcaacatctgtttttgagaaaaactctgtttggcatatatctgaagatttggatattcagtcaatgaagaaagcatgcagcatacttgttgggcatcatgatttcagttcatttcgagcggctggatgtcaggcaaactctccagtgcgaactctggatgaacttagtgttacagaagtattccctttcatgttttttccttcaagtgtagaaagatcagagttggaattatcaaatgtctctcttgtttattcaaggaaaccagacatggaatcttctgggaaaggatctgatggttcctgtaccagtagtgtgaaatcagattttgagaatggaaaagattttggaaagcggtcaaggcaccgttgctttgttgttactgcaagggcacggtcttttctttaccaccaggtaaggttgatggtcggtcttctaaaatctgttgggactggagatctaacaactgcagatgttgagagaattctggatgcaaagacggttactgctgcacccagtatggcaccttcttgtgattttgtcagctgttggctatcaaaggaattatatgctgccacttgccaaagctttcagttgcctgttttgtccactgaatcttgcatggtgattgaaaacctagaattaagtttatctgtcagcacaagagccggcttcattctcttcttgtacacagagctcttctgcatgttcagaaacaaaataggtagcttcattttagttaagttcaactatccactctttaaatttcagctggatccacccgattttgttgggtgtacgtagatttgacctggtaggggcaaaattttatttcttggttttctcatgactgtacttggttcttgatatataattaattagccaaatgcgttgtgtgcatattgaaaatattcttttctgttccttgataaattacatcgagcaagactgcaagagaactttcttc

SEQ ID NO: 30565 - DNA, 1653 bp, Zea Mays
gttagactagacagccacttgttctcaaatcacttcttcccggactcccagactcctcccaaaaccctcgcatcctctcccacgcatgtcacaatcgccatgaccgacagaaaccccgccgccgcctcaagcaagcgtcactgtgacctctccctcgacgatcccacgccgtcggccaagctccagcggtgctccgagccgtcagaaccaacgccggcggggaaaccgaacggcggcgcggcgacgggagaggagagcgagatgatggccggcgcacggaaccctagggcgcagaggtacctggtcgccgtggagtacattggcacccgcttctccggctcacagaagcagcccaaccagcgcaccgtcactggggtcctcgaggaggcatttcaccgatttattgggcagccagtttcaataatcttttctagccgaacggatgcaggtgttcatgctttatcaaatgtttgtcatgttgatgttgagcggataagtaaaaggaagcctggcgaagttttaacacctcatgagcctggagttgtaaaacgtgctgtgaaccactttctactgaagagtgaaggtgacataatggtgactgatgtctgctgtgttgcaccagattttcatgctagatacaaatctctagagcgcacatatcactatcgcttgcttgctggacctgaatcaacatctgtttttgagaaaaactctgtttggcatatatctgaagatttggatattcagtcaatgaagaaagcatgcagcatacttgttgggcatcatgatttcagttcatttcgagcggctggatgtcaggcaaactctccagtgcgaactctggatgaacttagtgttacagaagaaaccagacatggaatcttctgggaaaggatctgatggttcctgtaccagtagtgtgaaatcagattttgagaatggaaaagattttggaaagcggtcaaggcaccgttgctttgttgttactgcaagggcacggtcttttctttaccaccaggtaaggttgatggtcggtcttctaaaatctgttgggactggagatctaacaactgcagatgttgagagaattctggatgcaaagacggttactgctgcacccagtatggcaccttcttgtggtctgtaccttgctaacgttaaatatgatctgaatacctgaagacaagttttatctagtggcttctgttggtgggcctccagattttgtcagctgttggctatcaaaggaattatatgctgccacttgccaaagctttcagttgcctgttttgtccactgaatcttgcatggtgattgaaaacctagaattaagtttatctgtcagcacaagagccggcttcattctcttcttgtacacagagctcttctgcatgttcagaaacaaaataggtagcttcattttagttaagttcaactatccactctttaaatttcagctggatccacccgattttgttgggtgtacgtagatttgacctggtaggggcaaaattttatttcttggttttctcatgactgtacttggttcttgatatataattaattagccaaatgcgttgtgtgcatattgaaaatattcttttctgttccttgataaattacatcgagcaagactgcaagagaactttcttc

SEQ ID NO: 30566 - DNA, 1792 bp, Zea Mays
tagacagccacttgttctcaaatcacttcttcccggactcccagactcctcccaaaaccctcgcatcctctcccacgcatgtcacaatcgccatgaccgacagaaaccccgccgccgcctcaagcaagcgtcactgtgacctctccctcgacgatcccacgccgtcggccaagctccagcggtgctccgagccgtcagaaccaacgccggcggggaaaccgaacggcggcgcggcgacgggagaggagagcgagatgatggccggcgcacggaaccctagggcgcagaggtacctggtcgccgtggagtacattggcacccgcttctccggctcacagaagcagcccaaccagcgcaccgtcactggggtcctcgaggaggcatttcaccgatttattgggcagccagtttcaataatcttttctagccgaacggatgcaggtgttcatgctttatcaaatgtttgtcatgttgatgttgagcggataagtaaaaggaagcctggcgaagttttaacacctcatgagcctggagttgtaaaacgtgctgtgaaccactttctactgaagagtgaaggtgacataatggtgactgatgtctgctgtgttgcaccagattttcatgctagatacaaatctctagagcgcacatatcactatcgcttgcttgctggacctgaatcaacatctgtttttgagaaaaactctgtttggcatatatctgaagatttggatattcagtcaatgaagaaagcatgcagcatacttgttgggcatcatgatttcagttcatttcgagcggctggatgtcaggcaaactctccagtgcgaactctggatgaacttagtgttacagaagtattccctttcatgttttttccttcaagtgtagaaagatcagagttggaattatcaaatgtctctcttgtttattcaaggaaaccagacatggaatcttctgggaaaggatctgatggttcctgtaccagtagtgtgaaatcagattttgagaatggaaaagattttggaaagcggtcaaggcaccgttgctttgttgttactgcaagggcacggtcttttctttaccaccaggtaaggttgatggtcggtcttctaaaatctgttgggactggagatctaacaactgcagatgttgagagaattctggatgcaaagacggttactgctgcacccagtatggcaccttcttgtggtctgtaccttgctaacgttaaatatgatctgaatacctgaagacaagttttatctagtggcttctgttggtgggcctccagattttgtcagctgttggctatcaaaggtatacctgaatccaatctatgaatagtgcacctcagtgagtgcaactttgaagtatctgtaccaggaattatatgctgccacttgccaaagctttcagttgcctgttttgtccactgaatcttgcatggtgattgaaaacctagaattaagtttatctgtcagcacaagagccggcttcattctcttcttgtacacagagctcttctgcatgttcagaaacaaaataggtagcttcattttagttaagttcaactatccactctttaaatttcagctggatccacccgattttgttgggtgtacgtagatttgacctggtaggggcaaaattttatttcttggttttctcatgactgtacttggttcttgatatataattaattagccaaatgcgttgtgtgcatattgaaaatattcttttctgttccttgataaattacatcgagcaagactgcaagagaactttcttc

SEQ ID NO: 30567 - DNA, 2469 bp, Zea Mays
gccacttgttctcaaatcacttcttcccggactcccagactcctcccaaaaccctcgcatcctctcccacgcatgtcacaatcgccatgaccgacagaaaccccgccgccgcctcaagcaagcgtcactgtgacctctccctcgacgatcccacgccgtcggccaagctccagcggtgctccgagccgtcagaaccaacgccggcggggaaaccgaacggcggcgcggcgacgggagaggagagcgagatgatggccggcgcacggaaccctagggcgcagaggtacctggtcgccgtggagtacattggcacccgcttctccggctcacagaagcagcccaaccagcgcaccgtcactggggtcctcgaggaggcatttcaccgatttattgggcagccagtttcaataatcttttctagccgaacggatgcaggtgttcatgctttatcaaatgtttgtcatgttgatgttgagcggataagtaaaaggaagcctggcgaagttgtctgtacacaaaactcattttttttcttaacactgattaccgaccaggccttgtctacatctcttgacactctaaacttatttctttttttgatctttgcatgataagtatatttgtgacagttgttgttatgcctgatttaaatcttctaggttttccaaaataaaattctacaagcaatagaattaccttttctcctgaccttgcctctaaatcatctattttgtccgttccaaatcataattcactttagctttgccttaagtcatatttaaccaagtttaaataaaaatgcaccaacatctacaacatcaattagtttcattaaatttctatatgaaatgtcttgatagttcacaaaatgttgatgtcgttgaagacctggcggctggcgccactgctgaaacaagtcgctgtagtctgggcgtctggattgatgtattttggtgggagagttgtttggtaggttttgaactgtttgttgtgagtgttgttagtagttgagagtgattgttggtagttaaactatcacaatgttgattgtaagctggtaacatcagcagtggatatttgactattggtaagctttctaataaagctgggtgaatgcttttgatctaaaaaatgtcttgatagtgcacttgattggactttaagattttaatatgtttttattcctaaaaacttgttcagttagaggcatttgacttagaaccaaactaaagtgtcctataatttgtaaaagaggaaataaataaaaatatgttttctagaacagcgcctcttataactcctgctgctgatttgcttttccctttttacagttaacacctcatgagcctggagttgtaaaacgtgctgtgaaccactttctactgaagagtgaaggtgacataatggtgactgatgtctgctgtgttgcaccagattttcatgctagatacaaatctctagagcgcacgtagatatcactatcgcttgcttgctggacctgaatcaacatctgtttttgagaaaaactctgtttggcatatatctgaagatttggatattcagtcaatgaagaaagcatgcagcatacttgttgggcatcatgatttcagttcatttcgagcggctggatgtcaggcaaactctccagtgcgaactctggatgaacttagtgttacagaagaaaccagacatggaatcttctgggaaaggatctgatggttcctgtaccagtagtgtgaaatcagattttgagaatggaaaagattttggaaagcggtcaaggcaccgttgctttgttgttactgcaagggcacggtcttttctttaccaccaggtaaggttgatggtcggtcttctaaaatctgttgggactggagatctaacaactgcagatgttgagagaattctggatgcaaagacggttactgctgcacccagtatggcaccttcttgtggtctgtaccttgctaacgttaaatatgatctgaatacctgaagacaagttttatctagtggcttctgttggtgggcctccagattttgtcagctgttggctatcaaaggaattatatgctgccacttgccaaagctttcagttgcctgttttgtccactgaatcttgcatggtgattgaaaacctagaattaagtttatctgtcagcacaagagccggcttcattctcttcttgtacacagagctcttctgcatgttcagaaacaaaataggtagcttcattttagttaagttcaactatccactctttaaatttcagctggatccacccgattttgttgggtgtacgtagatttgacctggtaggggcaaaattttatttcttggttttctcatgactgtacttggttcttgatatataattaattagccaaatgcgttgtgtgcatattgaaaatattcttttctgttccttgataaattacatcgagcaagactgcaagagaactttcttc

SEQ ID NO: 30568 - DNA, 2695 bp, Zea Mays
gccacttgttctcaaatcacttcttcccggactcccagactcctcccaaaaccctcgcatcctctcccacgcatgtcacaatcgccatgaccgacagaaaccccgccgccgcctcaagcaagcgtcactgtgacctctccctcgacgatcccacgccgtcggccaagctccagcggtgctccgagccgtcagaaccaacgccggcggggaaaccgaacggcggcgcggcgacgggagaggagagcgagatgatggccggcgcacggaaccctagggcgcagaggtacctggtcgccgtggagtacattggcacccgcttctccggctcacagaagcagcccaaccagcgcaccgtcactggggtcctcgaggaggcatttcaccgatttattgggcagccagtttcaataatcttttctagccgaacggtgttcatgctttatcaaatgtttgtcatgttgatgttgagcggataagtaaaaggaagcctggcgaagttgtctgtacacaaaactcattttttttcttaacactgattaccgaccaggccttgtctacatctcttgacactctaaacttatttctttttttgatctttgcatgataagtatatttgtgacagttgttgttatgcctgatttaaatcttctaggttttccaaaataaaattctacaagcaatagaattaccttttctcctgaccttgcctctaaatcatctattttgtccgttccaaatcataattcactttagctttgccttaagtcatatttaaccaagtttaaataaaaatgcaccaacatctacaacatcaattagtttcattaaatttctatatgaaatgtcttgatagttcacaaaatgttgatgtcgttgaagacctggcggctggcgccactgctgaaacaagtcgctgtagtctgggcgtctggattgatgtattttggtgggagagttgtttggtaggttttgaactgtttgttgtgagtgttgttagtagttgagagtgattgttggtagttaaactatcacaatgttgattgtaagctggtaacatcagcagtggatatttgactattggtaagctttctaataaagctgggtgaatgcttttgatctaaaaaatgtcttgatagtgcacttgattggactttaagattttaatatgtttttattcctaaaaacttgttcagttagaggcatttgacttagaaccaaactaaagtgtcctataatttgtaaaagaggaaataaataaaaatatgttttctagaacagcgcctcttataactcctgctgctgatttgcttttccctttttacagttaacacctcatgagcctggagttgtaaaacgtgctgtgaaccactttctactgaagagtgaaggtgacataatggtgactgatgtctgctgtgttgcaccagattttcatgctagatacaaatctctagagcgcacatatcactatcgcttgcttgctggacctgaatcaacatctgtttttgagaaaaactctgtttggcatatatctgaagatttggatattcagtcaatgaagaaagcatgcagcatacttgttgggcatcatgatttcagttcatttcgagcggctggatgtcaggcaaactctccagtgcgaactctggatgaacttagtgttacagaagtattccctttcatgttttttccttcaagtgtagaaagatcagagttggaattatcaaatgtctctcttgtttattcaaggaaaccagacatggaatcttctgggaaaggatctgatggttcctgtaccagtagtgtgaaatcagattttgagaatggaaaagattttggaaagcggtcaaggcaccgttgctttgttgttactgcaagggcacggtcttttctttaccaccaggtaaggttgatggtcggtcttctaaaatctgttgggactggagatctaacaactgcagatgttgagagaattctggatgcaaagacggttactgctgcacccagtatggcaccttcttgtggtctgtaccttgctaacgttaaatatgatctgaatacctgaagacaagttttatctagtggcttctgttggtgggcctccagattttgtcagctgttggctatcaaaggtatacctgaatccaatctatgaatagtgcacctcagtgagtgcaactttgaagtatctgtaccaggtcgaataagatattcaaacatgtcctttgcttatcaagaatgatacatcattatacaccttgtcgtaatctgtaatttcactttgatcaggaattatatgctgccacttgccaaagctttcagttgcctgttttgtccactgaatcttgcatggtgattgaaaacctagaattaagtttatctgtcagcacaagagccggcttcattctcttcttgtacacagagctcttctgcatgttcagaaacaaaataggtagcttcattttagttaagttcaactatccactctttaaatttcagctggatccacccgattttgttgggtgtacgtagatttgacctggtaggggcaaaattttatttcttggttttctcatgactgtacttggttcttgatatataattaattagccaaatgcgttgtgtgcatattgaaaatattcttttctgttccttgataaattacatcgagcaagactgcaagagaactttcttc

SEQ ID NO: 30569 - DNA, 2166 bp, Zea Mays
ctcaaatcacttcttcccggactcccagactcctcccaaaaccctcgcatcctctcccacgcatgtcacaatcgccatgaccgacagaaaccccgccgccgcctcaagcaagcgtcactgtgacctctccctcgacgatcccacgccgtcggccaagctccagcggtgctccgagccgtcagaaccaacgccggcggggaaaccgaacggcggcgcggcgacgggagaggagagcgagatgatggccggcgcacggaaccctagggcgcagaggtacctggtcgccgtggagtacattggcacccgcttctccggctcacagaagcagcccaaccagcgcaccgtcactggggtcctcgaggaggcatttcaccgatttattgggcagccagtttcaataatcttttctagccgaacggtgttcatgctttatcaaatgtttgtcatgttgatgttgagcggataagtaaaaggaagcctggcgaagttgtctgtacacaaaactcattttttttcttaacactgattaccgaccaggccttgtctacatctcttgacactctaaacttatttctttttttgatctttgcatgataagtatatttgtgacagttgttgttatgcctgatttaaatcttctaggttttccaaaataaaattctacaagcaatagaattaccttttctcctgaccttgcctctaaatcatctattttgtccgttccaaatcataattcactttagctttgccttaagtcatatttaaccaagtttaaataaaaatgcaccaacatctacaacatcaattagtttcattaaatttctatatgaaatgtcttgatagttcacaaaatgttgatgtcgttgaagacctggcggctggcgccactgctgaaacaagtcgctgtagtctgggcgtctggattgatgtattttggtgggagagttgtttgttaacacctcatgagcctggagttgtaaaacgtgctgtgaaccactttctactgaagagtgaaggtgacataatggtgactgatgtctgctgtgttgcaccagattttcatgctagatacaaatctctagagcgcacatatcactatcgcttgcttgctggacctgaatcaacatctgtttttgagaaaaactctgtttggcatatatctgaagatttggatattcagtcaatgaagaaagcatgcagcatacttgttgggcatcatgatttcagttcatttcgagcggctggatgtcaggcaaactctccagtgcgaactctggatgaacttagtgttacagaagtattccctttcatgttttttccttcaagtgtagaaagatcagagttggaattatcaaatgtctctcttgtttattcaaggaaaccagacatggaatcttctgggaaaggatctgatggttcctgtaccagtagtgtgaaatcagattttgagaatggaaaagattttggaaagcggtcaaggcaccgttgctttgttgttactgcaagggcacggtcttttctttaccaccaggtaaggttgatggtcggtcttctaaaatctgttgggactggagatctaacaactgcagatgttgagagaattctggatgcaaagacggttactgctgcacccagtatggcaccttcttgtggtctgtaccttgctaacgttaaatatgatctgaatacctgaagacaagttttatctagtggcttctgttggtgggcctccagattttgtcagctgttggctatcaaaggaattatatgctgccacttgccaaagctttcagttgcctgttttgtccactgaatcttgcatggtgattgaaaacctagaattaagtttatctgtcagcacaagagccggcttcattctcttcttgtacacagagctcttctgcatgttcagaaacaaaataggtagcttcattttagttaagttcaactatccactctttaaatttcagctggatccacccgattttgttgggtgtacgtagatttgacctggtaggggcaaaattttatttcttggttttctcatgactgtacttggttcttgatatataattaattagccaaatgcgttgtgtgcatattgaaaatattcttttctgttccttgataaattacatcgagcaagactgcaagagaactttcttc

SEQ ID NO: 30570 - DNA, 2544 bp, Zea Mays
ctcaaatcacttcttcccggactcccagactcctcccaaaaccctcgcatcctctcccacgcatgtcacaatcgccatgaccgacagaaaccccgccgccgcctcaagcaagcgtcactgtgacctctccctcgacgatcccacgccgtcggccaagctccagcggtgctccgagccgtcagaaccaacgccggcggggaaaccgaacggcggcgcggcgacgggagaggagagcgagatgatggccggcgcacggaaccctagggcgcagaggtacctggtcgccgtggagtacattggcacccgcttctccggctcacagaagcagcccaaccagcgcaccgtcactggggtcctcgaggaggcatttcaccgatttattgggcagccagtttcaataatcttttctagccgaacggatgcaggtgttcatgctttatcaaatgtttgtcatgttgatgttgagcggataagtaaaaggaagcctggcgaagttgtctgtacacaaaactcattttttttcttaacactgattaccgaccaggccttgtctacatctcttgacactctaaacttatttctttttttgatctttgcatgataagtatatttgtgacagttgttgttatgcctgatttaaatcttctaggttttccaaaataaaattctacaagcaatagaattaccttttctcctgaccttgcctctaaatcatctattttgtccgttccaaatcataattcactttagctttgccttaagtcatatttaaccaagtttaaataaaaatgcaccaacatctacaacatcaattagtttcattaaatttctatatgaaatgtcttgatagttcacaaaatgttgatgtcgttgaagacctggcggctggcgccactgctgaaacaagtcgctgtagtctgggcgtctggattgatgtattttggtgggagagttgtttggtaggttttgaactgtttgttgtgagtgttgttagtagttgagagtgattgttggtagttaaactatcacaatgttgattgtaagctggtaacatcagcagtggatatttgactattggtaagctttctaataaagctgggtgaatgcttttgatctaaaaaatgtcttgatagtgcacttgattggactttaagattttaatatgtttttattcctaaaaacttgttcagttagaggcatttgacttagaaccaaactaaagtgtcctataatttgtaaaagaggaaataaataaaaatatgttttctagaacagcgcctcttataactcctgctgctgatttgcttttccctttttacagttaacacctcatgagcctggagttgtaaaacgtgctgtgaaccactttctactgaagagtgaaggtgacataatggtgactgatgtctgctgtgttgcaccagattttcatgctagatacaaatctctagagcgcacatatcactatcgcttgcttgctggacctgaatcaacatctgtttttgagaaaaactctgtttggcatatatctgaagatttggatattcagtcaatgaagaaagcatgcagcatacttgttgggcatcatgatttcagttcatttcgagcggctggatgtcagggatgaagcccattttttgctgtttggctggagccaaaggattatccctaatcacagcaagaggtgttgtttagagtgcctttggatttaggcaaactctccagtgcgaactctggatgaacttagtgttacagaagtattccctttcatgttttttccttcaagtgtagaaagatcagagttggaattatcaaatgtctctcttgtttattcaaggaaaccagacatggaatcttctgggaaaggatctgatggttcctgtaccagtagtgtgaaatcagattttgagaatggaaaagattttggaaagcggtcaaggcaccgttgctttgttgttactgcaagggcacggtcttttctttaccaccaggtaaggttgatggtcggtcttctaaaatctgttgggactggagatctaacaactgcagatgttgagagaattctggatgcaaagacggttactgctgcacccagtatggcaccttcttgtgattttgtcagctgttggctatcaaaggaattatatgctgccacttgccaaagctttcagttgcctgttttgtccactgaatcttgcatggtgattgaaaacctagaattaagtttatctgtcagcacaagagccggcttcattctcttcttgtacacagagctcttctgcatgttcagaaacaaaataggtagcttcattttagttaagttcaactatccactctttaaatttcagctggatccacccgattttgttgggtgtacgtagatttgacctggtaggggcaaaattttatttcttggttttctcatgactgtacttggttcttgatatataattaattagccaaatgcgttgtgtgcatattgaaaatattcttttctgttccttgataaattacatcgagcaagactgcaagagaactttcttc

SEQ ID NO: 30571 - DNA, 2376 bp, Zea Mays
ctcaaatcacttcttcccggactcccagactcctcccaaaaccctcgcatcctctcccacgcatgtcacaatcgccatgaccgacagaaaccccgccgccgcctcaagcaagcgtcactgtgacctctccctcgacgatcccacgccgtcggccaagctccagcggtgctccgagccgtcagaaccaacgccggcggggaaaccgaacggcggcgcggcgacgggagaggagagcgagatgatggccggcgcacggaaccctagggcgcagaggtacctggtcgccgtggagtacattggcacccgcttctccggctcacagaagcagcccaaccagcgcaccgtcactggggtcctcgaggaggcatttcaccgatttattgggcagccagtttcaataatcttttctagccgaacggatgcaggtgttcatgctttatcaaatgtttgtcatgttgatgttgagcggataagtaaaaggaagcctggcgaagttgtctgtacacaaaactcattttttttcttaacactgattaccgaccaggccttgtctacatctcttgacactctaaacttatttctttttttgatctttgcatgataagtatatttgtgacagttgttgttatgcctgatttaaatcttctaggttttccaaaataaaattctacaagcaatagaattaccttttctcctgaccttgcctctaaatcatctattttgtccgttccaaatcataattcactttagctttgccttaagtcatatttaaccaagtttaaataaaaatgcaccaacatctacaacatcaattagtttcattaaatttctatatgaaatgtcttgatagttcacaaaatgttgatgtcgttgaagacctggcggctggcgccactgctgaaacaagtcgctgtagtctgggcgtctggattgatgtattttggtgggagagttgtttggtaggttttgaactgtttgttgtgagtgttgttagtagttgagagtgattgttggtagttaaactatcacaatgttgattgtaagctggtaacatcagcagtggatatttgactattggtaagctttctaataaagctgggtgaatgcttttgatctaaaaaatgtcttgatagtgcacttgattggactttaagattttaatatgtttttattcctaaaaacttgttcagttagaggcatttgacttagaaccaaactaaagtgtcctataatttgtaaaagaggaaataaataaaaatatgttttctagaacagcgcctcttataactcctgctgctgatttgcttttccctttttacagttaacacctcatgagcctggagttgtaaaacgtgctgtgaaccactttctactgatatcactatcgcttgcttgctggacctgaatcaacatctgtttttgagaaaaactctgtttggcatatatctgaagatttggatattcagtcaatgaagaaagcatgcagcatacttgttgggcatcatgatttcagttcatttcgagcggctggatgtcaggcaaactctccagtgcgaactctggatgaacttagtgttacagaagtattccctttcatgttttttccttcaagtgtagaaagatcagagttggaattatcaaatgtctctcttgtttattcaaggaaaccagacatggaatcttctgggaaaggatctgatggttcctgtaccagtagtgtgaaatcagattttgagaatggaaaagattttggaaagcggtcaaggcaccgttgctttgttgttactgcaagggcacggtcttttctttaccaccaggtaaggttgatggtcggtcttctaaaatctgttgggactggagatctaacaactgcagatgttgagagaattctggatgcaaagacggttactgctgcacccatggcttctgttggtgggcctccagattttgtcagctgttggctatcaaaggaattatatgctgccacttgccaaagctttcagttgcctgttttgtccactgaatcttgcatggtgattgaaaacctagaattaagtttatctgtcagcacaagagccggcttcattctcttcttgtacacagagctcttctgcatgttcagaaacaaaataggtagcttcattttagttaagttcaactatccactctttaaatttcagctggatccacccgattttgttgggtgtacgtagatttgacctggtaggggcaaaattttatttcttggttttctcatgactgtacttggttcttgatatataattaattagccaaatgcgttgtgtgcatattgaaaatattcttttctgttccttgataaattacatcgagcaagactgcaagagaactttcttc

SEQ ID NO: 30572 - DNA, 2658 bp, Zea Mays
ctcaaatcacttcttcccggactcccagactcctcccaaaaccctcgcatcctctcccacgcatgtcacaatcgccatgaccgacagaaaccccgccgccgcctcaagcaagcgtcactgtgacctctccctcgacgatcccacgccgtcggccaagctccagcggtgctccgagccgtcagaaccaacgccggcggggaaaccgaacggcggcgcggcgacgggagaggagagcgagatgatggccggcgcacggaaccctagggcgcagaggtacctggtcgccgtggagtacattggcacccgcttctccggctcacagaagcagcccaaccagcgcaccgtcactggggtcctcgaggaggcatttcaccgatttattgggcagccagtttcaataatcttttctagccgaacggatgcaggtgttcatgctttatcaaatgtttgtcatgttgatgttgagcggataagtaaaaggaagcctggcgaagttgtctgtacacaaaactcattttttttcttaacactgattaccgaccaggccttgtctacatctcttgacactctaaacttatttctttttttgatctttgcatgataagtatatttgtgacagttgttgttatgcctgatttaaatcttctaggttttccaaaataaaattctacaagcaatagaattaccttttctcctgaccttgcctctaaatcatctattttgtccgttccaaatcataattcactttagctttgccttaagtcatatttaaccaagtttaaataaaaatgcaccaacatctacaacatcaattagtttcattaaatttctatatgaaatgtcttgatagttcacaaaatgttgatgtcgttgaagacctggcggctggcgccactgctgaaacaagtcgctgtagtctgggcgtctggattgatgtattttggtgggagagttgtttggtaggttttgaactgtttgttgtgagtgttgttagtagttgagagtgattgttggtagttaaactatcacaatgttgattgtaagctggtaacatcagcagtggatatttgactattggtaagctttctaataaagctgggtgaatgcttttgatctaaaaaatgtcttgatagtgcacttgattggactttaagattttaatatgtttttattcctaaaaacttgttcagttagaggcatttgacttagaaccaaactaaagtgtcctataatttgtaaaagaggaaataaataaaaatatgttttctagaacagcgcctcttataactcctgctgctgatttgcttttccctttttacagttaacacctcatgagcctggagttgtaaaacgtgctgtgaaccactttctactgaagagtgaaggtgacataatggtgactgatgtctgctgtgttgcaccagattttcatgctagatacaaatctctagagcgcacgtagatatcactatcgcttgcttgctggacctgaatcaacatctgtttttgagaaaaactctgtttggcatatatctgaagatttggatattcagtcaatgaagaaagcatgcagcatacttgttgggcatcatgatttcagttcatttcgagcggctggatgtcagcctggtgggacggggcagaatattctgttagtgctgaagcgcgcagggaattaaactccttcattaccttcggcacttggactatctggaagttcaggaatgattgtgtcttcaatgaggcaaactctccagtgcgaactctggatgaacttagtgttacagaagtattccctttcatgttttttccttcaagtgtagaaagatcagagttggaattatcaaatgtctctcttgtttattcaaggaaaccagacatggaatcttctgggaaaggatctgatggttcctgtaccagtagtgtgaaatcagattttgagaatggaaaagattttggaaagcggtcaaggcaccgttgctttgttgttactgcaagggcacggtcttttctttaccaccaggtaaggttgatggtcggtcttctaaaatctgttgggactggagatctaacaactgcagatgttgagagaattctggatgcaaagacggttactgctgcacccagtatggcaccttcttgtggtctgtaccttgctaacgttaaatatgatctgaatacctgaagacaagttttatctagtggcttctgttggtgggcctccagattttgtcagctgttggctatcaaaggaattatatgctgccacttgccaaagctttcagttgcctgttttgtccactgaatcttgcatggtgattgaaaacctagaattaagtttatctgtcagcacaagagccggcttcattctcttcttgtacacagagctcttctgcatgttcagaaacaaaataggtagcttcattttagttaagttcaactatccactctttaaatttcagctggatccacccgattttgttgggtgtacgtagatttgacctggtaggggcaaaattttatttcttggttttctcatgactgtacttggttcttgatatataattaattagccaaatgcgttgtgtgcatattgaaaatattcttttctgttccttgataaattacatcgagcaagactgcaagagaactttcttc

SEQ ID NO: 30573 - DNA, 2111 bp, Zea Mays
atcacttcttcccggactcccagactcctcccaaaaccctcgcatcctctcccacgcatgtcacaatcgccatgaccgacagaaaccccgccgccgcctcaagcaagcgtcactgtgacctctccctcgacgatcccacgccgtcggccaagctccagcggtgctccgagccgtcagaaccaacgccggcggggaaaccgaacggcggcgcggcgacgggagaggagagcgagatgatggccggcgcacggaaccctagggcgcagaggtacctggtcgccgtggagtacattggcacccgcttctccggctcacagaagcagcccaaccagcgcaccgtcactggggtcctcgaggatgcaggtgttcatgctttatcaaatgtttgtcatgttgatgttgagcggataagtaaaaggaagcctggcgaagttgtctgtacacaaaactcattttttttcttaacactgattaccgaccaggccttgtctacatctcttgacactctaaacttatttctttttttgatctttgcatgataagtatatttgtgacagttgttgttatgcctgatttaaatcttctaggttttccaaaataaaattctacaagcaatagaattaccttttctcctgaccttgcctctaaatcatctattttgtccgttccaaatcataattcactttagctttgccttaagtcatatttaaccaagtttaaataaaaatgcaccaacatctacaacatcaattagtttcattaaatttctatatgaaatgtcttgatagttcacaaaatgttgatgtcgttgaagacctggcggctggcgccactgctgaaacaagtcgctgtagtctgggcgtctggattgatgtattttggtgggagagttgtttgttaacacctcatgagcctggagttgtaaaacgtgctgtgaaccactttctactgaagagtgaaggtgacataatggtgactgatgtctgctgtgttgcaccagattttcatgctagatacaaatctctagagcgcacatatcactatcgcttgcttgctggacctgaatcaacatctgtttttgagaaaaactctgtttggcatatatctgaagatttggatattcagtcaatgaagaaagcatgcagcatacttgttgggcatcatgatttcagttcatttcgagcggctggatgtcaggcaaactctccagtgcgaactctggatgaacttagtgttacagaagtattccctttcatgttttttccttcaagtgtagaaagatcagagttggaattatcaaatgtctctcttgtttattcaaggaaaccagacatggaatcttctgggaaaggatctgatggttcctgtaccagtagtgtgaaatcagattttgagaatggaaaagattttggaaagcggtcaaggcaccgttgctttgttgttactgcaagggcacggtcttttctttaccaccaggtaaggttgatggtcggtcttctaaaatctgttgggactggagatctaacaactgcagatgttgagagaattctggatgcaaagacggttactgctgcacccagtatggcaccttcttgtggtctgtaccttgctaacgttaaatatgatctgaatacctgaagacaagttttatctagtggcttctgttggtgggcctccagattttgtcagctgttggctatcaaaggaattatatgctgccacttgccaaagctttcagttgcctgttttgtccactgaatcttgcatggtgattgaaaacctagaattaagtttatctgtcagcacaagagccggcttcattctcttcttgtacacagagctcttctgcatgttcagaaacaaaataggtagcttcattttagttaagttcaactatccactctttaaatttcagctggatccacccgattttgttgggtgtacgtagatttgacctggtaggggcaaaattttatttcttggttttctcatgactgtacttggttcttgatatataattaattagccaaatgcgttgtgtgcatattgaaaatattcttttctgttccttgataaattacatcgagcaagactgcaagagaactttcttc

SEQ ID NO: 30574 - DNA, 1677 bp, Zea Mays
ccggactcccagactcctcccaaaaccctcgcatcctctcccacgcatgtcacaatcgccatgaccgacagaaaccccgccgccgcctcaagcaagcgtcactgtgacctctccctcgacgatcccacgccgtcggccaagctccagcggtgctccgagccgtcagaaccaacgccggcggggaaaccgaacggcggcgcggcgacgggagaggagagcgagatgatggccggcgcacggaaccctagggcgcagaggtacctggtcgccgtggagtacattggcacccgcttctccggctcacagaagcagcccaaccagcgcaccgtcactggggtcctcgaggaggcatttcaccgatttattgggcagccagtttcaataatcttttctagccgaacggatgcaggtgttcatgctttatcaaatgtttgtcatgttgatgttgagcggataagtaaaaggaagcctggcgaagttttaacacctcatgagcctggagttgtaaaacgtgctgtgaaccactttctactgatatcactatcgcttgcttgctggacctgaatcaacatctgtttttgagaaaaactctgtttggcatatatctgaagatttggatattcagtcaatgaagaaagcatgcagcatacttgttgggcatcatgatttcagttcatttcgagcggctggatgtcaggcaaactctccagtgcgaactctggatgaacttagtgttacagaagtattccctttcatgttttttccttcaagtgtagaaagatcagagttggaattatcaaatgtctctcttgtttattcaaggaaaccagacatggaatcttctgggaaaggatctgatggttcctgtaccagtagtgtgaaatcagattttgagaatggaaaagattttggaaagcggtcaaggcaccgttgctttgttgttactgcaagggcacggtcttttctttaccaccaggtaaggttgatggtcggtcttctaaaatctgttgggactggagatctaacaactgcagatgttgagagaattctggatgcaaagacggttactgctgcacccagtatggcaccttcttgtggtctgtaccttgctaacgttaaatatgatctgaatacctgaagacaagttttatctagtggcttctgttggtgggcctccagattttgtcagctgttggctatcaaaggtatacctgaatccaatctatgaatagtgcacctcagtgagtgcaactttgaagtatctgtaccaggaattatatgctgccacttgccaaagctttcagttgcctgttttgtccactgaatcttgcatggtgattgaaaacctagaattaagtttatctgtcagcacaagagccggcttcattctcttcttgtacacagagctcttctgcatgttcagaaacaaaataggtagcttcattttagttaagttcaactatccactctttaaatttcagctggatccacccgattttgttgggtgtacgtagatttgacctggtaggggcaaaattttatttcttggttttctcatgactgtacttggttcttgatatataattaattagccaaatgcgttgtgtgcatattgaaaatattcttttctgttccttgataaattacatcgagcaagactgcaagagaactttcttc

SEQ ID NO: 30575 - DNA, 2411 bp, Zea Mays
cggactcccagactcctcccaaaaccctcgcatcctctcccacgcatgtcacaatcgccatgaccgacagaaaccccgccgccgcctcaagcaagcgtcactgtgacctctccctcgacgatcccacgccgtcggccaagctccagcggtgctccgagccgtcagaaccaacgccggcggggaaaccgaacggcggcgcggcgacgggagaggagagcgagatgatggccggcgcacggaaccctagggcgcagaggtacctggtcgccgtggagtacattggcacccgcttctccggctcacagaagcagcccaaccagcgcaccgtcactggggtcctcgaggaggcatttcaccgatttattgggcagccagtttcaataatcttttctagccgaacggtgttcatgctttatcaaatgtttgtcatgttgatgttgagcggataagtaaaaggaagcctggcgaagttgtctgtacacaaaactcattttttttcttaacactgattaccgaccaggccttgtctacatctcttgacactctaaacttatttctttttttgatctttgcatgataagtatatttgtgacagttgttgttatgcctgatttaaatcttctaggttttccaaaataaaattctacaagcaatagaattaccttttctcctgaccttgcctctaaatcatctattttgtccgttccaaatcataattcactttagctttgccttaagtcatatttaaccaagtttaaataaaaatgcaccaacatctacaacatcaattagtttcattaaatttctatatgaaatgtcttgatagttcacaaaatgttgatgtcgttgaagacctggcggctggcgccactgctgaaacaagtcgctgtagtctgggcgtctggattgatgtattttggtgggagagttgtttggtaggttttgaactgtttgttgtgagtgttgttagtagttgagagtgattgttggtagttaaactatcacaatgttgattgtaagctggtaacatcagcagtggatatttgactattggtaagctttctaataaagctgggtgaatgcttttgatctaaaaaatgtcttgatagtgcacttgattggactttaagattttaatatgtttttattcctaaaaacttgttcagttagaggcatttgacttagaaccaaactaaagtgtcctataatttgtaaaagaggaaataaataaaaatatgttttctagaacagcgcctcttataactcctgctgctgatttgcttttccctttttacagttaacacctcatgagcctggagttgtaaaacgtgctgtgaaccactttctactgaagagtgaaggtgacataatggtgactgatgtctgctgtgttgcaccagattttcatgctagatacaaatctctagagcgcacaaagcatgcagcatacttgttgggcatcatgatttcagttcatttcgagcggctggatgtcaggcaaactctccagtgcgaactctggatgaacttagtgttacagaagtattccctttcatgttttttccttcaagtgtagaaagatcagagttggaattatcaaatgtctctcttgtttattcaaggaaaccagacatggaatcttctgggaaaggatctgatggttcctgtaccagtagtgtgaaatcagattttgagaatggaaaagattttggaaagcggtcaaggcaccgttgctttgttgttactgcaagggcacggtcttttctttaccaccaggtaaggttgatggtcggtcttctaaaatctgttgggactggagatctaacaactgcagatgttgagagaattctggatgcaaagacggttactgctgcacccagtatggcaccttcttgtggtctgtaccttgctaacgttaaatatgatctgaatacctgaagacaagttttatctagtggcttctgttggtgggcctccagattttgtcagctgttggctatcaaaggaattatatgctgccacttgccaaagctttcagttgcctgttttgtccactgaatcttgcatggtgattgaaaacctagaattaagtttatctgtcagcacaagagccggcttcattctcttcttgtacacagagctcttctgcatgttcagaaacaaaataggtagcttcattttagttaagttcaactatccactctttaaatttcagctggatccacccgattttgttgggtgtacgtagatttgacctggtaggggcaaaattttatttcttggttttctcatgactgtacttggttcttgatatataattaattagccaaatgcgttgtgtgcatattgaaaatattcttttctgttccttgataaattacatcgagcaagactgcaagagaactttcttc

SEQ ID NO: 30576 - DNA, 2444 bp, Zea Mays
cggactcccagactcctcccaaaaccctcgcatcctctcccacgcatgtcacaatcgccatgaccgacagaaaccccgccgccgcctcaagcaagcgtcactgtgacctctccctcgacgatcccacgccgtcggccaagctccagcggtgctccgagccgtcagaaccaacgccggcggggaaaccgaacggcggcgcggcgacgggagaggagagcgagatgatggccggcgcacggaaccctagggcgcagaggtacctggtcgccgtggagtacattggcacccgcttctccggctcacagaagcagcccaaccagcgcaccgtcactggggtcctcgaggaggcatttcaccgatttattgggcagccagtttcaataatcttttctagccgaacggatgcaggtgttcatgctttatcaaatgtttgtcatgttgatgttgagcggataagtaaaaggaagcctggcgaagttgtctgtacacaaaactcattttttttcttaacactgattaccgaccaggccttgtctacatctcttgacactctaaacttatttctttttttgatctttgcatgataagtatatttgtgacagttgttgttatgcctgatttaaatcttctaggttttccaaaataaaattctacaagcaatagaattaccttttctcctgaccttgcctctaaatcatctattttgtccgttccaaatcataattcactttagctttgccttaagtcatatttaaccaagtttaaataaaaatgcaccaacatctacaacatcaattagtttcattaaatttctatatgaaatgtcttgatagttcacaaaatgttgatgtcgttgaagacctggcggctggcgccactgctgaaacaagtcgctgtagtctgggcgtctggattgatgtattttggtgggagagttgtttggtaggttttgaactgtttgttgtgagtgttgttagtagttgagagtgattgttggtagttaaactatcacaatgttgattgtaagctggtaacatcagcagtggatatttgactattggtaagctttctaataaagctgggtgaatgcttttgatctaaaaaatgtcttgatagtgcacttgattggactttaagattttaatatgtttttattcctaaaaacttgttcagttagaggcatttgacttagaaccaaactaaagtgtcctataatttgtaaaagaggaaataaataaaaatatgttttctagaacagcgcctcttataactcctgctgctgatttgcttttccctttttacagttaacacctcatgagcctggagttgtaaaacgtgctgtgaaccactttctactgatatcactatcgcttgcttgctggacctgaatcaacatctgtttttgagaaaaactctgtttggcatatatctgaagatttggatattcagtcaatgaagaaagcatgcagcatacttgttgggcatcatgatttcagttcatttcgagcggctggatgtcagggatgaagcccattttttgctgtttggctggagccaaaggattatccctaatcacagcaagaggtgttgtttagagtgcctttggatttaggcaaactctccagtgcgaactctggatgaacttagtgttacagaagtattccctttcatgttttttccttcaagtgtagaaagatcagagttggaattatcaaatgtctctcttgtttattcaaggaaaccagacatggaatcttctgggaaaggatctgatggttcctgtaccagtagtgtgaaatcagattttgagaatggaaaagattttggaaagcggtcaaggcaccgttgctttgttgttactgcaagggcacggtcttttctttaccaccaggtaaggttgatggtcggtcttctaaaatctgttgggactggagatctaacaactgcagatgttgagagaattctggatgcaaagacggttactgctgcacccagtatggcaccttcttgtgattttgtcagctgttggctatcaaaggaattatatgctgccacttgccaaagctttcagttgcctgttttgtccactgaatcttgcatggtgattgaaaacctagaattaagtttatctgtcagcacaagagccggcttcattctcttcttgtacacagagctcttctgcatgttcagaaacaaaataggtagcttcattttagttaagttcaactatccactctttaaatttcagctggatccacccgattttgttgggtgtacgtagatttgacctggtaggggcaaaattttatttcttggttttctcatgactgtacttggttcttgatatataattaattagccaaatgcgttgtgtgcatattgaaaatattcttttctgttccttgataaattacatcgagcaagactgcaagagaactttcttc

SEQ ID NO: 30577 - DNA, 1677 bp, Zea Mays
cccagactcctcccaaaaccctcgcatcctctcccacgcatgtcacaatcgccatgaccgacagaaaccccgccgccgcctcaagcaagcgtcactgtgacctctccctcgacgatcccacgccgtcggccaagctccagcggtgctccgagccgtcagaaccaacgccggcggggaaaccgaacggcggcgcggcgacgggagaggagagcgagatgatggccggcgcacggaaccctagggcgcagaggtacctggtcgccgtggagtacattggcacccgcttctccggctcacagaagcagcccaaccagcgcaccgtcactggggtcctcgaggaggcatttcaccgatttattgggcagccagtttcaataatcttttctagccgaacggatgcaggtgttcatgctttatcaaatgtttgtcatgttgatgttgagcggataagtaaaaggaagcctggcgaagttttaacacctcatgagcctggagttgtaaaacgtgctgtgaaccactttctactgaagagtgaaggtgacataatggtgactgatgtctgctgtgttgcaccagattttcatgctagatacaaatctctagagcgcacgtagatatcactatcgcttgcttgctggacctgaatcaacatctgtttttgagaaaaactctgtttggcatatatctgaagatttggatattcagtcaatgaagaaagcatgcagcatacttgttgggcatcatgatttcagttcatttcgagcggctggatgtcaggcaaactctccagtgcgaactctggatgaacttagtgttacagaagaaaccagacatggaatcttctgggaaaggatctgatggttcctgtaccagtagtgtgaaatcagattttgagaatggaaaagattttggaaagcggtcaaggcaccgttgctttgttgttactgcaagggcacggtcttttctttaccaccaggtaaggttgatggtcggtcttctaaaatctgttgggactggagatctaacaactgcagatgttgagagaattctggatgcaaagacggttactgctgcacccagtatggcaccttcttgtggtctgtaccttgctaacgttaaatatgatctgaatacctgaagacaagttttatctagtggcttctgttggtgggcctccagattttgtcagctgttggctatcaaaggtatacctgaatccaatctatgaatagtgcacctcagtgagtgcaactttgaagtatctgtaccaggaattatatgctgccacttgccaaagctttcagttgcctgttttgtccactgaatcttgcatggtgattgaaaacctagaattaagtttatctgtcagcacaagagccggcttcattctcttcttgtacacagagctcttctgcatgttcagaaacaaaataggtagcttcattttagttaagttcaactatccactctttaaatttcagctggatccacccgattttgttgggtgtacgtagatttgacctggtaggggcaaaattttatttcttggttttctcatgactgtacttggttcttgatatataattaattagccaaatgcgttgtgtgcatattgaaaatattcttttctgttccttgataaattacatcgagcaagactgcaagagaactttcttc

SEQ ID NO: 30578 - DNA, 1961 bp, Zea Mays
cccagactcctcccaaaaccctcgcatcctctcccacgcatgtcacaatcgccatgaccgacagaaaccccgccgccgcctcaagcaagcgtcactgtgacctctccctcgacgatcccacgccgtcggccaagctccagcggtgctccgagccgtcagaaccaacgccggcggggaaaccgaacggcggcgcggcgacgggagaggagagcgagatgatggccggcgcacggaaccctagggcgcagaggtacctggtcgccgtggagtacattggcacccgcttctccggctcacagaagcagcccaaccagcgcaccgtcactggggtcctcgaggaggcatttcaccgatttattgggcagccagtttcaataatcttttctagccgaacggatgcaggtgttcatgctttatcaaatgtttgtcatgttgatgttgagcggataagtaaaaggaagcctggcgaagttttaacacctcatgagcctggagttgtaaaacgtgctgtgaaccactttctactgaagagtgaaggtgacataatggtgactgatgtctgctgtgttgcaccagattttcatgctagatacaaatctctagagcgcacgtaggtagcagaatatataatacaatctgggcatgtttaaagttactcttgttcgaatttcaatcttgtgtccagtatttataaatggcttgcagctttaagatatgtactaaaaagttaatagctaagctagctcatagattactctgttcgccttctgaaatgctgaaaatgtttcatactacatgttttactcatttttttgaagatatcactatcgcttgcttgctggacctgaatcaacatctgtttttgagaaaaactctgtttggcatatatctgaagatttggatattcagtcaatgaagaaagcatgcagcatacttgttgggcatcatgatttcagttcatttcgagcggctggatgtcaggcaaactctccagtgcgaactctggatgaacttagtgttacagaagtattccctttcatgttttttccttcaagtgtagaaagatcagagttggaattatcaaatgtctctcttgtttattcaaggaaaccagacatggaatcttctgggaaaggatctgatggttcctgtaccagtagtgtgaaatcagattttgagaatggaaaagattttggaaagcggtcaaggcaccgttgctttgttgttactgcaagggcacggtcttttctttaccaccaggtaaggttgatggtcggtcttctaaaatctgttgggactggagatctaacaactgcagatgttgagagaattctggatgcaaagacggttactgctgcacccagtatggcaccttcttgtggtctgtaccttgctaacgttaaatatgatctgaatacctgaagacaagttttatctagtggcttctgttggtgggcctccagattttgtcagctgttggctatcaaaggtatacctgaatccaatctatgaatagtgcacctcagtgagtgcaactttgaagtatctgtaccaggaattatatgctgccacttgccaaagctttcagttgcctgttttgtccactgaatcttgcatggtgattgaaaacctagaattaagtttatctgtcagcacaagagccggcttcattctcttcttgtacacagagctcttctgcatgttcagaaacaaaataggtagcttcattttagttaagttcaactatccactctttaaatttcagctggatccacccgattttgttgggtgtacgtagatttgacctggtaggggcaaaattttatttcttggttttctcatgactgtacttggttcttgatatataattaattagccaaatgcgttgtgtgcatattgaaaatattcttttctgttccttgataaattacatcgagcaagactgcaagagaactttcttc

SEQ ID NO: 30579 - DNA, 2692 bp, Zea Mays
ccagactcctcccaaaaccctcgcatcctctcccacgcatgtcacaatcgccatgaccgacagaaaccccgccgccgcctcaagcaagcgtcactgtgacctctccctcgacgatcccacgccgtcggccaagctccagcggtgctccgagccgtcagaaccaacgccggcggggaaaccgaacggcggcgcggcgacgggagaggagagcgagatgatggccggcgcacggaaccctagggcgcagaggtacctggtcgccgtggagtacattggcacccgcttctccggctcacagaagcagcccaaccagcgcaccgtcactggggtcctcgaggaggcatttcaccgatttattgggcagccagtttcaataatcttttctagccgaacgagtggaatgatactagcagattcatcaaaagtatgtatgcgttattgtattttcaaaaccatagcaaacatccaaatgctcaaaggttcaggctacttaattcttgtactggatgcaggtgttcatgctttatcaaatgtttgtcatgttgatgttgagcggataagtaaaaggaagcctggcgaagttgtctgtacacaaaactcattttttttcttaacactgattaccgaccaggccttgtctacatctcttgacactctaaacttatttctttttttgatctttgcatgataagtatatttgtgacagttgttgttatgcctgatttaaatcttctaggttttccaaaataaaattctacaagcaatagaattaccttttctcctgaccttgcctctaaatcatctattttgtccgttccaaatcataattcactttagctttgccttaagtcatatttaaccaagtttaaataaaaatgcaccaacatctacaacatcaattagtttcattaaatttctatatgaaatgtcttgatagttcacaaaatgttgatgtcgttgaagacctggcggctggcgccactgctgaaacaagtcgctgtagtctgggcgtctggattgatgtattttggtgggagagttgtttggtaggttttgaactgtttgttgtgagtgttgttagtagttgagagtgattgttggtagttaaactatcacaatgttgattgtaagctggtaacatcagcagtggatatttgactattggtaagctttctaataaagctgggtgaatgcttttgatctaaaaaatgtcttgatagtgcacttgattggactttaagattttaatatgtttttattcctaaaaacttgttcagttagaggcatttgacttagaaccaaactaaagtgtcctataatttgtaaaagaggaaataaataaaaatatgttttctagaacagcgcctcttataactcctgctgctgatttgcttttccctttttacagttaacacctcatgagcctggagttgtaaaacgtgctgtgaaccactttctactgaagagtgaaggtgacataatggtgactgatgtctgctgtgttgcaccagattttcatgctagatacaaatctctagagcgcacgtagatatcactatcgcttgcttgctggacctgaatcaacatctgtttttgagaaaaactctgtttggcatatatctgaagatttggatattcagtcaatgaagaaagcatgcagcatacttgttgggcatcatgatttcagttcatttcgagcggctggatgtcaggcaaactctccagtgcgaactctggatgaacttagtgttacagaagtattccctttcatgttttttccttcaagtgtagaaagatcagagttggaattatcaaatgtctctcttgtttattcaaggaaaccagacatggaatcttctgggaaaggatctgatggttcctgtaccagtagtgtgaaatcagattttgagaatggaaaagattttggaaagcggtcaaggcaccgttgctttgttgttactgcaagggcacggtcttttctttaccaccaggtaaggttgatggtcggtcttctaaaatctgttgggactggagatctaacaactgcagatgttgagagaattctggatgcaaagacggttactgctgcacccagtatggcaccttcttgtggtctgtaccttgctaacgttaaatatgatctgaatacctgaagacaagttttatctagtggcttctgttggtgggcctccagattttgtcagctgttggctatcaaaggtatacctgaatccaatctatgaatagtgcacctcagtgagtgcaactttgaagtatctgtaccaggaattatatgctgccacttgccaaagctttcagttgcctgttttgtccactgaatcttgcatggtgattgaaaacctagaattaagtttatctgtcagcacaagagccggcttcattctcttcttgtacacagagctcttctgcatgttcagaaacaaaataggtagcttcattttagttaagttcaactatccactctttaaatttcagctggatccacccgattttgttgggtgtacgtagatttgacctggtaggggcaaaattttatttcttggttttctcatgactgtacttggttcttgatatataattaattagccaaatgcgttgtgtgcatattgaaaatattcttttctgttccttgataaattacatcgagcaagactgcaagagaactttcttc

SEQ ID NO: 30580 - DNA, 805 bp, Zea Mays
ctcccaaaaccctcgcatcctctcccacgcatgtcacaatcgccatgaccgacagaaaccccgccgccgcctcaagcaagcgtcactgtgacctctccctcgacgatcccacgccgtcggccaagctccagcggtgctccgagccgtcagaaccaacgccggcggggaaaccgaacggcggcgcggcgacgggagaggagagcgagatgatggccggcgcacggaaccctagggcgcagaggtacctggtcgccgtggagtacattggcacccgcttctccggctcacagaagcagcccaaccagcgcaccgtcactggggtcctcgaggaggcatttcaccgatttattgggcagccagtttcaataatcttttctagccgaacgagtggaatgatactagcagattcatcaaaagtatgtatgcgttattgtattttcaaaaccatagcaaacatccaaatgctcaaaggtgtgtgatggagacaatgctggtgtcaaaacaataattaaaagaaggaggtactttttgaataggcgtcaactgtggtctatggagttaggatcgaaccttgcatgacatgccatatgaggctctatgcatttacttcttagttccaaacgtactttgctgtgtaggaagagatcttcagatcgttgccatggtttgaggcctgattagtgtttttactgatttgtaatgcatacttttctttagtactttattcttgtagtggtaacacttctctggactctggagatctattttaatgtgtttaatgtcctttgcttttgttcaggttcag

SEQ ID NO: 30581 - DNA, 2230 bp, Zea Mays
cattgtgccttctgcctttcacagatctccatgggagactggagaacatacatttgttttccttagtcttctcatgtcagctgtacatcggcctacaaaagaagtgaggcttctgtgtatatacatcacatggaggcatttcaccgatttattgggcagccagtttcaataatcttttctagccgaacggatgcaggtgttcatgctttatcaaatgtttgtcatgttgatgttgagcggataagtaaaaggaagcctggcgaagttgtctgtacacaaaactcattttttttcttaacactgattaccgaccaggccttgtctacatctcttgacactctaaacttatttctttttttgatctttgcatgataagtatatttgtgacagttgttgttatgcctgatttaaatcttctaggttttccaaaataaaattctacaagcaatagaattaccttttctcctgaccttgcctctaaatcatctattttgtccgttccaaatcataattcactttagctttgccttaagtcatatttaaccaagtttaaataaaaatgcaccaacatctacaacatcaattagtttcattaaatttctatatgaaatgtcttgatagttcacaaaatgttgatgtcgttgaagacctggcggctggcgccactgctgaaacaagtcgctgtagtctgggcgtctggattgatgtattttggtgggagagttgtttggtaggttttgaactgtttgttgtgagtgttgttagtagttgagagtgattgttggtagttaaactatcacaatgttgattgtaagctggtaacatcagcagtggatatttgactattggtaagctttctaataaagctgggtgaatgcttttgatctaaaaaatgtcttgatagtgcacttgattggactttaagattttaatatgtttttattcctaaaaacttgttcagttagaggcatttgacttagaaccaaactaaagtgtcctataatttgtaaaagaggaaataaataaaaatatgttttctagaacagcgcctcttataactcctgctgctgatttgcttttccctttttacagttaacacctcatgagcctggagttgtaaaacgtgctgtgaaccactttctactgaagagtgaaggtgacataatggtgactgatgtctgctgtgttgcaccagattttcatgctagatacaaatctctagagcgcacatatcactatcgcttgcttgctggacctgaatcaacatctgtttttgagaaaaactctgtttggcatatatctgaagatttggatattcagtcaatgaagaaagcatgcagcatacttgttgggcatcatgatttcagttcatttcgagcggctggatgtcaggcaaactctccagtgcgaactctggatgaacttagtgttacagaagtattccctttcatgttttttccttcaagtgtagaaagatcagagttggaattatcaaatgtctctcttgtttattcaaggaaaccagacatggaatcttctgggaaaggatctgatggttcctgtaccagtagtgtgaaatcagattttgagaatggaaaagattttggaaagcggtcaaggcaccgttgctttgttgttactgcaagggcacggtcttttctttaccaccaggtaaggttgatggtcggtcttctaaaatctgttgggactggagatctaacaactgcagatgttgagagaattctggatgcaaagacggttactgctgcacccatggcttctgttggtgggcctccagattttgtcagctgttggctatcaaaggaattatatgctgccacttgccaaagctttcagttgcctgttttgtccactgaatcttgcatggtgattgaaaacctagaattaagtttatctgtcagcacaagagccggcttcattctcttcttgtacacagagctcttctgcatgttcagaaacaaaataggtagcttcattttagttaagttcaactatccactctttaaatttcagctggatccacccgattttgttgggtgtacgtagatttgacctggtaggggcaaaattttatttcttggttttctcatgactgtacttggttcttgatatataattaattagccaaatgcgttgtgtgcatattgaaaatattcttttctgttccttgataaattacatcgagcaagactgcaagagaactttcttc

SEQ ID NO: 30582 - DNA, 1313 bp, Zea Mays
aataaatttagtgccttctaggatgcaggtgttcatgctttatcaaatgtttgtcatgttgatgttgagcggataagtaaaaggaagcctggcgaagttttaacacctcatgagcctggagttgtaaaacgtgctgtgaaccactttctactgaagagtgaaggtgacataatggtgactgatgtctgctgtgttgcaccagattttcatgctagatacaaatctctagagcgcacatatcactatcgcttgcttgctggacctgaatcaacatctgtttttgagaaaaactctgtttggcatatatctgaagatttggatattcagtcaatgaagaaagcatgcagcatacttgttgggcatcatgatttcagttcatttcgagcggctggatgtcaggcaaactctccagtgcgaactctggatgaacttagtgttacagaagtattccctttcatgttttttccttcaagtgtagaaagatcagagttggaattatcaaatgtctctcttgtttattcaaggaaaccagacatggaatcttctgggaaaggatctgatggttcctgtaccagtagtgtgaaatcagattttgagaatggaaaagattttggaaagcggtcaaggcaccgttgctttgttgttactgcaagggcacggtcttttctttaccaccaggtaaggttgatggtcggtcttctaaaatctgttgggactggagatctaacaactgcagatgttgagagaattctggatgcaaagacggttactgctgcacccagtatggcaccttcttgtggtctgtaccttgctaacgttaaatatgatctgaatacctgaagacaagttttatctagtggcttctgttggtgggcctccagattttgtcagctgttggctatcaaaggaattatatgctgccacttgccaaagctttcagttgcctgttttgtccactgaatcttgcatggtgattgaaaacctagaattaagtttatctgtcagcacaagagccggcttcattctcttcttgtacacagagctcttctgcatgttcagaaacaaaataggtagcttcattttagttaagttcaactatccactctttaaatttcagctggatccacccgattttgttgggtgtacgtagatttgacctggtaggggcaaaattttatttcttggttttctcatgactgtacttggttcttgatatataattaattagccaaatgcgttgtgtgcatattgaaaatattcttttctgttccttgataaattacatcgagcaagactgcaagagaactttcttc

SEQ ID NO: 30583 - DNA, 663 bp, Zea Mays
tgctatttgtatttgagtgcctttagaggtaaggttgatggtcggtcttctaaaatctgttgggactggagatctaacaactgcagatgttgagagaattctggatgcaaagacggttactgctgcacccagtatggcaccttcttgtggtctgtaccttgctaacgttaaatatgatctgaatacctgaagacaagttttatctagtggcttctgttggtgggcctccagattttgtcagctgttggctatcaaaggaattatatgctgccacttgccaaagctttcagttgcctgttttgtccactgaatcttgcatggtgattgaaaacctagaattaagtttatctgtcagcacaagagccggcttcattctcttcttgtacacagagctcttctgcatgttcagaaacaaaataggtagcttcattttagttaagttcaactatccactctttaaatttcagctggatccacccgattttgttgggtgtacgtagatttgacctggtaggggcaaaattttatttcttggttttctcatgactgtacttggttcttgatatataattaattagccaaatgcgttgtgtgcatattgaaaatattcttttctgttccttgataaattacatcgagcaagactgcaagagaactttcttc

SEQ ID NO: 30584 - DNA, 971 bp, Zea Mays
atgggcgtcggcgtcgccatcccactgcgtcggcggctgtgtcctcctctgtgggcaaggatggcgactccgccacggctctcactcgcagcctgcgagcgaccacctagggtgttctcgacttggcgtcacctgtcgcctggcaccctggcttcctcggctggctgcctggcttcggtgtttggtcctcagcctgtggaagaggaaagaatggatttggtgtcgcgttggcttttccaggagtcgctttccttcggtgatctcccaagcctattttattttgtttatgctctttttagtatattttgcctcgttctacttgtcgtctgtgtggttattttttcgctaaagattggcaagcggttgttacatgatagacgggtagatgggactacgtacaaagctgttctggaggatggaacaacagtggtggtcaagagattgaaagaagtggtggcgggaaagagggaatttgaacagcagatggagctaattggcaaggtgcctttgtgctgctttgcatgttatttcacctgttttgctaacttattgtctgaaagtctgactaggcacattatacatatttctgtggaaatgaaactgtatggtaacaaagctgctggaagaaccccattggactgggagaccagggtgaagataactctgggcatagcacgcggaatggcttaccttcactccgtgggtagcggcgtgaagttcattcacgggaacatcaagtcaagcaacatccttctctcacaggaactcggcgcctgcgtcaccgagttcggccttgcccagctcatgtccacgccccacgtccacccactgcacacggaatggcttaccttcactccgtgtgtctcaatcgagggggagtcaccaacgaacgacccacaattggagtttgagcaggactagagaggagacgtcagttcttcctcctccgctcagtgcgaccattgtccctg

SEQ ID NO: 30585 - DNA, 2157 bp, Zea Mays
cgggattttaccttccaggcagctgctgggctcgtgacccacgccgtctcggaccaacccgagcgccgaaccccaaggctcgcgaccgcgacactcttgtgtcctcctgctctccagatctcgccgtcggcggcggcatgctcccctccaccgtcggcggccgcggccgctacctcatgctcggcatcgcccttgccctcgctgccctgctcgcgctcgcctccgcttccgagtccgaccacaagtacaaaactgaagagccagttaagctttgggtgaataaagttggcccttacaacaatcctcaagaaacttacaactactacagccttccattttgtcaaccgtctgagaaccctacacataaatggggtggtcttggagaggtcctgggtggaaatgagctgattgatagtcagcttgaaataaagttcttaaaaaacgtggagaagggcttcatttgtacacttgagctagatgctaaaaaggtccagcagtttgctgatgccattgaaagctcatattggtttgaattttttatagacgatctgcctctttggggttttgttggggagactgacaagaacagtgaaaacaagcattatctttacacgcacaagaacatccttgttaaatacaatgataacaggataattcatgtaaatctcacccaagagtctcctacgcttcttgaagatggtaagaaattggaaatgacatattcagtgaagtgggtagcgactgatgtgtcatttgcacgccgttttgaagtgtacctggactatcctttctttgaacaccagattcactggttctccattttcaactctttcatgatggttattttcctaactggtttggtttcgatgatattgatgcggactttgagaaacgattatgccaaatatgctcgtgaagatgatgatctagagtccctggagagagatgttaatgaggaatcaggatggaagcttgtccatggcgatgtatttcggcctccccaaagtttgatgtttctttctgcacttgcgaggggctatcatcacaaccttcattgtgtgctatgctcttacatcttttatttctggatatgttagtggtggtctttactcaaggaatggtggcaaaaactggattaaagcgatggttcttacagcgtccctgtttccgttcttgtgtttctcaattggcttcgcgctgaatacaattgctattttctaccgctcattagcagcaataccatttggaacaatggttgtcatgtttgtactttgggctttcatctcctttcccttggtgcttttgggaactgtcgttggtaggaactggagtggagctcctaacaatccctgccgagtaaagactattccacggcctattcctgagaagaagtggtaccttacaccttctgtcatctcattgatgggtggcctgcttcccttcggtagcatcttcattgagatgtactttgtgttcacatcattctggaactataaggtgtattatgtctatggcttcatgttgctggtctttgtcatccttcttatagtcaccatctgcgtcactattgtgggtacttatttcttgctgaacgccgagaactaccattggcaatggacgtcgttttcttctgcagcctcaaccgctctgtacgtgtatctgtactccatctactactaccatgtgaagacaaagatgtcaggcttcttccagacaagtttctatttcggctacacgctgatgttctgccttggcctaggcatactttgtggagctattggctatctagggtcaaccctttttgtaaggagaatctacaggaatatcaaatgtgattaaatccctgctgcttaagctagcaacagaaaaatcatatgtattgtcaggaggcatggcctaaaaaaatggattttaatggtagaccctgattttggaactgctgaggacttgctcccctttgttcgttgttatacgcatttttgtttgcctgcttattcctgcgagatcgtcctcgcaatgtatacctgtgatagtcgagcattagtctggagcacctgtgttcatcattctcttttttttttgtttctgttactttattcggtaggatgtaatcagtgaatgttcgtgcggcgctctactaattaaggcaacaagggg

SEQ ID NO: 30586 - DNA, 2090 bp, Zea Mays
agctgctgggctcgtgacccacgccgtctcggaccaacccgagcgccgaaccccaaggctcgcgaccgcgacactcttgtgtcctcctgctctccagatctcgccgtcggcggcggcatgctcccctccaccgtcggcggccgcggccgctacctcatgctcggcatcgcccttgccctcgctgccctgctcgcgctcgcctccgcttccgagtccgaccacaagtacaaaactgaagagccagttaagctttgggtgaataaagttggcccttacaacaatcctcaagaaacttacaactactacagccttccattttgtcaaccgtctgagaaccctacacataaatggggtggtcttggagaggtcctgggtggaaatgagctgattgatagtcagcttgaaataaagttcttaaaaaacgtggagaagggcttcatttgtacacttgagctagatgctaaaaaggtccagcagtttgctgatgccattgaaagctcatattggtttgaattttttatagacgatctgcctctttggggttttgttggggagactgacaagaacagtgaaaacaagcattatctttacacgcacaagaacatccttgttaaatacaatgataacaggataattcatgtaaatctcacccaagagtctcctacgcttcttgaagatggtaagaaattggaaatgacatattcagtgaagtgggtagcgactgatgtgtcatttgcacgccgttttgaagtgtacctggactatcctttctttgaacaccagattcactggttctccattttcaactctttcatgatggttattttcctaactggtttggtttcgatgatattgatgcggactttgagaaacgattatgccaaatatgctcgtgaagatgatgatctagagtccctggagagagatgttaatgaggaatcaggatggaagcttgtccatggcgaggggctatcatcacaaccttcattgtgtgctatgctcttacatcttttatttctggatatgttagtggtggtctttactcaaggaatggtggcaaaaactggattaaagcgatggttcttacagcgtccctgtttccgttcttgtgtttctcaattggcttcgcgctgaatacaattgctattttctaccgctcattagcagcaataccatttggaacaatggttgtcatgtttgtactttgggctttcatctcctttcccttggtgcttttgggaactgtcgttggtaggaactggagtggagctcctaacaatccctgccgagtaaagactattccacggcctattcctgagaagaagtggtaccttacaccttctgtcatctcattgatgggtggcctgcttcccttcggtagcatcttcattgagatgtactttgtgttcacatcattctggaactataaggtgtattatgtctatggcttcatgttgctggtctttgtcatccttcttatagtcaccatctgcgtcactattgtgggtacttatttcttgctgaacgccgagaactaccattggcaatggacgtcgttttcttctgcagcctcaaccgctctgtacgtgtatctgtactccatctactactaccatgtgaagacaaagatgtcaggcttcttccagacaagtttctatttcggctacacgctgatgttctgccttggcctaggcatactttgtggagctattggctatctagggtcaaccctttttgtaaggagaatctacaggaatatcaaatgtgattaaatccctgctgcttaagctagcaacagaaaaatcatatgtattgtcaggaggcatggcctaaaaaaatggattttaatggtagaccctgattttggaactgctgaggacttgctcccctttgttcgttgttatacgcatttttgtttgcctgcttattcctgcgagatcgtcctcgcaatgtatacctgtgatagtcgagcattagtctggagcacctgtgttcatcattctcttttttttttgtttctgttactttattcggtaggatgtaatcagtgaatgttcgtgcggcgctctactaattaaggcaacaagggg

SEQ ID NO: 30587 - DNA, 2047 bp, Zea Mays
agctgctgggctcgtgacccacgccgtctcggaccaacccgagcgccgaaccccaaggctcgcgaccgcgacactcttgtgtcctcctgctctccagatctcgccgtcggcggcggcatgctcccctccaccgtcggcggccgcggccgctacctcatgctcggcatcgcccttgccctcgctgccctgctcgcgctcgcctccgcttccgagtccgaccacaagtacaaaactgaagagccagttaagctttgggtgaataaagttggcccttacaacaatcctcaagaaacttacaactactacagccttccattttgtcaaccgtctgagaaccctacacataaatggggtggtcttggagaggtcctgggtggaaatgagctgattgatagtcagcttgaaataaagttcttaaaaaacgtggagaagggcttcatttgtacacttgagctagatgctaaaaaggtccagcagtttgctgatgccattgaaagctcatattggtttgaattttttatagacgatctgcctctttggggttttgttggggagactgacaagaacagtgaaaacaagcattatctttacacgcacaagaacatccttgttaaatacaatgataacaggataattcatgtaaatctcacccaagagtctcctacgcttcttgaagatggtaagaaattggaaatgacatattcagtgaagtgggtagcgactgatgtgtcatttgcacgccgttttgaagtgtacctggactatcctttctttgaacaccagattcactggttctccattttcaactctttcatgatggttattttcctaactggtttggtttcgatgatattgatgcggactttgagaaacgattatgccaaatatgctcgtgaagatgatgatctagagtccctggcgaggggctatcatcacaaccttcattgtgtgctatgctcttacatcttttatttctggatatgttagtggtggtctttactcaaggaatggtggcaaaaactggattaaagcgatggttcttacagcgtccctgtttccgttcttgtgtttctcaattggcttcgcgctgaatacaattgctattttctaccgctcattagcagcaataccatttggaacaatggttgtcatgtttgtactttgggctttcatctcctttcccttggtgcttttgggaactgtcgttggtaggaactggagtggagctcctaacaatccctgccgagtaaagactattccacggcctattcctgagaagaagtggtaccttacaccttctgtcatctcattgatgggtggcctgcttcccttcggtagcatcttcattgagatgtactttgtgttcacatcattctggaactataaggtgtattatgtctatggcttcatgttgctggtctttgtcatccttcttatagtcaccatctgcgtcactattgtgggtacttatttcttgctgaacgccgagaactaccattggcaatggacgtcgttttcttctgcagcctcaaccgctctgtacgtgtatctgtactccatctactactaccatgtgaagacaaagatgtcaggcttcttccagacaagtttctatttcggctacacgctgatgttctgccttggcctaggcatactttgtggagctattggctatctagggtcaaccctttttgtaaggagaatctacaggaatatcaaatgtgattaaatccctgctgcttaagctagcaacagaaaaatcatatgtattgtcaggaggcatggcctaaaaaaatggattttaatggtagaccctgattttggaactgctgaggacttgctcccctttgttcgttgttatacgcatttttgtttgcctgcttattcctgcgagatcgtcctcgcaatgtatacctgtgatagtcgagcattagtctggagcacctgtgttcatcattctcttttttttttgtttctgttactttattcggtaggatgtaatcagtgaatgttcgtgcggcgctctactaattaaggcaacaagggg

SEQ ID NO: 30588 - DNA, 1583 bp, Zea Mays
gtcacccacgcctaaaaaaaccgtaatagcaaaaacgactccacacggtccacggcgtcttctccggcgaaccttcgcgagccctcggctcccctctaccaccgctgccgcgaccccgcctccggagcatcctcgggtagcgctctggcttcccgtgccgccggacgtcctgcaggaggcggcggcctccgtggcatgttgatgagggccgccgctgccctccctcgccgatcgtcgcggccctcggagccggggtcctcctcctcccgggctcccgcccctggggcctcctccagccgggctcctgcccctggggcctccttcgaccccttcgatgtcgataccgacccgccatcacggcctgagctgacgcccgagcagatcgggctttgcgtcgacgcgctcgcgcatttcgagtacaaggggaagcgccgggatgacttgtccgacgagttcagaagcctctcggtatcggatattagacatatgaaaacgatcagtgtagctcattatcctgttaatagagagaagaaccgatatattgatgtcttaccatttgacgataccagagtacagctaaaatcctcagcacggcctccaaacaacgattacatcaatgcaagctttataaaggctactgagaacaacagagttgcaacatttatttctacacaaggtccactagtgaagacatttggagatttttgggaaatggtctttgaatatcagtgccctgcaattgtcatgctcacccactttgacagtattaagtgtgataaatatcttccactgggaagtgaacggcgaacatatggggattatgatatcaagattacaaagacaagaacagatagccaccatttacagttgcgtgatgtcaaggtgcaaaacatcgaggcaaggttcattctgtactccatatagaatatcctgattggcccgaccatggagtggcaactaatacagatgctgtacgggaaatctggaaacgactgcatcacattccaacggaacatcctatagttatccattgcagtgcaggaatcggaaggaccggtacttacatcacaatccatactacaattgagcgaattcttcttggagataaaagctcttacgatcttgccaaaactgtaaagaattttagatcccaacgacctgggatggtccaaacagaagaacaatacaagttctgctacagggcaattgctgacgagctgaaagacctgctaaattcagatcattgaggtgggtcacatgagacggacagcaacgctgttagcatttattacgtttttttagacatttctatgtgaaggaacacttaccctttagaggagtgaattagtcaatctcatttctctttaaactactgagctatgtttgttctagtcaaaatctatgtaataaaaaatctatcatatgtgaagctatgctatgtttttgactaatcgttgctattactaccgtaaaggagtacgatatgaaggcggaagcttaaaatgagatagagatatgacatttcgtaggtgtgctgatgttttttatcgagggattgaaaatcatgcaagcttatctctgac

SEQ ID NO: 30589 - DNA, 1505 bp, Zea Mays
gtcacccacgcctaaaaaaaccgtaatagcaaaaacgactccacacggtccacggcgtcttctccggcgaaccttcgcgagccctcggctcccctctaccaccgctgccgcgaccccgcctccggagcatcctcgggtagcgctctggcttcccgtgccgccggacgtcctgcaggaggcggcggcctccgtggcatgttgatgagggccgccgctgccctccctcgccgatcgtcgcggccctcggagccggggtcctcctcctcccgggctcccgcccctggggcctcctccagccgggctcctgcccctggggcctccttcgaccccttcgatgtcgataccgacccgccatcacggcctgagctgacgcccgagcagatcgggctttgcgtcgacgcgctcgcgcatttcgagtacaaggggaagcgccgggatgacttgtccgacgagttcagaagcctctcggtatcgttgacgataccagagtacagctaaaatcctcagcacggcctccaaacaacgattacatcaatgcaagctttataaaggctactgagaacaacagagttgcaacatttatttctacacaaggtccactagtgaagacatttggagatttttgggaaatggtctttgaatatcagtgccctgcaattgtcatgctcacccactttgacagtattaagtgtgataaatatcttccactgggaagtgaacggcgaacatatggggattatgatatcaagattacaaagacaagaacagatagccaccatttacagttgcgtgatgtcaaggtgcaaaacatcgagacaggcaaggttcattctgtactccatatagaatatcctgattggcccgaccatggagtggcaactaatacagatgctgtacgggaaatctggaaacgactgcatcacattccaacggaacatcctatagttatccattgcagtgcaggaatcggaaggaccggtacttacatcacaatccatactacaattgagcgaattcttcttggagataaaagctcttacgatcttgccaaaactgtaaagaattttagatcccaacgacctgggatggtccaaacagaagaacaatacaagttctgctacagggcaattgctgacgagctgaaagacctgctaaattcagatcattgaggtgggtcacatgagacggacagcaacgctgttagcatttattacgtttttttagacatttctatgtgaaggaacacttaccctttagaggagtgaattagtcaatctcatttctctttaaactactgagctatgtttgttctagtcaaaatctatgtaataaaaaatctatcatatgtgaagctatgctatgtttttgactaatcgttgctattactaccgtaaaggagtacgatatgaaggcggaagcttaaaatgagatagagatatgacatttcgtaggtgtgctgatgttttttatcgagggattgaaaatcatgcaagcttatctctgac

SEQ ID NO: 30590 - DNA, 1582 bp, Zea Mays
gtcacccacgcctaaaaaaaccgtaatagcaaaaacgactccacacggtccacggcgtcttctccggcgaaccttcgcgagccctcggctcccctctaccaccgctgccgcgaccccgcctccggagcatcctcgggtagcgctctggcttcccgtgccgccggacgtcctgcaggaggcggcggcctccgtggcatgttgatgagggccgccgctgccctccctcgccgatcgtcgcggccctcggagccggggtcctcctcctcccgggctcccgcccctggggcctcctccagccgggctcctgcccctggggcctccttcgaccccttcgatgtcgataccgacccgccatcacggcctgagctgacgcccgagcagatcgggctttgcgtcgacgcgctcgcgcatttcgagtacaaggggaagcgccgggatgacttgtccgacgagttcagaagcctctcggtatcggatattagacatatgaaaacgatcagtgtagctcattatcctgttaatagagagaagaaccgatatattgatgtcttaccatttgacgataccagagtacagctaaaatcctcagcacggcctccaaacaacgattacatcaatgcaagctttataaaggctactgagaacaacagagttgcaacatttatttctacacaaggtccactagtgaagacatttggagatttttgggaaatggtctttgaatatcagtgccctgcaattgtcatgctcacccactttgacagtattaagtgtgataaatatcttccactgggaagtgaacggcgaacatatggggattatgatatcaagattacaaagacaagaacagatagccaccatttacagttgcgtgatgtcaaggtgcaaaacatcgagacaggcaaggttcattctgtactccatatagaatatcctgattggcccgaccatggagtggcaactaatacagatgctgtacgggaaatctggaaacgactgcatcacattccaacggaacatcctatagttatccattgcaggaatcggaaggaccggtacttacatcacaatccatactacaattgagcgaattcttcttggagataaaagctcttacgatcttgccaaaactgtaaagaattttagatcccaacgacctgggatggtccaaacagaagaacaatacaagttctgctacagggcaattgctgacgagctgaaagacctgctaaattcagatcattgaggtgggtcacatgagacggacagcaacgctgttagcatttattacgtttttttagacatttctatgtgaaggaacacttaccctttagaggagtgaattagtcaatctcatttctctttaaactactgagctatgtttgttctagtcaaaatctatgtaataaaaaatctatcatatgtgaagctatgctatgtttttgactaatcgttgctattactaccgtaaaggagtacgatatgaaggcggaagcttaaaatgagatagagatatgacatttcgtaggtgtgctgatgttttttatcgagggattgaaaatcatgcaagcttatctctgac

SEQ ID NO: 30591 - DNA, 1220 bp, Zea Mays
atttaatgtgaagcatcggggatctgctcggagtgtgttggtagaggatgccgtgtatgggtactcaataagttaaatgtcgtcgctaaagtcatctgcaatacaaggatattagacatatgaaaacgatcagtgtagctcattatcctgttaatagagagaagaaccgatatattgatgtcttaccatttgacgataccagagtacagctaaaatcctcagcacggcctccaaacaacgattacatcaatgcaagctttataaaggctactgagaacaacagagttgcaacatttatttctacacaaggtccactagtgaagacatttggagatttttgggaaatggtctttgaatatcagtgccctgcaattgtcatgctcacccactttgacagtattaagtgtgataaatatcttccactgggaagtgaacggcgaacatatggggattatgatatcaagattacaaagacaagaacagatagccaccatttacagttgcgtgatgtcaaggtgcaaaacatcgagacaggcaaggttcattctgtactccatatagaatatcctgattggcccgaccatggagtggcaactaatacagatgctgtacgggaaatctggaaacgactgcatcacattccaacggaacatcctatagttatccattgcagtgcaggaatcggaaggaccggtacttacatcacaatccatactacaattgagcgaattcttcttggagataaaagctcttacgatcttgccaaaactgtaaagaattttagatcccaacgacctgggatggtccaaacagaagaacaatacaagttctgctacagggcaattgctgacgagctgaaagacctgctaaattcagatcattgaggtgggtcacatgagacggacagcaacgctgttagcatttattacgtttttttagacatttctatgtgaaggaacacttaccctttagaggagtgaattagtcaatctcatttctctttaaactactgagctatgtttgttctagtcaaaatctatgtaataaaaaatctatcatatgtgaagctatgctatgtttttgactaatcgttgctattactaccgtaaaggagtacgatatgaaggcggaagcttaaaatgagatagagatatgacatttcgtaggtgtgctgatgttttttatcgagggattgaaaatcatgcaagcttatctctgac

SEQ ID NO: 30592 - DNA, 928 bp, Zea Mays
gtgactttcagtcctgtggttaaactcgccacaagttgcacagttctcactttggctctctctcaggactggcctattcaccaacttgatgtgaagaatgcctttcttcatgtgtgataaatatcttccactgggaagtgaacggcgaacatatggggattatgatatcaagattacaaagacaagaacagatagccaccatttacagttgcgtgatgtcaaggtgcaaaacatcgagacaggcaaggttcattctgtactccatatagaatatcctgattggcccgaccatggagtggcaactaatacagatgctgtacgggaaatctggaaacgactgcatcacattccaacggaacatcctatagttatccattgcagtgcaggaatcggaaggaccggtacttacatcacaatccatactacaattgagcgaattcttcttggagataaaagctcttacgatcttgccaaaactgtaaagaattttagatcccaacgacctgggatggtccaaacagaagaacaatacaagttctgctacagggcaattgctgacgagctgaaagacctgctaaattcagatcattgaggtgggtcacatgagacggacagcaacgctgttagcatttattacgtttttttagacatttctatgtgaaggaacacttaccctttagaggagtgaattagtcaatctcatttctctttaaactactgagctatgtttgttctagtcaaaatctatgtaataaaaaatctatcatatgtgaagctatgctatgtttttgactaatcgttgctattactaccgtaaaggagtacgatatgaaggcggaagcttaaaatgagatagagatatgacatttcgtaggtgtgctgatgttttttatcgagggattgaaaatcatgcaagcttatctctgac

SEQ ID NO: 30593 - DNA, 1018 bp, Zea Mays
caagcaccacatgcttggtatagtcgatttgcatctcatgtgaagtctccggggtttgttgaagccaaagctgatacttctctgttcacatggcacagaaacagtctacttactttatgttgatgatatcatcttcaccacctccaacatggtcctcttacagcgagtgattgcagctcttcagaaagattttcctatgaagtgtgataaatatcttccactgggaagtgaacggcgaacatatggggattatgatatcaagattacaaagacaagaacagatagccaccatttacagttgcgtgatgtcaaggtgcaaaacatcgagacaggcaaggttcattctgtactccatatagaatatcctgattggcccgaccatggagtggcaactaatacagatgctgtacgggaaatctggaaacgactgcatcacattccaacggaacatcctatagttatccattgcagtgcaggaatcggaaggaccggtacttacatcacaatccatactacaattgagcgaattcttcttggagataaaagctcttacgatcttgccaaaactgtaaagaattttagatcccaacgacctgggatggtccaaacagaagaacaatacaagttctgctacagggcaattgctgacgagctgaaagacctgctaaattcagatcattgaggtgggtcacatgagacggacagcaacgctgttagcatttattacgtttttttagacatttctatgtgaaggaacacttaccctttagaggagtgaattagtcaatctcatttctctttaaactactgagctatgtttgttctagtcaaaatctatgtaataaaaaatctatcatatgtgaagctatgctatgtttttgactaatcgttgctattactaccgtaaaggagtacgatatgaaggcggaagcttaaaatgagatagagatatgacatttcgtaggtgtgctgatgttttttatcgagggattgaaaatcatgcaagcttatctctgac

SEQ ID NO: 30594 - DNA, 905 bp, Zea Mays
atccttcaatatttttcttcatctagctgtattttgacccatttgacacatgatctttattttgctcctcctggcttccaccatcagctgaagtgtgataaatatcttccactgggaagtgaacggcgaacatatggggattatgatatcaagattacaaagacaagaacagatagccaccatttacagttgcgtgatgtcaaggtgcaaaacatcgaggcaaggttcattctgtactccatatagaatatcctgattggcccgaccatggagtggcaactaatacagatgctgtacgggaaatctggaaacgactgcatcacattccaacggaacatcctatagttatccattgcagtgcaggaatcggaaggaccggtacttacatcacaatccatactacaattgagcgaattcttcttggagataaaagctcttacgatcttgccaaaactgtaaagaattttagatcccaacgacctgggatggtccaaacagaagaacaatacaagttctgctacagggcaattgctgacgagctgaaagacctgctaaattcagatcattgaggtgggtcacatgagacggacagcaacgctgttagcatttattacgtttttttagacatttctatgtgaaggaacacttaccctttagaggagtgaattagtcaatctcatttctctttaaactactgagctatgtttgttctagtcaaaatctatgtaataaaaaatctatcatatgtgaagctatgctatgtttttgactaatcgttgctattactaccgtaaaggagtacgatatgaaggcggaagcttaaaatgagatagagatatgacatttcgtaggtgtgctgatgttttttatcgagggattgaaaatcatgcaagcttatctctgac

SEQ ID NO: 30595 - DNA, 848 bp, Zea Mays
cagccaccaaggcatcaattcccccacgacattgtgataaatatcttccactgggaagtgaacggcgaacatatggggattatgatatcaagattacaaagacaagaacagatagccaccatttacagttgcgtgatgtcaaggtgcaaaacatcgagacaggcaaggttcattctgtactccatatagaatatcctgattggcccgaccatggagtggcaactaatacagatgctgtacgggaaatctggaaacgactgcatcacattccaacggaacatcctatagttatccattgcagtgcaggaatcggaaggaccggtacttacatcacaatccatactacaattgagcgaattcttcttggagataaaagctcttacgatcttgccaaaactgtaaagaattttagatcccaacgacctgggatggtccaaacagaagaacaatacaagttctgctacagggcaattgctgacgagctgaaagacctgctaaattcagatcattgaggtgggtcacatgagacggacagcaacgctgttagcatttattacgtttttttagacatttctatgtgaaggaacacttaccctttagaggagtgaattagtcaatctcatttctctttaaactactgagctatgtttgttctagtcaaaatctatgtaataaaaaatctatcatatgtgaagctatgctatgtttttgactaatcgttgctattactaccgtaaaggagtacgatatgaaggcggaagcttaaaatgagatagagatatgacatttcgtaggtgtgctgatgttttttatcgagggattgaaaatcatgcaagcttatctctgac

SEQ ID NO: 30596 - DNA, 1193 bp, Zea Mays
gatccactgctcggctcacgtccggcgtaggcacgtcgtggccacgggtcgtcacagttggtatcaagagcctgggattcctcaaccgggttggatcgtcgactcggcgtcaggaaggcgggaaatttttttccgactcaagttgcaagctttcgccgcggcagcagcgtcttcaaccccgtctcgtcgcggccacgacgagaccaccctcgatcatccgccacggctccaccagatgggtctcaatgccgtggtggccgcttgctacgcccttccagtactcatctctgtgctcacagtccgcttcttctacgtgttgtggcacagtggccaatcagcatcgagaccacgcaacaccagattgcgttgtctcatcatccttggctccggagggcataccgcagaaatgatgaatattgtaacaacgcttcagaaggataggttcacaccaagatattatgtggctgcacttactgacaacatgagtcttcaaaaggcagaggtctatgaacaatcgcttattcagagcgatggaatgaagactgccgagagtgctcatttcatgcagatatatcgtagccgtgaagtaggccaatcttacattacatccatcgcaacaacattgctagccacattgcatgctatgtggctagtaataagaatcagaccacaagtgatattttgcaatggtccagggacatgctttcctctatgcatctcggcgttccttctgaaggtgcttggtttgggatggtgctccattttctacattgaaagcattgcaagagtgaagaagctgtcattgagcggtttactgttgtacaagctacggatagctgaccagttctttgtgcagtggccccagctgcagcataagtatcctcgagcatgctacgcaggtcgtttgatgtgaagattccaccataactaaggggttcagaatacaatgacaatatatgtatacttcgacaaatacaaatgtggctgccttaaaaagaaaggctttacaacaaacaacgcatttcatatatgcgggcatggaaatgctagttaccgatggttttggcaatgttactgtatgtgagtgggcttatcaagttactgcagactgtaaagcttattttgtatgttttgagagagattatctgtttataattgttcctggccccatttgatgattctggtcatcaatt

SEQ ID NO: 30597 - DNA, 1014 bp, Zea Mays
cgatcatccgccacggctccaccagatgggtctcaatgccgtggtggccgcttgctacgcccttccagtactcatctctgtgctcacagtccgcttcttctacgtgttgtggcacagtggccaatcagcatcgagaccacgcaacaccagattgcgttgtctcatcatccttggctccgaaggataggttcacaccaagatattatgtggctgcacttactgacaacatgagtcttcaaaaggcagaggtctatgaacaatcgcttattcagagcgatggaatgaagactgccgagagtgctcatttcatgcagatatatcgtagccgtgaagtaggccaatcttacattacatccatcgcaacaacattgctagccacattgcatgctatgtggctagtaataagaatcagaccacaagtggtgtgtacctagttcaaactatggtagctattcgctgcatgagtttggtactaaagttttgcaatactccttcagatattttgcaatggtccagggacatgctttcctctatgcatctcggcgttccttctgaaggtgcttggtttgggatggtgctccattttctacattgaaagcattgcaagagtgaagaagctgtcattgagcggtttactgttgtacaagctacggatagctgaccagttctttgtgcagtggccccagctgcagcataagtatcctcgagcatgctacgcaggtcgtttgatgtgaagattccaccataactaaggggttcagaatacaatgacaatatatgtatacttcgacaaatacaaatgtggctgccttaaaaagaaaggctttacaacaaacaacgcatttcatatatgcgggcatggaaatgctagttaccgatggttttggcaatgttactgtatgtgagtgggcttatcaagttactgcagactgtaaagcttattttgtatgttttgagagagattatctgtttataattgttcctggccccatttgatgattctggtcatcaatt

SEQ ID NO: 30598 - DNA, 978 bp, Zea Mays
tccccctccccctccccctccgacccatccccgccgagaactccatttcccggctcgcaccgaggccaaggttccctcgtcccttctccaggcggcgcctacgccttcccgccctcctccaagtccaatgcctcgcggccaccggccccgccgcgcccgcgccgcggtggcacgcggcactgtccgccgcggcggggctgtacccggcctacgtcgcagccggcgcctccgtggccttcacgcggcccgaggcgttccggtggttcgtggcgctggcgccggggtcctacaccgctacgctcggcttcatcatgctcgccatgggcctcacgctccagctcagtgacttcgccgccctcctccgcgacaggcccctcgccattttgttcgggtgtgccgcccagtacaccataatgcctgcgtttggcgctatcattagccacgcgctggggcttcccccgtcgctctcagctggcctcatcctgctgggatgctgtcctggaggaactgcatccaatgtggtggttgttgccccaattctattaggttcattgatacaaactgcattcccatcagtagctcaatttctgagtccttttgcacctctgatggcagtcttggcttcatcacttctagcatccagtgtcttctctgagaactttgtgcgcctaagatcgacaattgccgatgcatcccctgtgaatggaatgttctttggggatgtagggactgtcatcttctctgtcttcttgctgcattttgctggtttctttgtcgggtatgcagcagcagctataggtggtttcaaagaaaagcaaaggagagcaatatcgatcgaggatactgaaatagacgaatcaagcaagtcttccagcggacttacactcaaattaatgggcgtaaaatacttgggaggatcgactagctggctaattataaacatcagattatgagttaacaaatcgtgtaaaaagctag

SEQ ID NO: 30599 - DNA, 2425 bp, Zea Mays
tccccctccccctccccctccgacccatccccgccgagaactccatttcccggctcgcaccgaggccaaggttccctcgtcccttctccaggcggcgcctacgccttcccgccctcctccaagtccaatgcctcgcggccaccggccccgccgcgcccgcgccgcggtggcacgcggcactgtccgccgcggcggggctgtacccggcctacgtcgcagccggcgcctccgtggccttcacgcggcccgaggcgttccggtggttcgtggcgctggcgccggggtcctacaccgctacgctcggcttcatcatgctcgccatgggcctcacgctccagctcagtgacttcgccgccctcctccgcgacaggcccctcgccattttgttcgggtgtgccgcccagtacaccataatgcctgcgtttggcgctatcattagccacgcgctggggcttcccccgtcgctctcagctggcctcatcctgctgggatgctgtcctggaggaactgcatccaatgtggtgactttagttgctcaaggcgacgttccattatccgtcgtgatgactgtctgcagcactcttgctgcagtgttccttactcctctgttaacgaaaattcttgctggtgcttatattcctgtggatgccgttaagctctctctcagtactttgcaggtggttgttgccccaattctattaggttcattgatacaaactgcattcccatcagtagctcaatttctgagtccttttgcacctctgatggcagtcttggcttcatcacttctagcatccagtgtcttctctgagaactttgtgcgcctaagatcgacaattgccgatgcatcccctgtgaatggaatgttctttggggatgtagggactgtcatcttctctgtcttcttgctgcattttgctggtttctttgtcgggtatgcagcagcagctataggtggtttcaaagaaaagcaaaggagagcaatatcgatcgaggtaggaatgcagaactcgtccctaggggtagttttagcaaccgcgcatttctcctcgcccttggtcgcgctgcctcctgcagtctcggccgtcgtcatgaacatgatgggtagcacactgggtctcgtatggcaatataccagcacttccgtgtcagagaacgaaaccagtgcgtgatctactcttactgtcgccatgtgcttaatctaatgtgtcgtatctaccaccaccaccactactactacccgaatatacctttcgagtacttttgatcatgttggggaacggggtcgctgatgatgaccctggaatggaaaaaatcttgctgtcttaattactggaggacccaggttacctgtctgaattatgtgggtggtgaatgcccaggctacatatgggtcccttttttcagcactgcaaatagagggaaaacccattttgcatgtgacctggtacattacaatgctgtgctgtgcctgcaaacaaagccccgcgcccactgcttccacctgtatgtgcgtgctcgtgcaatggcatcaggcaaaggtcgcaaggccaagtgccatttgcacccatgcgctcttgtggcagtagtgctaccgactaatgatgatgaccagagctcgcgactgccccacagagagaggtttgccgaaccgcttgatgagattcattcacggaaccacgaggagcaggcaggcagggaaaagcagatctcgccacagctgcaggatcatgatcatcgcctggtgttttcctgggatctaaaccacgctgcttactttttaaagcttttcttcttgcagctcaacggcgacgacctggagcgttcagctttgcctttgaatgaccggcactgtagcacgtccagatcaggtcccgttgttctgaatcctggctagcagcttagcatggtacggtcaaatgaagctgtcatgtgcgcccgtaacgagtcaaagtagatgaacatgtgagtgcaactaaacctgtccgttgagatgaacatgtctacgctacttttgccgaggctgacggcgtctcccgctcctgttcaagtggagattaacaaagttgctcacacacactgatcggggagggatcaaagtagtatatgttcaatctggctggttatttggtctgtgaatcatgtgctgggatttaactagtctctctgtctcccagttgcggttgatcagctccttcctattaatgttccagccacgctgagtcacagctgctggctgaacaccgggcatcatccagtggagttctttttgtggacgaagtcaaagatgacaatgagacgtgattagtgcggacgcacgttctcattgaaaaattaacggctttcactgtcatttcgtatttttattttattcctgtaatggttgcactatgtccttgttgtgtatatatatatattgttggcc

SEQ ID NO: 30600 - DNA, 3468 bp, Zea Mays
tccccctccccctccccctccgacccatccccgccgagaactccatttcccggctcgcaccgaggccaaggttccctcgtcccttctccaggcggcgcctacgccttcccgccctcctccaagtccaatgcctcgcggccaccggccccgccgcgcccgcgccgcggtggcacgcggcactgtccgccgcggcggggctgtacccggcctacgtcgcagccggcgcctccgtggccttcacgcggcccgaggcgttccggtggttcgtggcgctggcgccggggtcctacaccgctacgctcggcttcatcatgctcgccatgggcctcacgctccagctcagtgacttcgccgccctcctccgcgacaggcccctcgccattttgttcgggtgtgccgcccagtacaccataatgcctgcgtttggcgctatcattagccacgcgctggggcttcccccgtcgctctcagctggcctcatcctgctgggatgctgtcctggaggaactgcatccaatgtggtaagactgtcagctgagcccagtttgttacactcccaatttctgttagagaggggaaattttcccccttctcttttatttctatggacaaattaagaatatctatgcaattctgagttcatactcttgtattcgttgaacactgaaattgagatgccaacagtagtagactacttggttttttttctaaaacgtttttttctaaaacgcgcaggagaactgcgcgttaaatatattacgaagatagaagaaacaataagtcaataatggtctaaatagaccagagtacagagtaaaaagcaaaagaaaaacgaccttacggtggccagaaacaaaaatacacataaacatccatatagaagacagccaaaagacatcaacaactgcccctaaactaaggccagatggtgcacagatctttggcacccgccagacaccacctctgagcgccgtctttgatgttctgtataatttggttgccactaggagcatccccctcaaacacacatttattccgctgcttccaaagccaccatgccaacaacatcacaagggagttaatccctttgcgcagcacatgagggaccttgccctccaaattagcccaccaatcttggaaaaccaaatcagcccttgcgggggagaaaatgccgcagattaaccagggagaaaatcctgaaccacacttccctagagaaaacacaagaaatgcactacacgcagaaatgtacacatttgacatataaatttacatgacaatgctccacaggttttgattttaaaaaaaacaaaaaactattgcaattagttaacaattataaacatttctgttttccagtatcatgatccttttttaatcccagatgtattggtagtctattggacacacatggttaagcaacgctatttcttttttgtttttatcatgcattctctattacctaattgtttagtatagtggttcaggtgactttagttgctcaaggcgacgttccattatccgtcgtgatgactgtctgcagcactcttgctgcagtgttccttactcctctgttaacgaaaattcttgctggtgcttatattcctgtggatgccgttaagctctctctcagtactttgcaggtggttgttgccccaattctattaggttcattgatacaaactgcattcccatcagtagctcaatttctgagtccttttgcacctctgatggcagtcttggcttcatcacttctagcatccagtgtcttctctgagaactttgtgcgcctaagatcgacaattgccgatgcatcccctgtgaatggaatgttctttggggatgtagggactgtcatcttctctgtcttcttgctgcattttgctggtttctttgtcgggtatgcagcagcagctataggtggtttcaaagaaaagcaaaggagagcaatatcgatcgaggtaggaatgcagaactcgtccctaggggtagttttagcaaccgcgcatttctcctcgcccttggtcgcgctgcctcctgcagtctcggccgtcgtcatgaacatgatgggtagcacactgggtctcgtatggcaatataccagcacttccgtgtcagagaacgaaaccagtgcgtgatctactcttactgtcgccatgtgcttaatctaatgtgtcgtatctaccaccaccaccactactactacccgaatatacctttcgagtacttttgatcatgttggggaacggggtcgctgatgatgaccctggaatggaaaaaatcttgctgtcttaattactggaggacccaggttacctgtctgaattatgtgggtggtgaatgcccaggctacatatgggtcccttttttcagcactgcaaatagagggaaaacccattttgcatgtgacctggtacattacaatgctgtgctgtgcctgcaaacaaagccccgcgcccactgcttccacctgtatgtgcgtgctcgtgcaatggcatcaggcaaaggtcgcaaggccaagtgccatttgcacccatgcgctcttgtggcagtagtgctaccgactaatgatgatgaccagagctcgcgactgccccacagagagaggtttgccgaaccgcttgatgagattcattcacggaaccacgaggagcaggcaggcagggaaaagcagatctcgccacagctgcaggatcatgatcatcgcctggtgttttcctgggatctaaaccacgctgcttactttttaaaggtctggatctggtcaacagtcaaccgagttgtgggatcatggttgccattttattttatttttttggtttgggccagcttttcttcttgcagctcaacggcgacgacctggagcgttcagctttgcctttgaatgaccggcactgtagcacgtccagatcaggtcccgttgttctgaatcctggctagcagcttagcatggtacggtcaaatgaagctgtcatgtgcgcccgtaacgagtcaaagtagatgaacatgtgagtgcaactaaacctgtccgttgagatgaacatgtctacgctacttttgccgaggctgacggcgtctcccgctcctgttcaagtggagattaacaaagttgctcacacacactgatcggggagggatcaaagtagtatatgttcaatctggctggttatttggtctgtgaatcatgtgctgggatttaactagtctctctgtctcccagttgcggttgatcagctccttcctattaatgttccagccacgctgagtcacagctgctggctgaacaccgggcatcatccagtggagttctttttgtggacgaagtcaaagatgacaatgagacgtgattagtgcggacgcacgttctcattgaaaaattaacggctttcactgtcatttcgtatttttattttattcctgtaatggttgcactatgtccttgttgtgtatatatatatattgttggcc

SEQ ID NO: 30601 - DNA, 2432 bp, Zea Mays
tccccctccccctccccctccgacccatccccgccgagaactccatttcccggctcgcaccgaggccaaggttccctcgtcccttctccaggcggcgcctacgccttcccgccctcctccaagtccaatgcctcgcggccaccggccccgccgcgcccgcgccgcggtggcacgcggcactgtccgccgcggcggggctgtacccggcctacgtcgcagccggcgcctccgtggccttcacgcggcccgaggcgttccggtggttcgtggcgctggcgccggggtcctacaccgctacgctcggcttcatcatgctcgccatgggcctcacgctccagctcagtgacttcgccgccctcctccgcgacaggcccctcgccattttgttcgggtgtgccgcccagtacaccataatgcctgcgtttggcgctatcattagccacgcgctggggcttcccccgtcgctctcagctggcctcatcctgctgggatgctgtcctggaggaactgcatccaatgtgtgttccttactcctctgttaacgaaaattcttgctggtgcttatattcctgtggatgccgttaagctctctctcagtactttgcaggtggttgttgccccaattctattaggttcattgatacaaactgcattcccatcagtagctcaatttctgagtccttttgcacctctgatggcagtcttggcttcatcacttctagcatccagtgtcttctctgagaactttgtgcgcctaagatcgacaattgccgatgcatcccctgtgaatggaatgttctttggggatgtagggactgtcatcttctctgtcttcttgctgcattttgctggtttctttgtcgggtatgcagcagcagctataggtggtttcaaagaaaagcaaaggagagcaatatcgatcgaggtaggaatgcagaactcgtccctaggggtagttttagcaaccgcgcatttctcctcgcccttggtcgcgctgcctcctgcagtctcggccgtcgtcatgaacatgatgggtagcacactgggtctcgtatggcaatataccagcacttccgtgtcagagaacgaaaccagtgcgtgatctactcttactgtcgccatgtgcttaatctaatgtgtcgtatctaccaccaccaccactactactacccgaatatacctttcgagtacttttgatcatgttggggaacggggtcgctgatgatgaccctggaatggaaaaaatcttgctgtcttaattactggaggacccaggttacctgtctgaattatgtgggtggtgaatgcccaggctacatatgggtcccttttttcagcactgcaaatagagggaaaacccattttgcatgtgacctggtacattacaatgctgtgctgtgcctgcaaacaaagccccgcgcccactgcttccacctgtatgtgcgtgctcgtgcaatggcatcaggcaaaggtcgcaaggccaagtgccatttgcacccatgcgctcttgtggcagtagtgctaccgactaatgatgatgaccagagctcgcgactgccccacagagagaggtttgccgaaccgcttgatgagattcattcacggaaccacgaggagcaggcaggcagggaaaagcagatctcgccacagctgcaggatcatgatcatcgcctggtgttttcctgggatctaaaccacgctgcttactttttaaaggtctggatctggtcaacagtcaaccgagttgtgggatcatggttgccattttattttatttttttggtttgggccagcttttcttcttgcagctcaacggcgacgacctggagcgttcagctttgcctttgaatgaccggcactgtagcacgtccagatcaggtcccgttgttctgaatcctggctagcagcttagcatggtacggtcaaatgaagctgtcatgtgcgcccgtaacgagtcaaagtagatgaacatgtgagtgcaactaaacctgtccgttgagatgaacatgtctacgctacttttgccgaggctgacggcgtctcccgctcctgttcaagtggagattaacaaagttgctcacacacactgatcggggagggatcaaagtagtatatgttcaatctggctggttatttggtctgtgaatcatgtgctgggatttaactagtctctctgtctcccagttgcggttgatcagctccttcctattaatgttccagccacgctgagtcacagctgctggctgaacaccgggcatcatccagtggagttctttttgtggacgaagtcaaagatgacaatgagacgtgattagtgcggacgcacgttctcattgaaaaattaacggctttcactgtcatttcgtatttttattttattcctgtaatggttgcactatgtccttgttgtgtatatatatatattgttggcc

SEQ ID NO: 30602 - DNA, 2346 bp, Zea Mays
tccccctccccctccccctccgacccatccccgccgagaactccatttcccggctcgcaccgaggccaaggttccctcgtcccttctccaggcggcgcctacgccttcccgccctcctccaagtccaatgcctcgcggccaccggccccgccgcgcccgcgccgcggtggcacgcggcactgtccgccgcggcggggctgtacccggcctacgtcgcagccggcgcctccgtggccttcacgcggcccgaggcgttccggtggttcgtggcgctggcgccggggtcctacaccgctacgctcggcttcatcatgctcgccatgggcctcacgctccagctcagtgacttcgccgccctcctccgcgacaggcccctcgccattttgttcgggtgtgccgcccagtacaccataatgcctgcgtttggcgctatcattagccacgcgctggggcttcccccgtcgctctcagctggcctcatcctgctgggatgctgtcctggaggaactgcatccaatgtggtggttgttgccccaattctattaggttcattgatacaaactgcattcccatcagtagctcaatttctgagtccttttgcacctctgatggcagtcttggcttcatcacttctagcatccagtgtcttctctgagaactttgtgcgcctaagatcgacaattgccgatgcatcccctgtgaatggaatgttctttggggatgtagggactgtcatcttctctgtcttcttgctgcattttgctggtttctttgtcgggtatgcagcagcagctataggtggtttcaaagaaaagcaaaggagagcaatatcgatcgaggtaggaatgcagaactcgtccctaggggtagttttagcaaccgcgcatttctcctcgcccttggtcgcgctgcctcctgcagtctcggccgtcgtcatgaacatgatgggtagcacactgggtctcgtatggcaatataccagcacttccgtgtcagagaacgaaaccagtgcgtgatctactcttactgtcgccatgtgcttaatctaatgtgtcgtatctaccaccaccaccactactactacccgaatatacctttcgagtacttttgatcatgttggggaacggggtcgctgatgatgaccctggaatggaaaaaatcttgctgtcttaattactggaggacccaggttacctgtctgaattatgtgggtggtgaatgcccaggctacatatgggtcccttttttcagcactgcaaatagagggaaaacccattttgcatgtgacctggtacattacaatgctgtgctgtgcctgcaaacaaagccccgcgcccactgcttccacctgtatgtgcgtgctcgtgcaatggcatcaggcaaaggtcgcaaggccaagtgccatttgcacccatgcgctcttgtggcagtagtgctaccgactaatgatgatgaccagagctcgcgactgccccacagagagaggtttgccgaaccgcttgatgagattcattcacggaaccacgaggagcaggcaggcagggaaaagcagatctcgccacagctgcaggatcatgatcatcgcctggtgttttcctgggatctaaaccacgctgcttactttttaaaggtctggatctggtcaacagtcaaccgagttgtgggatcatggttgccattttattttatttttttggtttgggccagcttttcttcttgcagctcaacggcgacgacctggagcgttcagctttgcctttgaatgaccggcactgtagcacgtccagatcaggtcccgttgttctgaatcctggctagcagcttagcatggtacggtcaaatgaagctgtcatgtgcgcccgtaacgagtcaaagtagatgaacatgtgagtgcaactaaacctgtccgttgagatgaacatgtctacgctacttttgccgaggctgacggcgtctcccgctcctgttcaagtggagattaacaaagttgctcacacacactgatcggggagggatcaaagtagtatatgttcaatctggctggttatttggtctgtgaatcatgtgctgggatttaactagtctctctgtctcccagttgcggttgatcagctccttcctattaatgttccagccacgctgagtcacagctgctggctgaacaccgggcatcatccagtggagttctttttgtggacgaagtcaaagatgacaatgagacgtgattagtgcggacgcacgttctcattgaaaaattaacggctttcactgtcatttcgtatttttattttattcctgtaatggttgcactatgtccttgttgtgtatatatatatattgttggcc

SEQ ID NO: 30603 - DNA, 2213 bp, Zea Mays
tccccctccccctccccctccgacccatccccgccgagaactccatttcccggctcgcaccgaggccaaggttccctcgtcccttctccaggcggcgcctacgccttcccgccctcctccaagtccaatgcctcgcggccaccggccccgccgcgcccgcgccgcggtggcacgcggcactgtccgccgcggcggggctgtacccggcctacgtcgcagccggcgcctccgtggccttcacgcggcccgaggcgttccggtggttcgtggcgctggcgccggggtcctacaccgctacgctcggcttcatcatgctcgccatgggcctcacgctccagctcagtgacttcgccgccctcctccgcgacaggcccctcgccattttgttcgggtgtgccgcccagtacaccataatgcctgcgtttggcgctatcattagccacgcgctggggcttcccccgtcgctctcagctggcctcatcctgctgggatgctgtcctggaggaactgcatccaatgtggtgactttagttgctcaaggcgacgttccattatccgtcgtgatgactgtctgcagcactcttgctgcagtgttccttactcctctgttaacgaaaattcttgctggtgcttatattcctgtggatgccgttaagctctctctcagtactttgcaggtggttgttgccccaattctattaggttcattgatacaaactgcattcccatcagtagctcaatttctgagtccttttgcacctctgatggcagtcttggcttcatcacttctagcatccagtgtcttctctgagaactttgtgcgcctaagatcgacaattgccgatgcatcccctgtgaatggaatgttctttggggatgtagggactgtcatcttctctgtcttcttgctgcattttgctggtttctttgtcgggtatgcagcagcagctataggtggtttcaaagaaaagcaaaggagagcaatatcgatcgaggtaggaatgcagaactcgtccctaggggtagttttagcaaccgcgcatttctcctcgcccttggtcgcgctgcctcctgcagtctcggccgtcgtcatgaacatgatgggtagcacactgggtctcgtatggcaatataccagcacttccgtgtcagagaacgaaaccagtgcgtgatctactcttactgtcgccatgtgcttaatctaatgtgtcgtatctaccaccaccaccactactactacccgaatatacctttcgagtacttttgatcatgttggggaacggggtcgctgatgatgaccctggaatggaaaaaatcttgctgtcttaattactggaggacccaggttacctgtctgaattatgtgggtggtgaatgcccaggctacatatgggtcccttttttcagcactgcaaatagagggaaaacccattttgcatgtgacctggtacattacaatgctgtgctgtgcctgcaaacaaagccccgcgcccactgcttccacctgtatgtgcgtgctcgtgcaatggcatcaggcaaaggtcgcaaggccaagtgccatttgcacccatgcgctcttgtggcagtagtgctaccgactaatgatgatgaccagagctcgcgactgccccacagagagaggtttgccgaaccgcttgatgagattcattcacggaaccacgaggagcaggcaggcagggaaaagcagatctcgccacagctgcaggatcatgatcatcgcctggtgttttcctgggatctaaaccacgctgcttactttttaaagcttttcttcttgcagctcaacggcgacgacctggagcgttcagctttgcctttgaatgaccggcactgtagcacgtccagatcaggtcccgttgttctgaatcctggctagcagcttagcatggtacggtcaaatgaagctgtcatgtgcgcccgtaacgagtcaaagtagatgaacatttgcggttgatcagctccttcctattaatgttccagccacgctgagtcacagctgctggctgaacaccgggcatcatccagtggagttctttttgtggacgaagtcaaagatgacaatgagacgtgattagtgcggacgcacgttctcattgaaaaattaacggctttcactgtcatttcgtatttttattttattcctgtaatggttgcactatgtccttgttgtgtatatatatatattgttggcc

SEQ ID NO: 30604 - DNA, 2510 bp, Zea Mays
tccccctccccctccccctccgacccatccccgccgagaactccatttcccggctcgcaccgaggccaaggttccctcgtcccttctccaggcggcgcctacgccttcccgccctcctccaagtccaatgcctcgcggccaccggccccgccgcgcccgcgccgcggtggcacgcggcactgtccgccgcggcggggctgtacccggcctacgtcgcagccggcgcctccgtggccttcacgcggcccgaggcgttccggtggttcgtggcgctggcgccggggtcctacaccgctacgctcggcttcatcatgctcgccatgggcctcacgctccagctcagtgacttcgccgccctcctccgcgacaggcccctcgccattttgttcgggtgtgccgcccagtacaccataatgcctgcgtttggcgctatcattagccacgcgctggggcttcccccgtcgctctcagctggcctcatcctgctgggatgctgtcctggaggaactgcatccaatgtgtggttcaggtgactttagttgctcaaggcgacgttccattatccgtcgtgatgactgtctgcagcactcttgctgcagtgttccttactcctctgttaacgaaaattcttgctggtgcttatattcctgtggatgccgttaagctctctctcagtactttgcaggtggttgttgccccaattctattaggttcattgatacaaactgcattcccatcagtagctcaatttctgagtccttttgcacctctgatggcagtcttggcttcatcacttctagcatccagtgtcttctctgagaactttgtgcgcctaagatcgacaattgccgatgcatcccctgtgaatggaatgttctttggggatgtagggactgtcatcttctctgtcttcttgctgcattttgctggtttctttgtcgggtatgcagcagcagctataggtggtttcaaagaaaagcaaaggagagcaatatcgatcgaggtaggaatgcagaactcgtccctaggggtagttttagcaaccgcgcatttctcctcgcccttggtcgcgctgcctcctgcagtctcggccgtcgtcatgaacatgatgggtagcacactgggtctcgtatggcaatataccagcacttccgtgtcagagaacgaaaccagtgcgtgatctactcttactgtcgccatgtgcttaatctaatgtgtcgtatctaccaccaccaccactactactacccgaatatacctttcgagtacttttgatcatgttggggaacggggtcgctgatgatgaccctggaatggaaaaaatcttgctgtcttaattactggaggacccaggttacctgtctgaattatgtgggtggtgaatgcccaggctacatatgggtcccttttttcagcactgcaaatagagggaaaacccattttgcatgtgacctggtacattacaatgctgtgctgtgcctgcaaacaaagccccgcgcccactgcttccacctgtatgtgcgtgctcgtgcaatggcatcaggcaaaggtcgcaaggccaagtgccatttgcacccatgcgctcttgtggcagtagtgctaccgactaatgatgatgaccagagctcgcgactgccccacagagagaggtttgccgaaccgcttgatgagattcattcacggaaccacgaggagcaggcaggcagggaaaagcagatctcgccacagctgcaggatcatgatcatcgcctggtgttttcctgggatctaaaccacgctgcttactttttaaaggtctggatctggtcaacagtcaaccgagttgtgggatcatggttgccattttattttatttttttggtttgggccagcttttcttcttgcagctcaacggcgacgacctggagcgttcagctttgcctttgaatgaccggcactgtagcacgtccagatcaggtcccgttgttctgaatcctggctagcagcttagcatggtacggtcaaatgaagctgtcatgtgcgcccgtaacgagtcaaagtagatgaacatgtgagtgcaactaaacctgtccgttgagatgaacatgtctacgctacttttgccgaggctgacggcgtctcccgctcctgttcaagtggagattaacaaagttgctcacacacactgatcggggagggatcaaagtagtatatgttcaatctggctggttatttggtctgtgaatcatgtgctgggatttaactagtctctctgtctcccagttgcggttgatcagctccttcctattaatgttccagccacgctgagtcacagctgctggctgaacaccgggcatcatccagtggagttctttttgtggacgaagtcaaagatgacaatgagacgtgattagtgcggacgcacgttctcattgaaaaattaacggctttcactgtcatttcgtatttttattttattcctgtaatggttgcactatgtccttgttgtgtatatatatatattgttggcc

SEQ ID NO: 30605 - DNA, 2521 bp, Zea Mays
tccccctccccctccccctccgacccatccccgccgagaactccatttcccggctcgcaccgaggccaaggttccctcgtcccttctccaggcggcgcctacgccttcccgccctcctccaagtccaatgcctcgcggccaccggccccgccgcgcccgcgccgcggtggcacgcggcactgtccgccgcggcggggctgtacccggcctacgtcgcagccggcgcctccgtggccttcacgcggcccgaggcgttccggtggttcgtggcgctggcgccggggtcctacaccgctacgctcggcttcatcatgctcgccatgggcctcacgctccagctcagtgacttcgccgccctcctccgcgacaggcccctcgccattttgttcgggtgtgccgcccagtacaccataatgcctgcgtttggcgctatcattagccacgcgctggggcttcccccgtcgctctcagctggcctcatcctgctgggatgctgtcctggaggaactgcatccaatgtggtgactttagttgctcaaggcgacgttccattatccgtcgtgatgactgtctgcagcactcttgctgcagtgttccttactcctctgttaacgaaaattcttgctggtgcttatattcctgtggatgccgttaagctctctctcagtactttgcaggtggttgttgccccaattctattaggttcattgatacaaactgcattcccatcagtagctcaatttctgagtccttttgcacctctgatggcagtcttggcttcatcacttctagcatccagtgtcttctctgagaactttgtgcgcctaagatcgacaattgccgatgcatcccctgtgaatggaatgttctttggggatgtagggactgtcatcttctctgtcttcttgctgcattttgctggtttctttgtcgggtatgcagcagcagctataggtggtttcaaagaaaagcaaaggagagcaatatcgatcgaggtaggaatgcagaactcgtccctaggggtagttttagcaaccgcgcatttctcctcgcccttggtcgcgctgcctcctgcagtctcggccgtcgtcatgaacatgatgggtagcacactgggtctcgtatggcaatataccagcacttccgtgtcagagaacgaaaccagtgataaattttctgacgttgttgggagcccctattatgttgcccctgaggtgcttcaaaaatgttatggcccagaatctgatgtatggagtgctggagtgattttgtacattttgctatgtggtgtacccccattttgggcagagagtgaagcagggatcttcaggcagattttgcgaggcaaacttgatttggaatctgaaccatggccaagtatctctgatagtgctaaggatttagtccgtaagatgcttatccgcgatcctacaaagaggttcactgctcatgaggttttatgtcatccatggattgttgatgatgctgtcgcacctgataagcctattgattctgctgttttgtcaaggctgaaaaacttttctgcaatgaacaagctcaagaagatggcattgagggtgattgctgaaagtctatctgaggaggagattgggggtttgaaggagttgttcaaaatgatcgatactgacaacagcgggacgataacttatgatgaactgaaggatggtctgaaaagggttggctcggacctgatggaacctgaaatccaggctttaatggatgcagctgatatcgacaacagcggaaccattgactatggagagttcttggcggctacgttgcacatgaataaactggagagggaggaaagcttggtgtcggcgtttgcgttcttcgataaggacgggagtggcttcataacgatcgacgagctctcacaagcatgcgaacagttcggtctttctgatgtccatctcgaggatatgatcaaagatgtggaccaaaacaatgacggtcagattgattatagtgagtttgccgcgatgatgagaaagggcaatgctggcggagcaggacggcggaccatgaggaacagcttgcatgtgaatcttggcgagctcctgaagcccaccgagacctagttttttttaaccagaggatcctgcttcccagatgcgccccatctgaaacttaccgtgtgcctcatccgctttcacagatcgattagttgatctctagtagcagcgccaaaagcagtttaagattttctcagtggtactagtagtgaggggaaaatagcatcctgtggtgccagtgagagattttaggcgctgaagacgacgtgctatgctactccggagtcctgttgtcttcttcttcttcttgttgttgttgatttcaggtttgtactattactgatctttgttgtaaaatgcgctgttgtcccatgaggtaggcacctaggtctcctccatttgaattatatcaaacggatttgtaaacacgttctcatgcatgaaaccatttcttaatgatgatttattgtgtgcttttttccccc

SEQ ID NO: 30606 - DNA, 1910 bp, Zea Mays
caaataatagaattaaaattacatctcattttaatatcatgactgatttaatattgaatccaattcaattctatatcttctaatattgacatccaaaagtaggagtgtataactgtatatatttgattaaacagatccagtaagtgagtggcaagagatacttggataataaagggaggaaaacaaattaaattataataaaacaactagaaagggaagtttccgaccacgtcgtcttcctcctgtctccccctctcctccgccactaaccaaggaggcgaagacgataaccaccgacgtgccttcctccccacatgccctagcgatccgttctcatttgcagacccaatccaagcccagagcaatcaccaagcctggcagattagatttccaccctcacatggaggaaaaatccaaccttcgcatgtgacctctatttaaatccccgcaagaatcgatcaatcaatccaaaagggtgcaggaaaacagagcaatcccgttgcttagcgtgttcgccttgccgttggcgtctcttctccgttcctcggcacgcgtgataaattttctgacgttgttgggagcccctattatgttgcccctgaggtgcttcaaaaatgttatggcccagaatctgatgtatggagtgctggagtgattttgtacattttgctatgtggtgtacccccattttgggcagagagtgaagcagggatcttcaggcagattttgcgaggcaaacttgatttggaatctgaaccatggccaagtatctctgatagtgctaaggatttagtccgtaagatgcttatccgcgatcctacaaagaggttcactgctcatgaggttttatgtcatccatggattgttgatgatgctgtcgcacctgataagcctattgattctgctgttttgtcaaggctgaaaaacttttctgcaatgaacaagctcaagaagatggcattgagggtgattgctgaaagtctatctgaggaggagattgggggtttgaaggagttgttcaaaatgatcgatactgacaacagcgggacgataacttatgatgaactgaaggatggtctgaaaagggttggctcggacctgatggaacctgaaatccaggctttaatggatgcagctgatatcgacaacagcggaaccattgactatggagagttcttggcggctacgttgcacatgaataaactggagagggaggaaagcttggtgtcggcgtttgcgttcttcgataaggacgggagtggcttcataacgatcgacgagctctcacaagcatgcgaacagttcggtctttctgatgtccatctcgaggatatgatcaaagatgtggaccaaaacaatgacggtcagattgattatagtgagtttgccgcgatgatgagaaagggcaatgctggcggagcaggacggcggaccatgaggaacagcttgcatgtgaatcttggcgagctcctgaagcccaccgagacctagttttttttaaccagaggatcctgcttcccagatgcgccccatctgaaacttaccgtgtgcctcatccgctttcacagatcgattagttgatctctagtagcagcgccaaaagcagtttaagattttctcagtggtactagtagtgaggggaaaatagcatcctgtggtgccagtgagagattttaggcgctgaagacgacgtgctatgctactccggagtcctgttgtcttcttcttcttcttgttgttgttgatttcaggtttgtactattactgatctttgttgtaaaatgcgctgttgtcccatgaggtaggcacctaggtctcctccatttgaattatatcaaacggatttgtaaacacgttctcatgcatgaaaccatttcttaatgatgatttattgtgtgcttttttccccc

SEQ ID NO: 30607 - DNA, 3108 bp, Zea Mays
cccatctcgctaactccagtactccaccgctgatattattgcccgtgccgccgtgtgcgctccagtttccactgtgctccttctcgccgactccgccatgaccgcctcgccctacccgacgacgccgtggctgcggccaccgcctcctatggcatttctgagtctcctcctcctccttggctgcctctccccgtcgatctcactggcgggtgcggaggcggcgggggttctgagacaagtggttggtggggacgacggcgggacattcttcgagccgttcaacgtgacctacgaccaccgcgcgcttatccttggcgggaagcgcaggatgctcgtctctgcggggctccactacccgcgtgccacgcccgagatgtggccgagtttgattgcaaagtgcaaggagggcggcgtggatgcaattgagacatatgtgttttggaatgggcatgagccggccaaaggccagtggtttcccagtttggttgcgcgatgtccctgggatagaattccgcactgacaatgaaccctacaaggctgaaatgcagatttttgtgacaaaaattgtagatatcatgaaagaggagaagctttattcttggcaaggtggtcccattatactgcagcagattgaaaatgaatacggtaacattcaaggccattatggtcaagcagggaagagatacatgctatgggcagctcagatggcacttgcacttgatactggtgttccttgggtaatgtgtaggcaaacagatgctccagaacaaattctcaatacttgcaatgccttttactgtgatgggttcaaaccaaattcctacaacaagccaacaatatggactgaggattgggatggatgtattttggtggaaccaattttgagcggacagctggtggtccacttcagataactagctatgattatgatgcaccaattgacgaatacggtatcttaagacaacctaagtgggggcatttgaaagacctacatgcagctattaaactttgtgaatcagctcttactgcagtagatggttcacctcattatgtaaaattagggcccatgcaggaggcacatgtgtattccagtgaaaatgtccacacaaatggaagcatttcaggaaattcacagttttgctcagcttttcttgccaacattgatgaacataaatatgcttcagtctggatttttggaaaatcttatagtctaccaccatggtctgtgagcatactaccagactgtgaaactgtggcttttaatacagccagggttggtacacaaacatcgtttttcaatgtcgaatctgggtcccccagctattcaagtaggcataaacctagaattctatcccttattggtgtcccctatctctcaactacttggtggacttttaaagaacctgttggcatttggggtgaaggcatctttactgctcaggggatattagagcacttaaacgtgacaaaagacatctctgactacctttcatatactaccagggtgaacatttctgaagaggatgttttatattggaattccaaaggttttcttccatcactaaccatagatcaaatccgcgatgtagcacgtgtatttgtaaatgggaagcttgcaggtagtaaagttggtcattgggtctcactgaatcaaccgcttcaattagttcaaggacttaatgagttgacattgttatcggagattgttggcttgcagaactatggtgctttcttggagaaggatggtgctggatttagaggtcaagtaaaactcactggcttgtcgaatggggatatcgaccttactaattctctttggacatatcagattggtttgaaaggtgagttttcaaggatctattctcctgagtatcaaggatctgctgagtggagtagcatgcagaatgatgacacagtttcacccttcacatggttcaagactatgtttgatgctccagaaggtaatggccctgttaccattgatcttgggagcatgggaaagggccaggcttgggtgaatgggcatctcattgggcgctattggtcactagttgcgccagagtccgggtgtccatcgtcatgcaactacgcaggaacatacagtgatagcaagtgccgatcgaactgtggaatcgctacacaaagctggtaccacataccacgcgaatggttgcaagagtcaggcaatctattggtactcttcgaggaaacagggggagacccatctcagatatcgctggaggttcattacaccaagacaatctgctcaaaaatatctgagacttactatcctcccctttctgcctggtcacgtgccgccaacggtcgcccctcagtaaatacggtagcaccagagcttcgcttgcagtgcgatgacgggcatgtgatctcgaagattacatttgcgagttacgggacccctacaggaggttgccagaacttctctgtagggaattgccatgcatcgactactctagacttggtggtagaggcctgcgaaggcaagaacagatgcgcgatcagtgttaccaacgaagtattcggagatccatgccgcaaagtcgtcaaggatttggcagttgaagccgagtgctccccgccatcggttaaccaagaacctcgatacgatatatgatcacggtactgtattgtggtgctcaggtcttggtggacgttgccgcagctttgcagggccgtgcacaatggtcctgcatcgttgtctcctatacctctgcacccatattatatgtaaacagtgacctacatgtaaatctaaagaagaggagggattgaaaagaaatgagatggaaaaggaataaagttgcttttattacaaatggtcattcctgtgaaccgtctggcttactcctgtaagggccattcctttggacttcggtctacttttgtttccctgttgacacttcttccacctgtaggcggtcgaccaaccgctggtggtggtgatgcccttttgattgagcccatgtgcattctcctggctcggcgtggacagaggaaaggaaaaaatttattccgaattattgccatagtttcgtttctaaaatgggacaccttaaccttttaactcttgaacccattcaaattatc

SEQ ID NO: 30608 - DNA, 3263 bp, Zea Mays
ctaactccagtactccaccgctgatattattgcccgtgccgccgtgtgcgctccagtttccactgtgctccttctcgccgactccgccatgaccgcctcgccctacccgacgacgccgtggctgcggccaccgcctcctatggcatttctgagtctcctcctcctccttggctgcctctccccgtcgatctcactggcgggtgcggaggcggcgggggttctgagacaagtggttggtggggacgacggcgggacattcttcgagccgttcaacgtgacctacgaccaccgcgcgcttatccttggcgggaagcgcaggatgctcgtctctgcggggctccactacccgcgtgccacgcccgagatgtggccgagtttgattgcaaagtgcaaggagggcggcgtggatgcaattgagacatatgtgttttggaatgggcatgagccggccaaaggccagtattacttcgaaggaagatttgatattgtcaggtttgctaagctggttgcagctgaagtggtttcccagtttggttgcgcgatgtccctgggatagaattccgcactgacaatgaaccctacaaggctgaaatgcagatttttgtgacaaaaattgtagatatcatgaaagaggagaagctttattcttggcaaggtggtcccattatactgcagcagattgaaaatgaatacggtaacattcaaggccattatggtcaagcagggaagagatacatgctatgggcagctcagatggcacttgcacttgatactggtgttccttgggtaatgtgtaggcaaacagatgctccagaacaaattctcaatacttgcaatgccttttactgtgatgggttcaaaccaaattcctacaacaagccaacaatatggactgaggattgggatggatggtatgccgactggggcgaatcattgccacataggcctgctcaagacagtgcttttgctgttgctcgtttttatcaacgtggtggaagcttacaaaattattacatgtattttggtggaaccaattttgagcggacagctggtggtccacttcagataactagctatgattatgatgcaccaattgacgaatacggtatcttaagacaacctaagtgggggcatttgaaagacctacatgcagctattaaactttgtgaatcagctcttactgcagtagatggttcacctcattatgtaaaattagggcccatgcaggaggcacatgtgtattccagtgaaaatgtccacacaaatggaagcatttcaggaaattcacagttttgctcagcttttcttgccaacattgatgaacataaatatgcttcagtctggatttttggaaaatcttatagtctaccaccatggtctgtgagcatactaccagactgtgaaactgtggcttttaatacagccagggttggtacacaaacatcgtttttcaatgtcgaatctgggtcccccagctattcaagtaggcataaacctagaattctatcccttattggtgtcccctatctctcaactacttggtggacttttaaagaacctgttggcatttggggtgaaggcatctttactgctcaggggatattagagcacttaaacgtgacaaaagacatctctgactacctttcatatactaccagggtgaacatttctgaagaggatgttttatattggaattccaaaggttttcttccatcactaaccatagatcaaatccgcgatgtagcacgtgtatttgtaaatgggaagcttgcaggtagtaaagttggtcattgggtctcactgaatcaaccgcttcaattagttcaaggacttaatgagttgacattgttatcggagattgttggcttgcagaactatggtgctttcttggagaaggatggtgctggatttagaggtcaagtaaaactcactggcttgtcgaatggggatatcgaccttactaattctctttggacatatcagattggtttgaaaggtgagttttcaaggatctattctcctgagtatcaaggatctgctgagtggagtagcatgcagaatgatgacacagtttcacccttcacatggttcaagactatgtttgatgctccagaaggtaatggccctgttaccattgatcttgggagcatgggaaagggccaggcttgggtgaatgggcatctcattgggcgctattggtcactagttgcgccagagtccgggtgtccatcgtcatgcaactacgcaggaacatacagtgatagcaagtgccgatcgaactgtggaatcgctacacaaagctggtaccacataccacgcgaatggttgcaagagtcaggcaatctattggtactcttcgaggaaacagggggagacccatctcagatatcgctggaggttcattacaccaagacaatctgctcaaaaatatctgagacttactatcctcccctttctgcctggtcacgtgccgccaacggtcgcccctcagtaaatacggtagcaccagagcttcgcttgcagtgcgatgacgggcatgtgatctcgaagattacatttgcgagttacgggacccctacaggaggttgccagaacttctctgtagggaattgccatgcatcgactactctagacttggtggtagaggcctgcgaaggcaagaacagatgcgcgatcagtgttaccaacgaagtattcggagatccatgccgcaaagtcgtcaaggatttggcagttgaagccgagtgctccccgccatcggttaaccaagaacctcgatacgatatatgatcacggtactgtattgtggtgctcaggtcttggtggacgttgccgcagctttgcagggccgtgcacaatggtcctgcatcgttgtctcctatacctctgcacccatattatatgtaaacagtgacctacatgtaaatctaaagaagaggagggattgaaaagaaatgagatggaaaaggaataaagttgcttttattacaaatggtcattcctgtgaaccgtctggcttactcctgtaagggccattcctttggacttcggtctacttttgtttccctgttgacacttcttccacctgtaggcggtcgaccaaccgctggtggtggtgatgcccttttgattgagcccatgtgcattctcctggctcggcgtggacagaggaaaggaaaaaatttattccgaattattgccatagtttcgtttctaaaatgggacaccttaaccttttaactcttgaacccattcaaattatc

SEQ ID NO: 30609 - DNA, 3140 bp, Zea Mays
gatattattgcccgtgccgccgtgtgcgctccagtttccactgtgctccttctcgccgactccgccatgaccgcctcgccctacccgacgacgccgtggctgcggccaccgcctcctatggcatttctgagtctcctcctcctccttggctgcctctccccgtcgatctcactggcgggtgcggaggcggcgggggttctgagacaagtggttggtggggacgacggcgggacattcttcgagccgttcaacgtgacctacgaccaccgcgcgcttatccttggcgggaagcgcaggatgctcgtctctgcggggctccactacccgcgtgccacgcccgagatgtggccgagtttgattgcaaagtgcaaggagggcggcgtggatgcaattgagacatatgtgttttggaatgggcatgagccggccaaaggccagtattacttcgaaggaagatttgatattgtcaggtttgctaagctggttgcagctgaaggtctatttctttttctgcgaatcggcccatatgcttgtgctgaatggaatttcggtggtttcccagtttggttgcgcgatgtccctgggatagaattccgcactgacaatgaaccctacaaggctgaaatgcagatttttgtgacaaaaattgtagatatcatgaaagaggagaagctttattcttggcaaggtggtcccattatactgcagcagattgaaaatgaatacggtaacattcaaggccattatggtcaagcagggaagagatacatgctatgggcagctcagatggcacttgcacttgatactggtgttccttgggtaatgtgtaggcaaacagatgctccagaacaaattctcaatacttgcaatgccttttactgtgatgggttcaaaccaaattcctacaacaagccaacaatatggactgaggattgggatggatggtatgccgactggggcgaatcattgccacataggcctgctcaagacagtgcttttgctgttgctcgtttttatcaacgtggtggaagcttacaaaattattacatgtattttggtggaaccaattttgagcggacagctggtggtccacttcagataactagctatgattatgatgcaccaattgacgaatacggtatcttaagacaacctaagtgggggcatttgaaagacctacatgcagctattaaactttgtgaatcagctcttactgcagtagatggttcacctcattatgtaaaattagggcccatgcaggaggcacatgtgtattccagtgaaaatgtccacacaaatggaagcatttcaggaaattcacagttttgctcagcttttcttgccaacattgatgaacataaatatgcttcagtctggatttttggaaaatcttatagtctaccaccatggtctgtgagcatactaccagactgtgaaactgtggcttttaatacagccagggttggtacacaaacatcgtttttcaatgtcgaatctgggtcccccagctattcaagtaggcataaacctagaattctatcccttattggtgtcccctatctctcaactacttggtggacttttaaagaacctgttggcatttggggtgaaggcatctttactgctcaggggatattagagcacttaaacgtgacaaaagacatctctgactacctttcatatactaccagggtgaacatttctgaagaggatgttttatattggaattccaaaggttttcttccatcactaaccatagatcaaatccgcgatgtagcacgtgtatttgtaaatgggaagcttgcaggtagtaaagttggtcattgggtctcactgaatcaaccgcttcaattagttcaaggacttaatgagttgacattgttatcggagattgttggcttgcagaactatggtgctttcttggagaaggatggtgctggatttagaggtcaagtaaaactcactggcttgtcgaatggggatatcgaccttactaattctctttggacatatcagattggtttgaaaggtgagttttcaaggatctattctcctgagtatcaaggatctgctgagtggagtagcatgcagaatgatgacacagtttcacccttcacatggttcaagactatgtttgatgctccagaagttgcgccagagtccgggtgtccatcgtcatgcaactacgcaggaacatacagtgatagcaagtgccgatcgaactgtggaatcgctacacaaagctggtaccacataccacgcgaatggttgcaagagtcaggcaatctattggtactcttcgaggaaacagggggagacccatctcagatatcgctggaggttcattacaccaagacaatctgctcaaaaatatctgagacttactatcctcccctttctgcctggtcacgtgccgccaacggtcgcccctcagtaaatacggtagcaccagagcttcgcttgcagtgcgatgacgggcatgtgatctcgaagattacatttgcgagttacgggacccctacaggaggttgccagaacttctctgtagggaattgccatgcatcgactactctagacttggtggtagaggcctgcgaaggcaagaacagatgcgcgatcagtgttaccaacgaagtattcggagatccatgccgcaaagtcgtcaaggatttggcagttgaagccgagtgctccccgccatcggttaaccaagaacctcgatacgatatatgatcacggtactgtattgtggtgctcaggtcttggtggacgttgccgcagctttgcagggccgtgcacaatggtcctgcatcgttgtctcctatacctctgcacccatattatatgtaaacagtgacctacatgtaaatctaaagaagaggagggattgaaaagaaatgagatggaaaaggaataaagttgcttttattacaaatggtcattcctgtgaaccgtctggcttactcctgcggtcgaccaaccgctggtggtggtgatgcccttttgattgagcccatgtgcattctcctggctcggcgtggacagaggaaaggaaaaaatttattccgaattattgccatagtttcgtttctaaaatgggacaccttaaccttttaactcttgaacccattcaaattatc

SEQ ID NO: 30610 - DNA, 3187 bp, Zea Mays
attattgcccgtgccgccgtgtgcgctccagtttccactgtgctccttctcgccgactccgccatgaccgcctcgccctacccgacgacgccgtggctgcggccaccgcctcctatggcatttctgagtctcctcctcctccttggctgcctctccccgtcgatctcactggcgggtgcggaggcggcgggggttctgagacaagtggttggtggggacgacggcgggacattcttcgagccgttcaacgtgacctacgaccaccgcgcgcttatccttggcgggaagcgcaggatgctcgtctctgcggggctccactacccgcgtgccacgcccgagatgtggccgagtttgattgcaaagtgcaaggagggcggcgtggatgcaattgagacatatgtgttttggaatgggcatgagccggccaaaggccagtattacttcgaaggaagatttgatattgtcaggtttgctaagctggttgcagctgaaggtctatttctttttctgcgaatcggcccatatgcttgtgctgaatggaatttcggtggtttcccagtttggttgcgcgatgtccctgggatagaattccgcactgacaatgaaccctacaaggctgaaatgcagatttttgtgacaaaaattgtagatatcatgaaagaggagaagctttattcttggcaaggtggtcccattatactgcagcagattgaaaatgaatacggtaacattcaaggccattatggtcaagcagggaagagatacatgctatgggcagctcagatggcacttgcacttgatactggtgttccttgggtaatgtgtaggcaaacagatgctccagaacaaattctcaatacttgcaatgccttttactgtgatgggttcaaaccaaattcctacaacaagccaacaatatggactgaggattgggatggatgtattttggtggaaccaattttgagcggacagctggtggtccacttcagataactagctatgattatgatgcaccaattgacgaatacggtatcttaagacaacctaagtgggggcatttgaaagacctacatgcagctattaaactttgtgaatcagctcttactgcagtagatggttcacctcattatgtaaaattagggcccatgcaggaggcacatgtgtattccagtgaaaatgtccacacaaatggaagcatttcaggaaattcacagttttgctcagcttttcttgccaacattgatgaacataaatatgcttcagtctggatttttggaaaatcttatagtctaccaccatggtctgtgagcatactaccagactgtgaaactgtggcttttaatacagccagggttggtacacaaacatcgtttttcaatgtcgaatctgggtcccccagctattcaagtaggcataaacctagaattctatcccttattggtgtcccctatctctcaactacttggtggacttttaaagaacctgttggcatttggggtgaaggcatctttactgctcaggggatattagagcacttaaacgtgacaaaagacatctctgactacctttcatatactaccagggtgaacatttctgaagaggatgttttatattggaattccaaaggttttcttccatcactaaccatagatcaaatccgcgatgtagcacgtgtatttgtaaatgggaagcttgcaggtagtaaagttggtcattgggtctcactgaatcaaccgcttcaattagttcaaggacttaatgagttgacattgttatcggagattgttggcttgcagaactatggtgctttcttggagaaggatggtgctggatttagaggtcaagtaaaactcactggcttgtcgaatggggatatcgaccttactaattctctttggacatatcagattggtttgaaaggtgagttttcaaggatctattctcctgagtatcaaggatctgctgagtggagtagcatgcagaatgatgacacagtttcacccttcacatggttcaagactatgtttgatgctccagaaggtaatggccctgttaccattgatcttgggagcatgggaaagggccaggcttgggtgaatgggcatctcattgggcgctattggtcactagttgcgccagagtccgggtgtccatcgtcatgcaactacgcaggaacatacagtgatagcaagtgccgatcgaactgtggaatcgctacacaaagctggtaccacataccacgcgaatggttgcaagagtcaggcaatctattggtactcttcgaggaaacagggggagacccatctcagatatcgctggaggttcattacaccaagacaatctgctcaaaaatatctgagacttactatcctcccctttctgcctggtcacgtgccgccaacggtcgcccctcagtaaatacggtagcaccagagcttcgcttgcagtgcgatgacgggcatgtgatctcgaagattacatttgcgagttacgggacccctacaggaggttgccagaacttctctgtagggaattgccatgcatcgactactctagacttggtggtagaggcctgcgaaggcaagaacagatgcgcgatcagtgttaccaacgaagtattcggagatccatgccgcaaagtcgtcaaggatttggcagttgaagccgagtgctccccgccatcggttaaccaagaacctcgatacgatatatgatcacggtactgtattgtggtgctcaggtcttggtggacgttgccgcagctttgcagggccgtgcacaatggtcctgcatcgttgtctcctatacctctgcacccatattatatgtaaacagtgacctacatgtaaatctaaagaagaggagggattgaaaagaaatgagatggaaaaggaataaagttgcttttattacaaatggtcattcctgtgaaccgtctggcttactcctgtaagggccattcctttggacttcggtctacttttgtttccctgttgacacttcttccacctgtaggcggtcgaccaaccgctggtggtggtgatgcccttttgattgagcccatgtgcattctcctggctcggcgtggacagaggaaaggaaaaaatttattccgaattattgccatagtttcgtttctaaaatgggacaccttaaccttttaactcttgaacccattcaaattatc

SEQ ID NO: 30611 - DNA, 2149 bp, Zea Mays
tgccgccgtgtgcgctccagtttccactgtgctccttctcgccgactccgccatgaccgcctcgccctacccgacgacgccgtggctgcggccaccgcctcctatggcatttctgagtctcctcctcctccttggctgcctctccccgtcgatctcactggcgggtgcggaggcggcgggggttctgagacaagtggttggtggggacgacggcgggacattcttcgagccgttcaacgtgacctacgaccaccgcgcgcttatccttggcgggaagcgcaggatgctcgtctctgcggggctccactacccgcgtgccacgcccgagatgtggccgagtttgattgcaaagtgcaaggagggcggcgtggatgcaattgagacatatgtgttttggaatgggcatgagccggccaaaggccagtattacttcgaaggaagatttgatattgtcaggtttgctaagctggttgcagctgaaggtctatttctttttctgcgaatcggcccatatgcttgtgctgaatggaatttcggtggtttcccagtttggttgcgcgatgtccctgggatagaattccgcactgacaatgaaccctacaaggctgaaatgcagatttttgtgacaaaaattgtagatatcatgaaagaggagaagctttattcttggcaaggtggtcccattatactgcagcagattgaaaatgaatacggtaacattcaaggccattatggtcaagcagggaagagatacatgctatgggcagctcagatggcacttgcacttgatactggtgttccttgggtaatgtgtaggcaaacagatgctccagaacaaattctcaatacttgcaatgccttttactgtgatgggttcaaaccaaattcctacaacaagccaacaatatggactgaggattgggatggatggtatgccgactggggcgaatcattgccacataggcctgctcaagacagtgcttttgctgttgctcgtttttatcaacgtggtggaagcttacaaaattattacatgtattttggtggaaccaattttgagcggacagctggtggtccacttcagataactagctatgattatgatgcaccaattgacgaatacggtatcttaagacaacctaagtgggggcatttgaaagacctacatgcagctattaaactttgtgaatcagctcttactgcagtagatggttcacctcattatgtaaaattagggcccatgcaggaggcacatgtgtattccagtgaaaatgtccacacaaatggaagcatttcaggaaattcacagttttgctcagcttttcttgccaacattgatgaacataaatatgcttcagtctggatttttggaaaatcttatagtctaccaccatggtctgtgagcatactaccagactgtgaaactgtggcttttaatacagccagggttggtacacaaacatcgtttttcaatgtcgaatctgggtcccccagctattcaagtaggcataaacctagaattctatcccttattggtgtcccctatctctcaactacttggtggacttttaaagaacctgttggcatttggggtgaaggcatctttactgctcaggggatattagagcacttaaacgtgacaaaagacatctctgactacctttcatatactaccagggtgaacatttctgaagaggatgttttatattggaattccaaaggttttcttccatcactaaccatagatcaaatccgcgatgtagcacgtgtatttgtaaatgggaagcttgcaggtagtaaagttggtcattgggtctcactgaatcaaccgcttcaattagttcaaggacttaatgagttgacattgttatcggagattgttggcttgcagaactatggtgctttcttggagaaggatggtgctggatttagaggtcaagtaaaactcactggcttgtcgaatggggatatcgaccttactaattctctttggacatatcagattggtttgaaaggtgagttttcaaggatctattctcctgagtatcaaggatctgctgagtggagtagcatgcagaatgatgacacagtttcacccttcacatggttcaagcctatgcatcacctaccgagcaaggcccaactggtt

SEQ ID NO: 30612 - DNA, 2020 bp, Zea Mays
ccagtttccactgtgctccttctcgccgactccgccatgaccgcctcgccctacccgacgacgccgtggctgcggccaccgcctcctatggcatttctgagtctcctcctcctccttggctgcctctccccgtcgatctcactggcgggtgcggaggcggcgggggttctgagacaagtggttggtggggacgacggcgggacattcttcgagccgttcaacgtgacctacgaccaccgcgcgcttatccttggcgggaagcgcaggatgctcgtctctgcggggctccactacccgcgtgccacgcccgagatgtggccgagtttgattgcaaagtgcaaggagggcggcgtggatgcaattgagacatatgtgttttggaatgggcatgagccggccaaaggccagtggtttcccagtttggttgcgcgatgtccctgggatagaattccgcactgacaatgaaccctacaaggctgaaatgcagatttttgtgacaaaaattgtagatatcatgaaagaggagaagctttattcttggcaaggtggtcccattatactgcagcagattgaaaatgaatacggtaacattcaaggccattatggtcaagcagggaagagatacatgctatgggcagctcagatggcacttgcacttgatactggtgttccttgggtaatgtgtaggcaaacagatgctccagaacaaattctcaatacttgcaatgccttttactgtgatgggttcaaaccaaattcctacaacaagccaacaatatggactgaggattgggatggatggtatgccgactggggcgaatcattgccacataggcctgctcaagacagtgcttttgctgttgctcgtttttatcaacgtggtggaagcttacaaaattattacatgtattttggtggaaccaattttgagcggacagctggtggtccacttcagataactagctatgattatgatgcaccaattgacgaatacggtatcttaagacaacctaagtgggggcatttgaaagacctacatgcagctattaaactttgtgaatcagctcttactgcagtagatggttcacctcattatgtaaaattagggcccatgcaggaggcacatgtgtattccagtgaaaatgtccacacaaatggaagcatttcaggaaattcacagttttgctcagcttttcttgccaacattgatgaacataaatatgcttcagtctggatttttggaaaatcttatagtctaccaccatggtctgtgagcatactaccagactgtgaaactgtggcttttaatacagccagggttggtacacaaacatcgtttttcaatgtcgaatctgggtcccccagctattcaagtaggcataaacctagaattctatcccttattggtgtcccctatctctcaactacttggtggacttttaaagaacctgttggcatttggggtgaaggcatctttactgctcaggggatattagagcacttaaacgtgacaaaagacatctctgactacctttcatatactaccagggtgaacatttctgaagaggatgttttatattggaattccaaaggttttcttccatcactaaccatagatcaaatccgcgatgtagcacgtgtatttgtaaatgggaagcttgcaggtagtaaagttggtcattgggtctcactgaatcaaccgcttcaattagttcaaggacttaatgagttgacattgttatcggagattgttggcttgcagaactatggtgctttcttggagaaggatggtgctggatttagaggtcaagtaaaactcactggcttgtcgaatggggatatcgaccttactaattctctttggacatatcagattggtttgaaaggtgagttttcaaggatctattctcctgagtatcaaggatctgctgagtggagtagcatgcagaatgatgacacagtttcacccttcacatggttcaagcctatgcatcacctaccgagcaaggcccaactggtt

SEQ ID NO: 30613 - DNA, 2802 bp, Zea Mays
gtatgaacaaggagaaaatcgaaaagaatctgcatctgctagtcaccttcagatgagtggtttcccagtttggttgcgcgatgtccctgggatagaattccgcactgacaatgaaccctacaaggctgaaatgcagatttttgtgacaaaaattgtagatatcatgaaagaggagaagctttattcttggcaaggtggtcccattatactgcagcagattgaaaatgaatacggtaacattcaaggccattatggtcaagcagggaagagatacatgctatgggcagctcagatggcacttgcacttgatactggtgttccttgggtaatgtgtaggcaaacagatgctccagaacaaattctcaatacttgcaatgccttttactgtgatgggttcaaaccaaattcctacaacaagccaacaatatggactgaggattgggatggatggtatgccgactggggcgaatcattgccacataggcctgctcaagacagtgcttttgctgttgctcgtttttatcaacgtggtggaagcttacaaaattattacatgtattttggtggaaccaattttgagcggacagctggtggtccacttcagataactagctatgattatgatgcaccaattgacgaatacggtatcttaagacaacctaagtgggggcatttgaaagacctacatgcagctattaaactttgtgaatcagctcttactgcagtagatggttcacctcattatgtaaaattagggcccatgcaggaggcacatgtgtattccagtgaaaatgtccacacaaatggaagcatttcaggaaattcacagttttgctcagcttttcttgccaacattgatgaacataaatatgcttcagtctggatttttggaaaatcttatagtctaccaccatggtctgtgagcatactaccagactgtgaaactgtggcttttaatacagccagggttggtacacaaacatcgtttttcaatgtcgaatctgggtcccccagctattcaagtaggcataaacctagaattctatcccttattggtgtcccctatctctcaactacttggtggacttttaaagaacctgttggcatttggggtgaaggcatctttactgctcaggggatattagagcacttaaacgtgacaaaagacatctctgactacctttcatatactaccagggtgaacatttctgaagaggatgttttatattggaattccaaaggttttcttccatcactaaccatagatcaaatccgcgatgtagcacgtgtatttgtaaatgggaagcttgcaggtagtaaagttggtcattgggtctcactgaatcaaccgcttcaattagttcaaggacttaatgagttgacattgttatcggagattgttggcttgcagaactatggtgctttcttggagaaggatggtgctggatttagaggtcaagtaaaactcactggcttgtcgaatggggatatcgaccttactaattctctttggacatatcagattggtttgaaaggtgagttttcaaggatctattctcctgagtatcaaggatctgctgagtggagtagcatgcagaatgatgacacagtttcacccttcacatggttcaagactatgtttgatgctccagaaggtaatggccctgttaccattgatcttgggagcatgggaaagggccaggcttgggtgaatgggcatctcattgggcgctattggtcactagttgcgccagagtccgggtgtccatcgtcatgcaactacgcaggaacatacagtgatagcaagtgccgatcgaactgtggaatcgctacacaaagctggtaccacataccacgcgaatggttgcaagagtcaggcaatctattggtactcttcgaggaaacagggggagacccatctcagatatcgctggaggttcattacaccaagacaatctgctcaaaaatatctgagacttactatcctcccctttctgcctggtcacgtgccgccaacggtcgcccctcagtaaatacggtagcaccagagcttcgcttgcagtgcgatgacgggcatgtgatctcgaagattacatttgcgagttacgggacccctacaggaggttgccagaacttctctgtagggaattgccatgcatcgactactctagacttggtggtagaggcctgcgaaggcaagaacagatgcgcgatcagtgttaccaacgaagtattcggagatccatgccgcaaagtcgtcaaggatttggcagttgaagccgagtgctccccgccatcggttaaccaagaacctcgatacgatatatgatcacggtactgtattgtggtgctcaggtcttggtggacgttgccgcagctttgcagggccgtgcacaatggtcctgcatcgttgtctcctatacctctgcacccatattatatgtaaacagtgacctacatgtaaatctaaagaagaggagggattgaaaagaaatgagatggaaaaggaataaagttgcttttattacaaatggtcattcctgtgaaccgtctggcttactcctgtaagggccattcctttggacttcggtctacttttgtttccctgttgacacttcttccacctgtaggcggtcgaccaaccgctggtggtggtgatgcccttttgattgagcccatgtgcattctcctggctcggcgtggacagaggaaaggaaaaaatttattccgaattattgccatagtttcgtttctaaaatgggacaccttaaccttttaactcttgaacccattcaaattatc

SEQ ID NO: 30614 - DNA, 2844 bp, Zea Mays
agcagagtagcagactccagagtccagacgcagatttcctcaagaactcaggataggaaggaggaggaaaggaggagtcggccagctagattgaagaagtggtttcccagtttggttgcgcgatgtccctgggatagaattccgcactgacaatgaaccctacaaggctgaaatgcagatttttgtgacaaaaattgtagatatcatgaaagaggagaagctttattcttggcaaggtggtcccattatactgcagcagattgaaaatgaatacggtaacattcaaggccattatggtcaagcagggaagagatacatgctatgggcagctcagatggcacttgcacttgatactggtgttccttgggtaatgtgtaggcaaacagatgctccagaacaaattctcaatacttgcaatgccttttactgtgatgggttcaaaccaaattcctacaacaagccaacaatatggactgaggattgggatggatggtatgccgactggggcgaatcattgccacataggcctgctcaagacagtgcttttgctgttgctcgtttttatcaacgtggtggaagcttacaaaattattacatgtattttggtggaaccaattttgagcggacagctggtggtccacttcagataactagctatgattatgatgcaccaattgacgaatacggtatcttaagacaacctaagtgggggcatttgaaagacctacatgcagctattaaactttgtgaatcagctcttactgcagtagatggttcacctcattatgtaaaattagggcccatgcaggaggcacatgtgtattccagtgaaaatgtccacacaaatggaagcatttcaggaaattcacagttttgctcagcttttcttgccaacattgatgaacataaatatgcttcagtctggatttttggaaaatcttatagtctaccaccatggtctgtgagcatactaccagactgtgaaactgtggcttttaatacagccagggttggtacacaaacatcgtttttcaatgtcgaatctgggtcccccagctattcaagtaggcataaacctagaattctatcccttattggtgtcccctatctctcaactacttggtggacttttaaagaacctgttggcatttggggtgaaggcatctttactgctcaggggatattagagcacttaaacgtgacaaaagacatctctgactacctttcatatactaccagggtgaacatttctgaagaggatgttttatattggaattccaaaggttttcttccatcactaaccatagatcaaatccgcgatgtagcacgtgtatttgtaaatgggaagcttgcaggtagtaaagttggtcattgggtctcactgaatcaaccgcttcaattagttcaaggacttaatgagttgacattgttatcggagattgttggcttgcagaactatggtgctttcttggagaaggatggtgctggatttagaggtcaagtaaaactcactggcttgtcgaatggggatatcgaccttactaattctctttggacatatcagattggtttgaaaggtgagttttcaaggatctattctcctgagtatcaaggatctgctgagtggagtagcatgcagaatgatgacacagtttcacccttcacatggttcaagactatgtttgatgctccagaaggtaatggccctgttaccattgatcttgggagcatgggaaagggccaggcttgggtgaatgggcatctcattgggcgctattggtcactagttgcgccagagtccgggtgtccatcgtcatgcaactacgcaggaacatacagtgatagcaagtgccgatcgaactgtggaatcgctacacaaagctggtaccacataccacgcgaatggttgcaagagtcaggcaatctattggtactcttcgaggaaacagggggagacccatctcagatatcgctggaggttcattacaccaagacaatctgctcaaaaatatctgagacttactatcctcccctttctgcctggtcacgtgccgccaacggtcgcccctcagtaaatacggtagcaccagagcttcgcttgcagtgcgatgacgggcatgtgatctcgaagattacatttgcgagttacgggacccctacaggaggttgccagaacttctctgtagggaattgccatgcatcgactactctagacttggtggtagaggcctgcgaaggcaagaacagatgcgcgatcagtgttaccaacgaagtattcggagatccatgccgcaaagtcgtcaaggatttggcagttgaagccgagtgctccccgccatcggttaaccaagaacctcgatacgatatatgatcacggtactgtattgtggtgctcaggtcttggtggacgttgccgcagctttgcagggccgtgcacaatggtcctgcatcgttgtctcctatacctctgcacccatattatatgtaaacagtgacctacatgtaaatctaaagaagaggagggattgaaaagaaatgagatggaaaaggaataaagttgcttttattacaaatggtcattcctgtgaaccgtctggcttactcctgtaagggccattcctttggacttcggtctacttttgtttccctgttgacacttcttccacctgtaggcggtcgaccaaccgctggtggtggtgatgcccttttgattgagcccatgtgcattctcctggctcggcgtggacagaggaaaggaaaaaatttattccgaattattgccatagtttcgtttctaaaatgggacaccttaaccttttaactcttgaacccattcaaattatc

SEQ ID NO: 30615 - DNA, 2696 bp, Zea Mays
cttgacattcttccctctgcgggagatgctccttcaatcagtggtttcccagtttggttgcgcgatgtccctgggatagaattccgcactgacaatgaaccctacaaggctgaaatgcagatttttgtgacaaaaattgtagatatcatgaaagaggagaagctttattcttggcaaggtggtcccattatactgcagcagattgaaaatgaatacggtaacattcaaggccattatggtcaagcagggaagagatacatgctatgggcagctcagatggcacttgcacttgatactggtgttccttgggtaatgtgtaggcaaacagatgctccagaacaaattctcaatacttgcaatgccttttactgtgatgggttcaaaccaaattcctacaacaagccaacaatatggactgaggattgggatggatggtatgccgactggggcgaatcattgccacataggcctgctcaagacagtgcttttgctgttgctcgtttttatcaacgtggtggaagcttacaaaattattacatgtattttggtggaaccaattttgagcggacagctggtggtccacttcagataactagctatgattatgatgcaccaattgacgaatacggtatcttaagacaacctaagtgggggcatttgaaagacctacatgcagctattaaactttgtgaatcagctcttactgcagtagatggttcacctcattatgtaaaattagggcccatgcaggaggcacatgtgtattccagtgaaaatgtccacacaaatggaagcatttcaggaaattcacagttttgctcagcttttcttgccaacattgatgaacataaatatgcttcagtctggatttttggaaaatcttatagtctaccaccatggtctgtgagcatactaccagactgtgaaactgtggcttttaatacagccagggttggtacacaaacatcgtttttcaatgtcgaatctgggtcccccagctattcaagtaggcataaacctagaattctatcccttattggtgtcccctatctctcaactacttggtggacttttaaagaacctgttggcatttggggtgaaggcatctttactgctcaggggatattagagcacttaaacgtgacaaaagacatctctgactacctttcatatactaccagggtgaacatttctgaagaggatgttttatattggaattccaaaggttttcttccatcactaaccatagatcaaatccgcgatgtagcacgtgtatttgtaaatgggaagcttgcaggtagtaaagttggtcattgggtctcactgaatcaaccgcttcaattagttcaaggacttaatgagttgacattgttatcggagattgttggcttgcagaactatggtgctttcttggagaaggatggtgctggatttagaggtcaagtaaaactcactggcttgtcgaatggggatatcgaccttactaattctctttggacatatcagattggtttgaaaggtgagttttcaaggatctattctcctgagtatcaaggatctgctgagtggagtagcatgcagaatgatgacacagtttcacccttcacatggttcaagactatgtttgatgctccagaagttgcgccagagtccgggtgtccatcgtcatgcaactacgcaggaacatacagtgatagcaagtgccgatcgaactgtggaatcgctacacaaagctggtaccacataccacgcgaatggttgcaagagtcaggcaatctattggtactcttcgaggaaacagggggagacccatctcagatatcgctggaggttcattacaccaagacaatctgctcaaaaatatctgagacttactatcctcccctttctgcctggtcacgtgccgccaacggtcgcccctcagtaaatacggtagcaccagagcttcgcttgcagtgcgatgacgggcatgtgatctcgaagattacatttgcgagttacgggacccctacaggaggttgccagaacttctctgtagggaattgccatgcatcgactactctagacttggtggtagaggcctgcgaaggcaagaacagatgcgcgatcagtgttaccaacgaagtattcggagatccatgccgcaaagtcgtcaaggatttggcagttgaagccgagtgctccccgccatcggttaaccaagaacctcgatacgatatatgatcacggtactgtattgtggtgctcaggtcttggtggacgttgccgcagctttgcagggccgtgcacaatggtcctgcatcgttgtctcctatacctctgcacccatattatatgtaaacagtgacctacatgtaaatctaaagaagaggagggattgaaaagaaatgagatggaaaaggaataaagttgcttttattacaaatggtcattcctgtgaaccgtctggcttactcctgtaagggccattcctttggacttcggtctacttttgtttccctgttgacacttcttccacctgtaggcggtcgaccaaccgctggtggtggtgatgcccttttgattgagcccatgtgcattctcctggctcggcgtggacagaggaaaggaaaaaatttattccgaattattgccatagtttcgtttctaaaatgggacaccttaaccttttaactcttgaacccattcaaattatc

SEQ ID NO: 30616 - DNA, 1431 bp, Zea Mays
gaagagataggagagaggaaatatttatgtgctgctcttgcttgcagcaataaagaagtggtttcccagtttggttgcgcgatgtccctgggatagaattccgcactgacaatgaaccctacaaggctgaaatgcagatttttgtgacaaaaattgtagatatcatgaaagaggagaagctttattcttggcaaggtggtcccattatactgcagcagattgaaaatgaatacggtaacattcaaggccattatggtcaagcagggaagagatacatgctatgggcagctcagatggcacttgcacttgatactggtgttccttgggtaatgtgtaggcaaacagatgctccagaacaaattctcaatacttgcaatgccttttactgtgatgggttcaaaccaaattcctacaacaagccaacaatatggactgaggattgggatggatggtatgccgactggggcgaatcattgccacataggcctgctcaagacagtgcttttgctgttgctcgtttttatcaacgtggtggaagcttacaaaattattacatgtattttggtggaaccaattttgagcggacagctggtggtccacttcagataactagctatgattatgatgcaccaattgacgaatacggtatcttaagacaacctaagtgggggcatttgaaagacctacatgcagctattaaactttgtgaatcagctcttactgcagtagatggttcacctcattatgtaaaattagggcccatgcaggaggcacatgtgtattccagtgaaaatgtccacacaaatggaagcatttcaggaaattcacagttttgctcagcttttcttgccaacattgatgaacataaatatgcttcagtctggatttttggaaaatcttatagtctaccaccatggtctgtgagcatactaccagactgtgaaactgtggcttttaatacagccagggttggtacacaaacatcgtttttcaatgtcgaatctgggtcccccagctattcaagtaggcataaacctagaattctatcccttattggtgtcccctatctctcaactacttggtggacttttaaagaacctgttggcatttggggtgaaggcatctttactgctcaggggatattagagcacttaaacgtgacaaaagacatctctgactacctttcatatactaccagggtgaacatttctgaagaggatgttttatattggaattccaaaggttttcttccatcactaaccatagatcaaatccgcgatgtagcacgtgtatttgtaaatgggaagcttgcaggtagtaaagttggtcattgggtctcactgaatcaaccgcttcaattagttcaaggacttaatgagttgacattgttatcggagattgttggcttgcagccagagaggaaggcgcaag

SEQ ID NO: 30617 - DNA, 1679 bp, Zea Mays
aatggttgctgcctccttggcggtggcggtggccagcagcctgcacagcggcaagatgagtacatcgtctgaagggtgaacatttctgaagaggatgttttatattggaattccaaaggttttcttccatcactaaccatagatcaaatccgcgatgtagcacgtgtatttgtaaatgggaagcttgcaggtagtaaagttggtcattgggtctcactgaatcaaccgcttcaattagttcaaggacttaatgagttgacattgttatcggagattgttggcttgcagaactatggtgctttcttggagaaggatggtgctggatttagaggtcaagtaaaactcactggcttgtcgaatggggatatcgaccttactaattctctttggacatatcagattggtttgaaaggtgagttttcaaggatctattctcctgagtatcaaggatctgctgagtggagtagcatgcagaatgatgacacagtttcacccttcacatggttcaagactatgtttgatgctccagaaggtaatggccctgttaccattgatcttgggagcatgggaaagggccaggcttgggtgaatgggcatctcattgggcgctattggtcactagttgcgccagagtccgggtgtccatcgtcatgcaactacgcaggaacatacagtgatagcaagtgccgatcgaactgtggaatcgctacacaaagctggtaccacataccacgcgaatggttgcaagagtcaggcaatctattggtactcttcgaggaaacagggggagacccatctcagatatcgctggaggttcattacaccaagacaatctgctcaaaaatatctgagacttactatcctcccctttctgcctggtcacgtgccgccaacggtcgcccctcagtaaatacggtagcaccagagcttcgcttgcagtgcgatgacgggcatgtgatctcgaagattacatttgcgagttacgggacccctacaggaggttgccagaacttctctgtagggaattgccatgcatcgactactctagacttggtggtagaggcctgcgaaggcaagaacagatgcgcgatcagtgttaccaacgaagtattcggagatccatgccgcaaagtcgtcaaggatttggcagttgaagccgagtgctccccgccatcggttaaccaagaacctcgatacgatatatgatcacggtactgtattgtggtgctcaggtcttggtggacgttgccgcagctttgcagggccgtgcacaatggtcctgcatcgttgtctcctatacctctgcacccatattatatgtaaacagtgacctacatgtaaatctaaagaagaggagggattgaaaagaaatgagatggaaaaggaataaagttgcttttattacaaatggtcattcctgtgaaccgtctggcttactcctgtaagggccattcctttggacttcggtctacttttgtttccctgttgacacttcttccacctgtaggcggtcgaccaaccgctggtggtggtgatgcccttttgattgagcccatgtgcattctcctggctcggcgtggacagaggaaaggaaaaaatttattccgaattattgccatagtttcgtttctaaaatgggacaccttaaccttttaactcttgaacccattcaaattatc

SEQ ID NO: 30618 - DNA, 1641 bp, Zea Mays
tgatacgtgaccaaagtcttctgtctcagactattgggtgaacatttctgaagaggatgttttatattggaattccaaaggttttcttccatcactaaccatagatcaaatccgcgatgtagcacgtgtatttgtaaatgggaagcttgcaggtagtaaagttggtcattgggtctcactgaatcaaccgcttcaattagttcaaggacttaatgagttgacattgttatcggagattgttggcttgcagaactatggtgctttcttggagaaggatggtgctggatttagaggtcaagtaaaactcactggcttgtcgaatggggatatcgaccttactaattctctttggacatatcagattggtttgaaaggtgagttttcaaggatctattctcctgagtatcaaggatctgctgagtggagtagcatgcagaatgatgacacagtttcacccttcacatggttcaagactatgtttgatgctccagaaggtaatggccctgttaccattgatcttgggagcatgggaaagggccaggcttgggtgaatgggcatctcattgggcgctattggtcactagttgcgccagagtccgggtgtccatcgtcatgcaactacgcaggaacatacagtgatagcaagtgccgatcgaactgtggaatcgctacacaaagctggtaccacataccacgcgaatggttgcaagagtcaggcaatctattggtactcttcgaggaaacagggggagacccatctcagatatcgctggaggttcattacaccaagacaatctgctcaaaaatatctgagacttactatcctcccctttctgcctggtcacgtgccgccaacggtcgcccctcagtaaatacggtagcaccagagcttcgcttgcagtgcgatgacgggcatgtgatctcgaagattacatttgcgagttacgggacccctacaggaggttgccagaacttctctgtagggaattgccatgcatcgactactctagacttggtggtagaggcctgcgaaggcaagaacagatgcgcgatcagtgttaccaacgaagtattcggagatccatgccgcaaagtcgtcaaggatttggcagttgaagccgagtgctccccgccatcggttaaccaagaacctcgatacgatatatgatcacggtactgtattgtggtgctcaggtcttggtggacgttgccgcagctttgcagggccgtgcacaatggtcctgcatcgttgtctcctatacctctgcacccatattatatgtaaacagtgacctacatgtaaatctaaagaagaggagggattgaaaagaaatgagatggaaaaggaataaagttgcttttattacaaatggtcattcctgtgaaccgtctggcttactcctgtaagggccattcctttggacttcggtctacttttgtttccctgttgacacttcttccacctgtaggcggtcgaccaaccgctggtggtggtgatgcccttttgattgagcccatgtgcattctcctggctcggcgtggacagaggaaaggaaaaaatttattccgaattattgccatagtttcgtttctaaaatgggacaccttaaccttttaactcttgaacccattcaaattatc

SEQ ID NO: 30619 - DNA, 1077 bp, Zea Mays
gtttctttccgaatttgagtggggaaaaggttggagccgatcccgtcctttgctccgtagtccgatctgccacgattcagagattggcggcatgggggcggcgtacgggacagccaagagtggcgtcggcgtggcgtccatgggtgtcatgcgcccagagctcgtcatgaagtccatcgtgcccgtggtcatggctggtgtgctcggtatctacggcctcatcatcgccgtcatcatcagcactgggatcaaccccaaggccaagccatactacctctttgacggctatgcccacctgtcgtctggccttgcctgtggtcttgctgggcttgctgcaggcatggccattggcatcgttggtgatgctggtgtcagggcgaacgctcagcagccgaagttgtttgttggcatgatcctcatccttatttttgctgaagcacttgccctctatggtctcatcgtcggcattatcctctcgtctcgtgccggccagtcccgcgcagattagaggcacgtttcagatgtcaacaccgtgccgccgacagttgcctggtcgtagctgggtcatgttctatatccatgagacaagaagctggagcactttgactctttgagaggcttacttttatgctgtctagttttccatcttctgttgagtcgagaaaacaagaaaggctgtgtagccaagggatgacttttacccttgtgccattcttttccctgtcgtggtggggggtgggttgcggttgatgcttatttatgcacagtttttgcttgggtcggggctggggctgggacgttggtgtaatgtggtgaataagcgagtgcatgcaacgcaattggaacttaagacatttttggtaaaatactctttcgtattctgttctctgttctatgaatattggtaatatgcgtggctcatgaactagtgtttgtttctcgcagccggtacgggttcttagtggtcctatcagtgttagtagagtggatggatcgcgatccaaatgttttacaatttattagtgctctaaattgatttttgttaaaaataaatagaaatagagcttgattctaatc

SEQ ID NO: 30620 - DNA, 1015 bp, Zea Mays
atgacgcgcatctttcccacctcctctttctttcccttgctctgctaacgcgccgccggtccgtcgtttgccgcctatcctgcttgctcgcgcggccgctgttcatggcgatggtggatgaaggcggcaaaggagaggatctgtagaaatgttcctgccaattctaggtgttgttgcaacagagatgatatatgatggataatgacaatggcatgatcgacctgcaactgtggtttcatgactttcatcacgaaccgtactcgtgtccagtccatgtgaagtgaaacgtgagacctaagccaaattcggcaagatgaactgcagagtttgcttacaacaataattaccaagcgagcatcaatatgtctctagatgaagcacttcattatggtagggattgtcaaaccccttgaattggtcagagatgggaaaatgatttctatatggaactagatttgtacaagactctaaagagaaggtggaccaaattcgccgaagcttgaaattcacacaagagcgctataaggcatatgcaaatgtccatagaaaaaatggaagagcaaattgacaattatgtatacttgaaggctacaactttcaaaggcacccaaagatttcaagacaagtggaaattatctctagacatgtaaggcctttcaaaatctatgccaagaaagaagtgacttatgctcatgctctaccaaattcacttttgagaattcacaatgtctttcatgtatacttaagaagtgtctccaagtaccaaccaacctagtataattgcaagaccttaatctagatcaaaacttgagctacaaggagtatccaattgctgttttggatttcttgaaaagaaagatatgagaaaaatcatgaacatggaaaaggtgtaatggagtcaccatcaagtacaaggaactacttgggaagttgaatacagaataggatctaaataccctaatctcttctattcaatgtataaggactacccatttcgagtttggttgagtttgtt

SEQ ID NO: 30621 - DNA, 1798 bp, Zea Mays
atgacgcgcatctttcccacctcctctttctttcccttgctctgctaacgcgccgccggtccgtcgtttgccgcctatcctgcttgctcgcgcggccgctgttcatggcgatggtggatgaaggcggcaaaggagaggcgcagccgcctggattagacccaagaaaccgccgatctgcggcgaccagggcgaccggcgacatggatggcggtggccgaggagaggagtgggagggcccccccggctacgtgctctcgctcccggcggcggcgctgcccctgcccgtcgccgtctcctgcctggacgccaccgtccggcgcaagggtcgcagccatatccgccaccgtggccatccgtcgggctggtgggccttcaggctccccgtccccgcgccggaggaggcgaagaggccggttcccccagcgtcggcggccaataatccgtccgaggaggaccgttcctgtcctcgtcaccagcgcctgcccgtgcgccaggccccggcccccggtccacacactcccgcgcctgcagaggagaggccagcgaagagggtcaggatgtgcctgcagtgcggcgcggcggtgacgccgcagtggaggtcggggccgatggggcagggcacgctctgcaacgcctgcggggtccggctcaaggcggccggggcactgcggggtcaggtgaagcaccgccccacgccagcgaccgccaggacgcccgcccggccgcccctggacagcccggcctcggagtcgtcgcccgacagcccgatcttggagcctgggtcagttccagatgtttacctggtgaggaagaagcctctgaaacgggggagacccccgccgcctccgaggacggtacccgcggcggcgccgccgctagcgccagcggtgtacctcgtcaagaagaagaaaaaatcggcttcggcgaggaagccgtggcggcccccgaagtcggcgaagcagtgcttgcactgcgggtcgtcgtcgacgccgcagtggcgggaagggccgctgggccgcagcacgctgtgcaacgcgtgcggcgtgcggtacaggcagggccggttgctgccggagtaccggccgctggcgagccccaccttcgagccgtcggagcacgccaacaagcacagccaggtgatgcagctccaccggcagcggaagagccagggccagcaccaccctctgcccgcggagcatccgcgagccatggacgtcctccagtttccccagcggtggcaggtgaaggaggagtacccgccgacgccgctccaccagcctctgccgcatccggtggtggacggcagccttgccagcggcgagctgcgcgttggggacatggtcgacgctgcggcagatgcaggacacggcggcggcggaggcaagggaagtgacctgaacaacaacgcgccgagctctctggactcgcggctgctggaggggccgtcggcgccactgcttgtcgacggcgacaagcccttggtccactagctagccagagcctactaggtgtaatccagctgatttgagagaacagatctgtagaaatgttcctgccaattctaggtgttgttgcaacagagatgatatatgatggataatgacaatggcatgatcgacctgcaactgtggtttcatgactttcatcacgaaccgtactcgtgtccagtccatgtgaagtgaaacgtgagacctaagccaaattcggcaagatgaactgcagggcatgaagaggaggaagggaggatcaagggtagatgccagcaatatgaccatggggatgaagatttaaggaggcg

SEQ ID NO: 30622 - DNA, 2353 bp, Zea Mays
atgacgcgcatctttcccacctcctctttctttcccttgctctgctaacgcgccgccggtccgtcgtttgccgcctatcctgcttgctcgcgcggccgctgttcatggcgatggtggatgaaggcggcaaaggagaggcgcagccgcctggattagacccaagaaaccgccgatctgcggcgaccagggcgaccggcgacatggatggcggtggccgaggagaggagtgggagggcccccccggctacgtgctctcgctcccggcggcggcgctgcccctgcccgtcgccgtctcctgcctggacgccaccgtccggcgcaagggtcgcagccatatccgccaccgtggccatccgtcgggctggtgggccttcaggctccccgtccccgcgccggaggaggcgaagaggccggttcccccagcgtcggcggccaataatccgtccgaggaggaccgttcctgtcctcgtcaccagcgcctgcccgtgcgccaggccccggcccccggtccacacactcccgcgcctgcagaggagaggccagcgaagagggtcaggatgtgcctgcagtgcggcgcggcggtgacgccgcagtggaggtcggggccgatggggcagggcacgctctgcaacgcctgcggggtccggctcaaggcggccggggcactgcggggtcaggtgaagcaccgccccacgccagcgaccgccaggacgcccgcccggccgcccctggacagcccggcctcggagtcgtcgcccgacagcccgatcttggagcctgggtcagttccagatgtttacctggtgaggaagaagcctctgaaacgggggagacccccgccgcctccgaggacggtacccgcggcggcgccgccgctagcgccagcggtgtacctcgtcaagaagaagaaaaaatcggcttcggcgaggaagccgtggcggcccccgaagtcggcgaagcagtgcttgcactgcgggtcgtcgtcgacgccgcagtggcgggaagggccgctgggccgcagcacgctgtgcaacgcgtgcggcgtgcggtacaggcagggccggttgctgccggagtaccggccgctggcgagccccaccttcgagccgtcggagcacgccaacaagcacagccaggtgatgcagctccaccggcagcggaagagccagggccagcaccaccctctgcccgcggagcatccgcgagccatggacgtcctccagtttccccagcggtggcaggtgaaggaggagtacccgccgacgccgctccaccagcctctgccgcatccggtggtggacggcagccttgccagcggcgagctgcgcgttggggacatggtcgacgctgcggcagatgcaggacacggcggcggcggaggcaagggaagtgacctgaacaacaacgcgccgagctctctggactcgcggctgctggaggggccgtcggcgccactgcttgtcgacggcgacaagcccttggtccactagctagccagagcctactaggtgtaatccagctgatttgagagaacagtaattttcttggaccttctccttttttctgagatcttggtaactttattatcgacctcggttgtgtgtatttgttcgtgtttcggcaaaattttcgtgtaactttattatcatggcaggatctgtagaaatgttcctgccaattctaggtgttgttgcaacagagatgatatatgatggataatgacaatggcatgatcgacctgcaactgtggtttcatgactttcatcacgaaccgtactcgtgtccagtccatgtgaagtgaaacgtgagacctaagccaaattcggcaagatgaactgcaggacttgtttgtctactaagaaacataaaatggagaaatgaactaaaacttcaccaagatgatgaagatgaattgagggctagcaaggggttggaccttggcaagacgagcaaggtcatgaatggtgtagcttagtagactagttaaggaccatgtatctatggtagtaagacatgaacatacttgtagaaaccacatgtctatatcagtgtggcaagctaagtactttgtggcgtctagttttcttgtgaattcaaatgagatgtagcgtgggtagctaaaataagctagtaccccgacacatggtcaaactatttgtgggaacctttggttggacttgaaaaaggttgagatgttgaggtatccttcatatattgatggataatgtgggcaatatctgttttctttggtggggttaatgtgtactcctctgcagagttttgaattttatgatataagtccaatgcttttagatacaaactagtaactgaaaggggctcaaggaagatcgag

SEQ ID NO: 30623 - DNA, 649 bp, Zea Mays
atgacgcgcatctttcccacctcctctttctttcccttgctctgctaacgcgccgccggtccgtcgtttgccgcctatcctgcttgctcgcgcggccgctgttcatggcgatggtggatgaaggcggcaaaggagaggacttgtttgtctactaagaaacataaaatggagaaatgaactaaaacttcaccaagatgatgaagatgaattgagggctagcaaggggttggaccttggcaagacgagcaaggtcatgaatggtgtagcttagtagactagttaaggaccatgtatctatggtagtaagacatgaacatacttgtagaaaccacatgtctatatcagtgtggcaagctaagtactttgtggcgtctagttttcttgtgaattcaaatgagatgtagcgtgggtagctaaaataagctagtaccccgacacatggtcaaactatttgtgggaacctttggttggacttgaaaaaggttgagatgttgaggtatccttcatatattgatggataatgtgggcaatatctgttttctttggtggggttaatgtgtactcctctgcagagttttgaattttatgatataagtccaatgcttttagatacaaactagtaactgaaaggggctcaaggaagatcgag

SEQ ID NO: 30624 - DNA, 836 bp, Zea Mays
atgacgcgcatctttcccacctcctctttctttcccttgctctgctaacgcgccgccggtccgtcgtttgccgcctatcctgcttgctcgcgcggccgctgttcatggcgatggtggatgaaggcggcaaaggagaggatctgtagaaatgttcctgccaattctaggtgttgttgcaacagagatgatatatgatggataatgacaatggcatgatcgacctgcaactgtggtttcatgactttcatcacgaaccgtactcgtgtccagtccatgtgaagtgaaacgtgagacctaagccaaattcggcaagatgaactgcaggacttgtttgtctactaagaaacataaaatggagaaatgaactaaaacttcaccaagatgatgaagatgaattgagggctagcaaggggttggaccttggcaagacgagcaaggtcatgaatggtgtagcttagtagactagttaaggaccatgtatctatggtagtaagacatgaacatacttgtagaaaccacatgtctatatcagtgtggcaagctaagtactttgtggcgtctagttttcttgtgaattcaaatgagatgtagcgtgggtagctaaaataagctagtaccccgacacatggtcaaactatttgtgggaacctttggttggacttgaaaaaggttgagatgttgaggtatccttcatatattgatggataatgtgggcaatatctgttttctttggtggggttaatgtgtactcctctgcagagttttgaattttatgatataagtccaatgcttttagatacaaactagtaactgaaaggggctcaaggaagatcgag

SEQ ID NO: 30625 - DNA, 639 bp, Zea Mays
acgaatcccagagcgtaccacatccgtccagaagccgcagcagcgagcaggtcaggtcggcagagagctcgacctctcgctgacggcgacgttcggggccggcggaggacaggaacaggacgatggccgagggaaagagatggcggttcgcgatggtctgctcctcgaacatgaaccggagcatggaggcgcactcgcagctgggccgcgcggggctcgacgtcgagtcctacggcacgggcacccacgtcaagctccccggcccctccctccacgagcccaacgtctacgacttcggcaccccctacggcgccatctacgacgacctccgccgcaaggaccccgaactgtacaagaggaatgggttgctgcctatgctgaagaggaacacctcggtgaagctggcgcctcagcggtggcaggacaatgccggcgacggggtgtttgatatgataatgacctttgaggagagggtctttgacttggttgttgaagatatgaataaccgcgagccgaggttgatgaagtgtgtgctgataataaatatggatgtcaaagataaccatgaagaagctggtgttggggcaaagcttgctgtagagttgtgccagaagcgagtcaacttatatatgttattcc

SEQ ID NO: 30626 - DNA, 1047 bp, Zea Mays
acgaatcccagagcgtaccacatccgtccagaagccgcagcagcgagcaggtcaggtcggcagagagctcgacctctcgctgacggcgacgttcggggccggcggaggacaggaacaggacgatggccgagggaaagagatggcggttcgcgatggtctgctcctcgaacatgaaccggagcatggaggcgcactcgcagctgggccgcgcggggctcgacgtcgagtcctacggcacgggcacccacgtcaagctccccggcccctccctccacgagcccaacgtctacgacttcggcaccccctacggcgccatctacgacgacctccgccgcaaggaccccgaactgtacaagaggaatgggttgctgcctatgctgaagaggaacacctcggtgaagctggcgcctcagcggtggcaggacaatgccggcgacggggtgtttgatatgataatgacctttgaggagagggtctttgacttggttgttgaagatgaataaccgcgagccgaggttgatgaagtgtgtgctgataataaatatggatgtcaaagataaccatgaagaagctggtgttggggcaaagcttgctgtagagttgtgccagaagcttgaagcaattgatggtgactgggaggacataattgatgacttgattactgcatttgagaagcagcacaagcggagacttgcatacagcatttcattctactaacatgtatagtcccgtgtggacagagatgttgcagtggatggttggtaacttggcattgtagtaagcaactgcataggagtgaagcatcatgttgtggcagtgttgcttgaattcttccacgcttacatttgcctgtgctagctgtttttttattgcaaggtgatggctatagatatcttccaagcactcgctgtttctttcctaactaccgcctttgttgtctggcatgtattcttaaacgacaatgtggttcagagtatcttctgtcttccacctcccaaaaaaaactaaatatcatgctttatgcaatatagtatcttctgccctctt

SEQ ID NO: 30627 - DNA, 6725 bp, Zea Mays
ggcggctccaccgcgctcacgcttgctggccccaccgctcagtgtacgaattaccgcttggctatcttcgaagaactagcagcagtgcagcacgcggcctcggtcccccacccgaggagccgccacgcaccccctgggtcccctccaccgcccgccggcgttcccacttcaattcgcccagcgcccctttctcctcccgaaaggcagggcaaccctacaaaacgctgtctcggcttcgccgtccagcggaacagtgtacgggagcagttcgtcgcgtgtgtcgcgtcgcgttgcgttgcgccacccactaattcgaacggacgggactgggattcgaaatttcgaacacgcgccgcctgagagagagagagagagtgagagaaagagagagagagagcaggagagatggtcaggcctttgtgatctcccgcggggctggaggtgtgcggggatggatctcgcggggatgaagcggcgggagctccaggcgctctgcaagcggcacggcctccccgccgggggcaccaacgccgacctcgtcggacgtctcgacgccgtgctttcggggcccgctgttgtggaggaggaggttgccggagtgccggcgaggaaggggtgtctgaagcaaacgggcggaggtgccaccgaggccaagaaggttacttttggggcggaggtagggaaggccaggagactgaggtctcgggtcatatggtcgccggtcgttgccaagacaagggggaagtctgctcgagccggtactgattctgctgctgaagacggtatttctgcagatgtgggcgctgatgtcccagtgaggcggtccaggaggaattcgttcaatcctgccgaggctgaggaagcaggagaggctgttgctgttgacaggaagcccaagcgcaagaatcaggagaatgacgagggcgttgctgttatcgctcaggctagagttacgagaaggtcaaatttggagtggtctgctactgtattgcctcctgctgttgagaagaagagagggaggcagaatgcagctgagtctgatgtgcagaagtccgctctggtggaagtaacagctaggactacaaggtctcgctcaatcgtacctgttgtggtgccacccactgtggttgagaacaagaggaggaagactggagatccacaaacaactgtagagttgactatgctttcagatgtgcccagaagtgattttcctgccaccaggtctttaaggaacaaaattgtccacgttaacaacagcgtcgtggacgaaactcacactaccaggcagttggaaaacaagatgcgtccgtctactcgtaggcatcaacaggttgcatcttctccggaggataaaggtcaaaaaattcctgctaccagtaagtcccctctactgaggtggtcacggagaaactattctgaggccaatagtgcaaattcagtaaacatcaaattggccaaagactcgagcacagctcagccattggcacaccataattctcattctgaagatttggagaaacaaccagcagttaaagaaccaattaaacggtcaacacgtaaatctattgctttggctgcacttgagaaagagaaggatgtaattgaaggaaagaaccctgaagcacatgttaggcgatcaacgaggaaatcagttgtgcaggttaaagataccaaaagtattgttgaagagactcaatatgctaacagtgaagatgtggcgaagcaaccagcaactaaaggacctgctagggggctgagacgtaaatctgttatcacagaattgcatgagaaagagaagagtctcattgccgaaaagaacatggaaacagatgaagcgatattaacgcggaagcctgtaatcccagttaaaaatattaaagctgttggtgaaggaattcaaattggtaagggcaaagatgtggataaacaatttgttgtgaagcaacctactaggcgatcatcgcgcaaatctgtgctgcctgatatgcttgagaataatagtggacttctagcacccaaaatgaatgctgagatgaatgttaggagatcaacacggaagtctgttcttcctgacatgcataatgagaagcaagatcaccataaaatggctagaaatgagaacttgcaaagtggtaaatatcaagatggtgagaagcaacagaaagtaaaagattctattaggcaatcaaggagatctatcgctacagtgctacttgagggacaaaataatgatgaaggaaaaaagttcaaaaatcctacgaggaggacaacacacaaatctcatgcccttaatgcagttgaagaggtcagcatggatcacattgaagttggtgaagaaggcttgaaattgaggaagcgcagtaggtttttgctggaaatatcatcttcagctaatgtttcctggaagcatcagaatgcacagatctctaatgaaaaagataacacagaaggatcgcagcaggcatcaaattgcacaacttcaaagagaaggtcttcaaagaagagacgaacaactgctccagaagaagtgatgcctttcaaggtggcaaatgatgacatagttatcatggaagaaacaaaggacacacttgaatataataatgagtctagtagtaaagttcaagaaatttgtcaggttaatgctgcaagagaagagttctcttcaggtccattgcttgtaacagtagctcctagtgacgaaatttgcacagtgcagagtgtagctgtggtgatacctgggtcagaatctggtgacgatgcaaatcaaagttctgataagagtaagcaacctcaggaacattctgtcactcaaactgttgatgaccatttatctgaaacaagaagtgggaaattagatcaatcaacatgcatcacaggattagtctctgacaattgtgttgtctcagaggacaaaacattgatgagtgaagaccgtgaagagcaaagccctgtgtccggagaacagagagttagcttggaagcaaatgccaatgagcctgaggaaaagaacctagctaacgtcacatcaactgatctccacaccaaaagtctgcagcatgatattgacagaatagctaaagagactgataaagaagttttagctcaggagaattgtaatgaccagcctgttcctgcccagactgaccaagaaattaagttaaacgatgaacttgctgatccggatgttttagctcaggagaattgtaatgaccagcccgttcctgcccagactgacctagaaattaagttacacgatgaacttgctgatccggatgttttagctcaggagaattgtaatgaccagcctgttccggcccagactgacctagaaatgaagttaaacgatgaacttgctgatccggaagttttagctcaggagaattgtaatgaccagcctgttcttgctcagactgacctagaaactaagttaaacgatgaacttgctgatctggctatggaatcaggttgtagcattactgaaaggaatgaagggcttgttgctcataatcttgatcaagaaggtttccttgaagcaacaccagagtgcaaacaggaatgtggtttgcctgaggagacagtaatttcctcaaaagaaacaggatctctgctgtgtgcagatcaatcaccaattggtctggaatctttattttcgcaagaaagcatagttgaatcagtggggcattgtgcacttgcttcagcaacaactcataccgaaaatggctttgatgattcaaaagattgccataacaagtctgcacttgaaaatgttcatgtgccagaaccttgttcacacaatgatactaaaggaggcatttttaaaaatgttgattgtatgcatacatcccagcgagatgatagaatggaaggagtaccagaggctaacactgatgaagaacatgttctgtcagcctttttgctggatgcaaatcacctaaacgtagtcattaattctgaagaagtggtttgtgagggtgaagatagtaaggagcttctccattcggaagactgtaaagcttcatccgagaaaacagatgtgaatgatggcaatgtatatggtattagtgatgctgtagtgagatgtgcactgcatgctccagccgatgataattatgagatttttttgggtcccaatactgatgtaccacgtcaggtttataatgacggatgcagtgatgtcaaagaagatcgatttgcttccaaaccctggacaattgatattattgaggatgcctctgtcaaagaaagatcaaatttaaaagattggcaacttgattccaagttggagggcacagaaatagtggaatctggcctttacttcaataaggatattggtaacattttacatagtggatctattggtgaaataactccatctggttctggtttatcaaaagattcatctgtggactatagaggggaggttttagatggcttctcaatggaagcatctcttgaaaggtcttctacacgtggggaacaaaatggttgtagactagatgctattgagaatccttcaattactttagcaacttctggttataagcatgaaggtgctttatctgaggaagcagtgtacacaaagaagaattacgctggaacatgcttgtcaaatcccagggaattaatcatggagctgcaatcccatttctcaaaggaaaacataaatgaatctgatcctcatgacagccttgtattcccaactgctgaaaattcagcagatgaacagctggttaaagtacaccatggttctaatctgtctcagttaggattaactgatctgttggatggaccaattgggtgttccaataccgacgtgttgtgccagtgtgacaatcataaaaatcaatccaatgaggacaaggtagaggaagttgaggcggtgtctgctgctaaatacatagaaagtgaagttgtgctgctcccatctcaagagagatcaaatttgaataatgagcagcttaacaccaagttggaaagcccaaacattatgggatcttgccttaactgtgataacgatgtttgtaatacttcggacaatggatctgtttttgtcattggtaaaagaactccatctgcttctggcttaccagaagattatcctaaggatagtgacttgcaacaaccggttttagatagcttctcagtggtttcatcttttcaagacaatatatctgggaagaaaactgtttctggtgtagcaggcagtgagattctttctttaagtttagcaactcctgattataaacatgaagatggtttctctgaggaagcagtatgcagaacaaagaattatactggaacttcctcggtagatccgaggcatttagacatggaggggcactctatttactctgagggagatacataccaaggtccttgtcaagatctaggcagacatgaagaacaagagagctgcatgtctattcctatgcaagccaaagaaagtggaggggttttgaggtctagccacacgaaagggtcagttacagcagcccaaattgatttggcaggtgatgcccatcttattgtgagtgataatgctgctgccaagcaagtgtttagtgaggagaaagaggaaacaaaatctatctcttcttcagatattgatatccttcatgaaaaatcatactccagtggacacgatgaccatgctgcttgtgctgccgaaactcagttctaccatccacagaaagcatctatatctgatggactacatttgggtcctagttctttgcaagtagaatcactggatgctttggatagcgatatactgtatgttaacacaggagttctcgagcagcatcataaagagggttactatgaacccagtgtctaccaaatcacttcaggcatttgcacaatgtctgaagctgaaccattcgaagttttagaaactggaaaagatgtaaaaacgccatctaagctagatgagcaacttaatcctgggttggacggagatgaagctgagaaacacagcttagactgtggtacagacaccagtcctgtgatgagcaagagaaccctttcttcaccaggatcaggaccatgccagcagtatgtaaatgaaagcaccaccagtacacagtcgactgataatcacccaaacgacctacccgctccgagatctcctgaacaatccgcgtgttttcagaatgacaacgattcgggttcagcatttgtcaaagcagcaggcgaagaggtatagatgaactttgcggtaagctgcagagtttcaaagtttccagcgccgtaaaaggaagctacgtagctatgggtgcacctcgtccgaagcctggggacagcacgagccgatctgcagccgcgctgctcaggaacatagagaacacaactgctgttaaagctggccgtcctcctgtcaagccaaacgccgatggtaaggactcgtctaggcgagccctgcagcccataagcggaaggcctgacagtaggtagttcggcggttccttaataagtgtgtcgtgtttgtgttcaaccctttgttgaaagccaggtccgtgtatttgtgcagcttgttgtcatgaagctgctgtgtgcgtgtcatttaacataagcgtgcgtgaagttgtgttatggaagtggctaaatatgtgttcgttaggaggtcaattggcttgaactgaccctgctgttccgtgatttctgtctaaatatacttgtgtggctgtgtcactttgattggccttatcgatcacatgcaatgggat

SEQ ID NO: 30628 - DNA, 7970 bp, Zea Mays
cccctccaccgcccgccggcgttcccacttcaattcgcccagcgcccctttctcctcccgaaaggcagggcaaccctacaaaacgctgtctcggcttcgccgtccagcggaacagtgtacgggagcagttcgtcgcgtgtgtcgcgtcgcgttgcgttgcgccacccactaattcgaacggacgggactgggattcgaaatttcgaacacgcgccgcctgagagagagagagagagtgagagaaagagagagagagagcaggagagatggtcaggcctttgtgatctcccgcggggctggaggtgtgcggggatggatctcgcggggatgaagcggcgggagctccaggcgctctgcaagcggcacggcctccccgccgggggcaccaacgccgacctcgtcggacgtctcgacgccgtgctttcggggcccgctgttgtggaggaggaggttgccggagtgccggcgaggaaggggtgtctgaagcaaacgggcggaggtgccaccgaggccaagaaggttacttttggggcggaggtagggaaggccaggagactgaggtctcgggtcatatggtcgccggtcgttgccaagacaagggggaagtctgctcgagccggtactgattctgctgctgaagacggtatttctgcagatgtgggcgctgatgtcccagtgaggcggtccaggaggaattcgttcaatcctgccgaggctgaggaagcaggagaggctgttgctgttgacaggaagcccaagcgcaagaatcaggagaatgacgagggcgttgctgttatcgctcaggctagagttacgagaaggtcaaatttggagtggtctgctactgtattgcctcctgctgttgagaagaagagagggaggcagaatgcagctgagtctgatgtgcagaagtccgctctggtggaagtaacagctaggactacaaggtctcgctcaatcgtacctgttgtggtgccacccactgtggttgagaacaagaggaggaagactggagatccacaaacaactgtagagttgactatgctttcagatgtgcccagaagtgattttcctgccaccaggtctttaaggaacaaaattgtccacgttaacaacagcgtcgtggacgaaactcacactaccaggcagttggaaaacaagatgcgtccgtctactcgtaggcatcaacaggttgcatcttctccggaggataaaggtcaaaaaattcctgctaccagtaagtcccctctactgaggtggtcacggagaaactattctgaggccaatagtgcaaattcagtaaacatcaaattggccaaagactcgagcacagctcagccattggcacaccataattctcattctgaagatttggagaaacaaccagcagttaaagaaccaattaaacggtcaacacgtaaatctattgctttggctgcacttgagaaagagaaggatgtaattgaaggaaagaaccctgaagcacatgttaggcgatcaacgaggaaatcagttgtgcaggttaaagataccaaaagtattgttgaagagactcaatatgctaacagtgaagatgtggcgaagcaaccagcaactaaaggacctgctagggggctgagacgtaaatctgttatcacagaattgcatgagaaagagaagagtctcattgccgaaaagaacatggaaacagatgaagcgatattaacgcggaagcctgtaatcccagttaaaaatattaaagctgttggtgaaggaattcaaattggtaagggcaaagatgtggataaacaatttgttgtgaagcaacctactaggcgatcatcgcgcaaatctgtgctgcctgatatgcttgagaataatagtggacttctagcacccaaaatgaatgctgagatgaatgttaggagatcaacacggaagtctgttcttcctgacatgcataatgagaagcaagatcaccataaaatggctagaaatgagaacttgcaaagtggtaaatatcaagatggtgagaagcaacagaaagtaaaagattctattaggcaatcaaggagatctatcgctacagtgctacttgagggacaaaataatgatgaaggaaaaaagttcaaaaatcctacgaggaggacaacacacaaatctcatgcccttaatgcagttgaagaggtcagcatggatcacattgaagttggtgaagaaggcttgaaattgaggaagcgcagtaggtttttgctggaaatatcatcttcagctaatgtttcctggaagcatcagaatgcacagatctctaatgaaaaagataacacagaaggatcgcagcaggcatcaaattgcacaacttcaaagagaaggtcttcaaagaagagacgaacaactgctccagaagaagtgatgcctttcaaggtggcaaatgatgacatagttatcatggaagaaacaaaggacacacttgaatataataatgagtctagtagtaaagttcaagaaatttgtcaggttaatgctgcaagagaagagttctcttcaggtccattgcttgtaacagtagctcctagtgacgaaatttgcacagtgcagagtgtagctgtggtgatacctgggtcagaatctggtgacgatgcaaatcaaagttctgataagagtaagcaacctcaggaacattctgtcactcaaactgttgatgaccatttatctgaaacaagaagtgggaaattagatcaatcaacatgcatcacaggattagtctctgacaattgtgttgtctcagaggacaaaacattgatgagtgaagaccgtgaagagcaaagccctgtgtccggagaacagagagttagcttggaagcaaatgccaatgagcctgaggaaaagaacctagctaacgtcacatcaactgatctccacaccaaaagtctgcagcatgatattgacagaatagctaaagagactgataaagagcatgaagaaaaatatggagtgagccctatagctgttgaaaagtgcgtctgtcgtgaagcaagtgcatgtgaatctgcacgaaaacccctaaccgttatcttttctaacaatctccacaccaaacatctgcaacatgattgtgatgtgctaattaaggagactggtgaagaagttttagctcaggagaattgtaatgaccagcctgttcctgcccagactgaccaagaaattaagttaaacgatgaacttgctgatccggatgttttagctcaggagaattgtaatgaccagcccgttcctgcccagactgacctagaaattaagttacacgatgaacttgctgatccggaccatgaagagcaaagccctgtatccggagaacggagagttagcttggaagcaaatgccaacgagcctgaggaaaagaacctagctaacgtcatatcaattgatctccacaccaaaagtctgcagcatgataatggcagaatagctgaagagactgataaagagcatgaagaaaaatatgcagttagccctatagccgttgaaaagagcttccgtcaggaagcaagtgcaattgaatctgcaggaaaacccctaactgtcatcttttctaacgatctccacaccaaacatctgcaacatgattgtgatgtgctaattaaggagactggtgaagaagttttagctcaggagaattgtaatgaccagcctgttcctgcccagaccgacctagaaattaagttaaatgatgaacttgctgatccggatgttttagctcaggagaattgtaatgaccagcctgttcctgccaacgagcctgaggaaaagaacctagctaacgtcatatcaactgatctccacaccaaaactctgcagcatgataatgacagaatagctgaagagactgataaagaccatgaagagcaaagcaatgtgttcggagaacggagagttagcttggaagcaaatgccaacgagcctgaggaaaagaacctagctaacgtcatatcaactgatctccacaccaaaactctgcagcatgataatgacagaatagctgaagagactgataaagaccatgaagagcaaagcaatgtgtccggagaacggagagttagcttggaagcaaatgccaacgagcctgaggaaaagaacctagctaacgtcatatcaactgatctccacaccaaaactctgcagcatgataatgacagaatagctgaagagactgataaagatgtttcgtctttggttttccctattgaagagcatgaagaaaaatatgcagtgagccctatagctgttgaaaagagcgtcagtcgggaagccagtgcatgtgaatctgcaggaaaacccctaactgtcatcttttctaacgatctccacaccaaacatctgcaacatgattgtgatgtgctaattaaggagactggtgaagatgttttagctcaggagaattgtaatgaccagcctgttccggcccagactgacctagaaatgaagttaaacgatgaacttgctgatccggaagttttagctcaggagaattgtaatgaccagcctgttcttgctcagactgacctagaaactaagttaaacgatgaacttgctgatctggctatggaatcaggttgtagcattactgaaaggaatgaagggcttgttgctcataatcttgatcaagaaggtttccttgaagcaacaccagagtgcaaacaggaatgtggtttgcctgaggagacagtaatttcctcaaaagaaacaggatctctgctgtgtgcagatcaatcaccaattggtctggaatctttattttcgcaagaaagcatagttgaatcagtggggcattgtgcacttgcttcagcaacaactcataccgaaaatggctttgatgattcaaaagattgccataacaagtctgcacttgaaaatgttcatgtgccagaaccttgttcacacaatgatactaaaggaggcatttttaaaaatgttgattgtatgcatacatcccagcgagatgatagaatggaaggagtaccagaggctaacactgatgaagaacatgttctgtcagcctttttgctggatgcaaatcacctaaacgtagtcattaattctgaagaagtggtttgtgagggtgaagatagtaaggagcttctccattcggaagactgtaaagcttcatccgagaaaacagatgtgaatgatggcaatgtatatggtattagtgatgctgtagtgagatgtgcactgcatgctccagccgatgataattatgagatttttttgggtcccaatactgatgtaccacgtcaggtttataatgacggatgcagtgatgtcaaagaagatcgatttgcttccaaaccctggacaattgatattattgaggatgcctctgtcaaagaaagatcaaatttaaaagattggcaacttgattccaagttggagggcacagaaatagtggaatctggcctttacttcaataaggatattggtaacattttacatagtggatctattggtgaaataactccatctggttctggtttatcaaaagattcatctgtggactatagaggggaggttttagatggcttctcaatggaagcatctcttgaaaggtcttctacacgtggggaacaaaatggttgtagactagatgctattgagaatccttcaattactttagcaacttctggttataagcatgaaggtgctttatctgaggaagcagtgtacacaaagaagaattacgctggaacatgcttgtcaaatcccagggaattaatcatggagctgcaatcccatttctcaaaggaaaacataaatgaatctgatcctcatgacagccttgtattcccaactgctgaaaattcagcagatgaacagctggttaaagtacaccatggttctaatctgtctcagttaggattaactgatctgttggatggaccaattgggtgttccaataccgacgtgttgtgccagtgtgacaatcataaaaatcaatccaatgaggacaaggtagaggaagttgaggcggtgtctgctgctaaatacatagaaagtgaagttgtgctgctcccatctcaagagagatcaaatttgaataatgagcagcttaacaccaagttggaaagcccaaacattatgggatcttgccttaactgtgataacgatgtttgtaatacttcggacaatggatctgtttttgtcattggtaaaagaactccatctgcttctggcttaccagaagattatcctaaggatagtgacttgcaacaaccggttttagatagcttctcagtggtttcatcttttcaagacaatatatctgggaagaaaactgtttctggtgtagcaggcagtgagattctttctttaagtttagcaactcctgattataaacatgaagatggtttctctgaggaagcagtatgcagaacaaagaattatactggaacttcctcggtagatccgaggcatttagacatggaggggcactctatttactctgagggaggtactgaaaaatctaatctgcaagataatcttgcatttctaagcgctgagagtggaaaagatgaacctattatttgccatgttgagaaactggttgacgcacatgcttcttcagatacataccaaggtccttgtcaagatctaggcagacatgaagaacaagagagctgcatgtctattcctatgcaagccaaagaaagtggaggggttttgaggtctagccacacgaaagggtcagttacagcagcccaaattgatttggcaggtgatgcccatcttattgtgagtgataatgctgctgccaagcaagtgtttagtgaggagaaagaggaaacaaaatctatctcttcttcagatattgatatccttcatgaaaaatcatactccagtggacacgatgaccatgctgcttgtgctgccgaaactcagttctaccatccacagaaagcatctatatctgatggactacatttgggtcctagttctttgcaagtagaatcactggatgctttggatagcgatatactgtatgttaacacaggagttctcgagcagcatcataaagagggttactatgaacccagtgtctaccaaatcacttcaggcatttgcacaatgtctgaagctgaaccattcgaagttttagaaactggaaaagatgtaaaaacgccatctaagctagatgagcaacttaatcctgggttggacggagatgaagctgagaaacacagcttagactgtggtacagacaccagtcctgtgatgagcaagagaaccctttcttcaccaggatcaggaccatgccagcagtatgtaaatgaaagcaccaccagtacacagtcgactgataatcacccaaacgacctacccgctccgagatctcctgaacaatccgcgtgttttcagaatgacaacgattcgggttcagtaggcatttgtcaaagcagcaggcgaagaggtatagatgaactttgcggtaagctgcagagtttcaaagtttccagcgccgtaaaaggaagctacgtagctatgggtgcacctcgtccgaagcctggggacagcacgagccgatctgcagccgcgctgctcaggaacatagagaacacaactgctgttaaagctggccgtcctcctgtcaagccaaacgccgatggtaaggactcgtctaggcgagccctgcagcccataagcggaaggcctgacagtaggtagttcggcggttccttaataagtgtgtcgtgtttgtgttcaaccctttgttgaaagccaggtccgtgtatttgtgcagcttgttgtcatgaagctgctgtgtgcgtgtcatttaacataagcgtgcgtgaagttgtgttatggaagtggctaaatatgtgttcgttaggaggtcaattggcttgaactgaccctgctgttccgtgatttctgtctaaatatacttgtgtggctgtgtcactttgattggccttatcgatcacatgcaatgggat

SEQ ID NO: 30629 - DNA, 7829 bp, Zea Mays
cccctccaccgcccgccggcgttcccacttcaattcgcccagcgcccctttctcctcccgaaaggcagggcaaccctacaaaacgctgtctcggcttcgccgtccagcggaacagtgtacgggagcagttcgtcgcgtgtgtcgcgtcgcgttgcgttgcgccacccactaattcgaacggacgggactgggattcgaaatttcgaacacgcgccgcctgagagagagagagagagtgagagaaagagagagagagagcaggagagatggtcaggcctttgtgatctcccgcggggctggaggtgtgcggggatggatctcgcggggatgaagcggcgggagctccaggcgctctgcaagcggcacggcctccccgccgggggcaccaacgccgacctcgtcggacgtctcgacgccgtgctttcggggcccgctgttgtggaggaggaggttgccggagtgccggcgaggaaggggtgtctgaagcaaacgggcggaggtgccaccgaggccaagaaggttacttttggggcggaggtagggaaggccaggagactgaggtctcgggtcatatggtcgccggtcgttgccaagacaagggggaagtctgctcgagccggtactgattctgctgctgaagacggtatttctgcagatgtgggcgctgatgtcccagtgaggcggtccaggaggaattcgttcaatcctgccgaggctgaggaagcaggagaggctgttgctgttgacaggaagcccaagcgcaagaatcaggagaatgacgagggcgttgctgttatcgctcaggctagagttacgagaaggtcaaatttggagtggtctgctactgtattgcctcctgctgttgagaagaagagagggaggcagaatgcagctgagtctgatgtgcagaagtccgctctggtggaagtaacagctaggactacaaggtctcgctcaatcgtacctgttgtggtgccacccactgtggttgagaacaagaggaggaagactggagatccacaaacaactgtagagttgactatgctttcagatgtgcccagaagtgattttcctgccaccaggtctttaaggaacaaaattgtccacgttaacaacagcgtcgtggacgaaactcacactaccaggcagttggaaaacaagatgcgtccgtctactcgtaggcatcaacaggttgcatcttctccggaggataaaggtcaaaaaattcctgctaccagtaagtcccctctactgaggtggtcacggagaaactattctgaggccaatagtgcaaattcagtaaacatcaaattggccaaagactcgagcacagctcagccattggcacaccataattctcattctgaagatttggagaaacaaccagcagttaaagaaccaattaaacggtcaacacgtaaatctattgctttggctgcacttgagaaagagaaggatgtaattgaaggaaagaaccctgaagcacatgttaggcgatcaacgaggaaatcagttgtgcaggttaaagataccaaaagtattgttgaagagactcaatatgctaacagtgaagatgtggcgaagcaaccagcaactaaaggacctgctagggggctgagacgtaaatctgttatcacagaattgcatgagaaagagaagagtctcattgccgaaaagaacatggaaacagatgaagcgatattaacgcggaagcctgtaatcccagttaaaaatattaaagctgttggtgaaggaattcaaattggtaagggcaaagatgtggataaacaatttgttgtgaagcaacctactaggcgatcatcgcgcaaatctgtgctgcctgatatgcttgagaataatagtggacttctagcacccaaaatgaatgctgagatgaatgttaggagatcaacacggaagtctgttcttcctgacatgcataatgagaagcaagatcaccataaaatggctagaaatgagaacttgcaaagtggtaaatatcaagatggtgagaagcaacagaaagtaaaagattctattaggcaatcaaggagatctatcgctacagtgctacttgagggacaaaataatgatgaaggaaaaaagttcaaaaatcctacgaggaggacaacacacaaatctcatgcccttaatgcagttgaagaggtcagcatggatcacattgaagttggtgaagaaggcttgaaattgaggaagcgcagtaggtttttgctggaaatatcatcttcagctaatgtttcctggaagcatcagaatgcacagatctctaatgaaaaagataacacagaaggatcgcagcaggcatcaaattgcacaacttcaaagagaaggtcttcaaagaagagacgaacaactgctccagaagaagtgatgcctttcaaggtggcaaatgatgacatagttatcatggaagaaacaaaggacacacttgaatataataatgagtctagtagtaaagttcaagaaatttgtcaggttaatgctgcaagagaagagttctcttcaggtccattgcttgtaacagtagctcctagtgacgaaatttgcacagtgcagagtgtagctgtggtgatacctgggtcagaatctggtgacgatgcaaatcaaagttctgataagagtaagcaacctcaggaacattctgtcactcaaactgttgatgaccatttatctgaaacaagaagtgggaaattagatcaatcaacatgcatcacaggattagtctctgacaattgtgttgtctcagaggacaaaacattgatgagtgaagaccgtgaagagcaaagccctgtgtccggagaacagagagttagcttggaagcaaatgccaatgagcctgaggaaaagaacctagctaacgtcacatcaactgatctccacaccaaaagtctgcagcatgatattgacagaatagctaaagagactgataaagaagttttagctcaggagaattgtaatgaccagcctgttcctgcccagactgaccaagaaattaagttaaacgatgaacttgctgatccggatgttttagctcaggagaattgtaatgaccagcccgttcctgcccagactgacctagaaattaagttacacgatgaacttgctgatccggaccatgaagagcaaagccctgtatccggagaacggagagttagcttggaagcaaatgccaacgagcctgaggaaaagaacctagctaacgtcatatcaattgatctccacaccaaaagtctgcagcatgataatggcagaatagctgaagagactgataaagatgttttgtcttttgttttccctattgaagagcatgaagaaaaatatgcagttagccctatagccgttgaaaagagcttccgtcaggaagcaagtgcaattgaatctgcaggaaaacccctaactgtcatcttttctaacgatctccacaccaaacatctgcaacatgattgtgatgtgctaattaaggagactggtgaagaagttttagctcaggagaattgtaatgaccagcctgttcctgcccagaccgacctagaaattaagttaaatgatgaacttgctgatccggatgttttagctcaggagaattgtaatgaccagcctgttcctgccaacgagcctgaggaaaagaacctagctaacgtcatatcaactgatctccacaccaaaactctgcagcatgataatgacagaatagctgaagagactgataaagaccatgaagagcaaagcaatgtgttcggagaacggagagttagcttggaagcaaatgccaacgagcctgaggaaaagaacctagctaacgtcatatcaactgatctccacaccaaaactctgcagcatgataatgacagaatagctgaagagactgataaagaccatgaagagcaaagcaatgtgtccggagaacggagagttagcttggaagcaaatgccaacgagcctgaggaaaagaacctagctaacgtcatatcaactgatctccacaccaaaactctgcagcatgataatgacagaatagctgaagagactgataaagatgtttcgtctttggttttccctattgaagagcatgaagaaaaatatgcagtgagccctatagctgttgaaaagagcgtcagtcgggaagccagtgcatgtgaatctgcaggaaaacccctaactgtcatcttttctaacgatctccacaccaaacatctgcaacatgattgtgatgtgctaattaaggagactggtgaagatgttttagctcaggagaattgtaatgaccagcctgttccggcccagactgacctagaaatgaagttaaacgatgaacttgctgatccggaagttttagctcaggagaattgtaatgaccagcctgttcttgctcagactgacctagaaactaagttaaacgatgaacttgctgatctggctatggaatcaggttgtagcattactgaaaggaatgaagggcttgttgctcataatcttgatcaagaaggtttccttgaagcaacaccagagtgcaaacaggaatgtggtttgcctgaggagacagtaatttcctcaaaagaaacaggatctctgctgtgtgcagatcaatcaccaattggtctggaatctttattttcgcaagaaagcatagttgaatcagtggggcattgtgcacttgcttcagcaacaactcataccgaaaatggctttgatgattcaaaagattgccataacaagtctgcacttgaaaatgttcatgtgccagaaccttgttcacacaatgatactaaaggaggcatttttaaaaatgttgattgtatgcatacatcccagcgagatgatagaatggaaggagtaccagaggctaacactgatgaagaacatgttctgtcagcctttttgctggatgcaaatcacctaaacgtagtcattaattctgaagaagtggtttgtgagggtgaagatagtaaggagcttctccattcggaagactgtaaagcttcatccgagaaaacagatgtgaatgatggcaatgtatatggtattagtgatgctgtagtgagatgtgcactgcatgctccagccgatgataattatgagatttttttgggtcccaatactgatgtaccacgtcaggtttataatgacggatgcagtgatgtcaaagaagatcgatttgcttccaaaccctggacaattgatattattgaggatgcctctgtcaaagaaagatcaaatttaaaagattggcaacttgattccaagttggagggcacagaaatagtggaatctggcctttacttcaataaggatattggtaacattttacatagtggatctattggtgaaataactccatctggttctggtttatcaaaagattcatctgtggactatagaggggaggttttagatggcttctcaatggaagcatctcttgaaaggtcttctacacgtggggaacaaaatggttgtagactagatgctattgagaatccttcaattactttagcaacttctggttataagcatgaaggtgctttatctgaggaagcagtgtacacaaagaagaattacgctggaacatgcttgtcaaatcccagggaattaatcatggagctgcaatcccatttctcaaaggaaaacataaatgaatctgatcctcatgacagccttgtattcccaactgctgaaaattcagcagatgaacagctggttaaagtacaccatggttctaatctgtctcagttaggattaactgatctgttggatggaccaattgggtgttccaataccgacgtgttgtgccagtgtgacaatcataaaaatcaatccaatgaggacaaggtagaggaagttgaggcggtgtctgctgctaaatacatagaaagtgaagttgtgctgctcccatctcaagagagatcaaatttgaataatgagcagcttaacaccaagttggaaagcccaaacattatgggatcttgccttaactgtgataacgatgtttgtaatacttcggacaatggatctgtttttgtcattggtaaaagaactccatctgcttctggcttaccagaagattatcctaaggatagtgacttgcaacaaccggttttagatagcttctcagtggtttcatcttttcaagacaatatatctgggaagaaaactgtttctggtgtagcaggcagtgagattctttctttaagtttagcaactcctgattataaacatgaagatggtttctctgaggaagcagtatgcagaacaaagaattatactggaacttcctcggtagatccgaggcatttagacatggaggggcactctatttactctgagggaggtactgaaaaatctaatctgcaagataatcttgcatttctaagcgctgagagtggaaaagatgaacctattatttgccatgttgagaaactggttgacgcacatgcttcttcagatacataccaaggtccttgtcaagatctaggcagacatgaagaacaagagagctgcatgtctattcctatgcaagccaaagaaagtggaggggttttgaggtctagccacacgaaagggtcagttacagcagcccaaattgatttggcaggtgatgcccatcttattgtgagtgataatgctgctgccaagcaagtgtttagtgaggagaaagaggaaacaaaatctatctcttcttcagatattgatatccttcatgaaaaatcatactccagtggacacgatgaccatgctgcttgtgctgccgaaactcagttctaccatccacagaaagcatctatatctgatggactacatttgggtcctagttctttgcaagtagaatcactggatgctttggatagcgatatactgtatgttaacacaggagttctcgagcagcatcataaagagggttactatgaacccagtgtctaccaaatcacttcaggcatttgcacaatgtctgaagctgaaccattcgaagttttagaaactggaaaagatgtaaaaacgccatctaagctagatgagcaacttaatcctgggttggacggagatgaagctgagaaacacagcttagactgtggtacagacaccagtcctgtgatgagcaagagaaccctttcttcaccaggatcaggaccatgccagcagtatgtaaatgaaagcaccaccagtacacagtcgactgataatcacccaaacgacctacccgctccgagatctcctgaacaatccgcgtgttttcagaatgacaacgattcgggttcagtaggcatttgtcaaagcagcaggcgaagaggtatagatgaactttgcggtaagctgcagagtttcaaagtttccagcgccgtaaaaggaagctacgtagctatgggtgcacctcgtccgaagcctggggacagcacgagccgatctgcagccgcgctgctcaggaacatagagaacacaactgctgttaaagctggccgtcctcctgtcaagccaaacgccgatggtaaggactcgtctaggcgagccctgcagcccataagcggaaggcctgacagtaggtagttcggcggttccttaataagtgtgtcgtgtttgtgttcaaccctttgttgaaagccaggtccgtgtatttgtgcagcttgttgtcatgaagctgctgtgtgcgtgtcatttaacataagcgtgcgtgaagttgtgttatggaagtggctaaatatgtgttcgttaggaggtcaattggcttgaactgaccctgctgttccgtgatttctgtctaaatatacttgtgtggctgtgtcactttgattggccttatcgatcacatgcaatgggat

SEQ ID NO: 30630 - DNA, 7881 bp, Zea Mays
ccaccgcccgccggcgttcccacttcaattcgcccagcgcccctttctcctcccgaaaggcagggcaaccctacaaaacgctgtctcggcttcgccgtccagcggaacagtgtacgggagcagttcgtcgcgtgtgtcgcgtcgcgttgcgttgcgccacccactaattcgaacggacgggactgggattcgaaatttcgaacacgcgccgcctgagagagagagagagagtgagagaaagagagagagagagcaggagagatggtcaggcctttgtgatctcccgcggggctggaggtgtgcggggatggatctcgcggggatgaagcggcgggagctccaggcgctctgcaagcggcacggcctccccgccgggggcaccaacgccgacctcgtcggacgtctcgacgccgtgctttcggggcccgctgttgtggaggaggaggttgccggagtgccggcgaggaaggggtgtctgaagcaaacgggcggaggtgccaccgaggccaagaaggttacttttggggcggaggtagggaaggccaggagactgaggtctcgggtcatatggtcgccggtcgttgccaagacaagggggaagtctgctcgagccggtactgattctgctgctgaagacggtatttctgcagatgtgggcgctgatgtcccagtgaggcggtccaggaggaattcgttcaatcctgccgaggctgaggaagcaggagaggctgttgctgttgacaggaagcccaagcgcaagaatcaggagaatgacgagggcgttgctgttatcgctcaggctagagttacgagaaggtcaaatttggagtggtctgctactgtattgcctcctgctgttgagaagaagagagggaggcagaatgcagctgagtctgatgtgcagaagtccgctctggtggaagtaacagctaggactacaaggtctcgctcaatcgtacctgttgtggtgccacccactgtggttgagaacaagaggaggaagactggagatccacaaacaactgtagagttgactatgctttcagatgtgcccagaagtgattttcctgccaccaggtctttaaggaacaaaattgtccacgttaacaacagcgtcgtggacgaaactcacactaccaggcagttggaaaacaagatgcgtccgtctactcgtaggcatcaacaggttgcatcttctccggaggataaaggtcaaaaaattcctgctaccagtaagtcccctctactgaggtggtcacggagaaactattctgaggccaatagtgcaaattcagtaaacatcaaattggccaaagactcgagcacagctcagccattggcacaccataattctcattctgaagatttggagaaacaaccagcagttaaagaaccaattaaacggtcaacacgtaaatctattgctttggctgcacttgagaaagagaaggatgtaattgaaggaaagaaccctgaagcacatgttaggcgatcaacgaggaaatcagttgtgcaggttaaagataccaaaagtattgttgaagagactcaatatgctaacagtgaagatgtggcgaagcaaccagcaactaaaggacctgctagggggctgagacgtaaatctgttatcacagaattgcatgagaaagagaagagtctcattgccgaaaagaacatggaaacagatgaagcgatattaacgcggaagcctgtaatcccagttaaaaatattaaagctgttggtgaaggaattcaaattggtaagggcaaagatgtggataaacaatttgttgtgaagcaacctactaggcgatcatcgcgcaaatctgtgctgcctgatatgcttgagaataatagtggacttctagcacccaaaatgaatgctgagatgaatgttaggagatcaacacggaagtctgttcttcctgacatgcataatgagaagcaagatcaccataaaatggctagaaatgagaacttgcaaagtggtaaatatcaagatggtgagaagcaacagaaagtaaaagattctattaggcaatcaaggagatctatcgctacagtgctacttgagggacaaaataatgatgaaggaaaaaagttcaaaaatcctacgaggaggacaacacacaaatctcatgcccttaatgcagttgaagaggtcagcatggatcacattgaagttggtgaagaaggcttgaaattgaggaagcgcagtaggtttttgctggaaatatcatcttcagctaatgtttcctggaagcatcagaatgcacagatctctaatgaaaaagataacacagaaggatcgcagcaggcatcaaattgcacaacttcaaagagaaggtcttcaaagaagagacgaacaactgctccagaagaagtgatgcctttcaaggtggcaaatgatgacatagttatcatggaagaaacaaaggacacacttgaatataataatgagtctagtagtaaagttcaagaaatttgtcaggttaatgctgcaagagaagagttctcttcaggtccattgcttgtaacagtagctcctagtgacgaaatttgcacagtgcagagtgtagctgtggtgatacctgggtcagaatctggtgacgatgcaaatcaaagttctgataagagtaagcaacctcaggaacattctgtcactcaaactgttgatgaccatttatctgaaacaagaagtgggaaattagatcaatcaacatgcatcacaggattagtctctgacaattgtgttgtctcagaggacaaaacattgatgagtgaagaccgtgaagagcaaagccctgtgtccggagaacagagagttagcttggaagcaaatgccaatgagcctgaggaaaagaacctagctaacgtcacatcaactgatctccacaccaaaagtctgcagcatgatattgacagaatagctaaagagactgataaagatgttttgtctttggttttccctattgaagagcatgaagaaaaatatggagtgagccctatagctgttgaaaagtgcgtctgtcgtgaagcaagtgcatgtgaatctgcacgaaaacccctaaccgttatcttttctaacaatctccacaccaaacatctgcaacatgattgtgatgtgctaattaaggagactggtgaagaagttttagctcaggagaattgtaatgaccagcctgttcctgcccagactgaccaagaaattaagttaaacgatgaacttgctgatccggatgttttagctcaggagaattgtaatgaccagcccgttcctgcccagactgacctagaaattaagttacacgatgaacttgctgatccggaccatgaagagcaaagccctgtatccggagaacggagagttagcttggaagcaaatgccaacgagcctgaggaaaagaacctagctaacgtcatatcaattgatctccacaccaaaagtctgcagcatgataatggcagaatagctgaagagactgataaagagcatgaagaaaaatatgcagttagccctatagccgttgaaaagagcttccgtcaggaagcaagtgcaattgaatctgcaggaaaacccctaactgtcatcttttctaacgatctccacaccaaacatctgcaacatgattgtgatgtgctaattaaggagactggtgaagaagttttagctcaggagaattgtaatgaccagcctgttcctgcccagaccgacctagaaattaagttaaatgatgaacttgctgatccggatgttttagctcaggagaattgtaatgaccagcctgttcctgccaacgagcctgaggaaaagaacctagctaacgtcatatcaactgatctccacaccaaaactctgcagcatgataatgacagaatagctgaagagactgataaagaccatgaagagcaaagcaatgtgttcggagaacggagagttagcttggaagcaaatgccaacgagcctgaggaaaagaacctagctaacgtcatatcaactgatctccacaccaaaactctgcagcatgataatgacagaatagctgaagagactgataaagaccatgaagagcaaagcaatgtgtccggagaacggagagttagcttggaagcaaatgccaacgagcctgaggaaaagaacctagctaacgtcatatcaactgatctccacaccaaaactctgcagcatgataatgacagaatagctgaagagactgataaagatgtttcgtctttggttttccctattgaagagcatgaagaaaaatatgcagtgagccctatagctgttgaaaagagcgtcagtcgggaagccagtgcatgtgaatctgcaggaaaacccctaactgtcatcttttctaacgatctccacaccaaacatctgcaacatgattgtgatgtgctaattaaggagactggtgaagatgttttagctcaggagaattgtaatgaccagcctgttccggcccagactgacctagaaatgaagttaaacgatgaacttgctgatccggaagttttagctcaggagaattgtaatgaccagcctgttcttgctcagactgacctagaaactaagttaaacgatgaacttgctgatctggctatggaatcaggttgtagcattactgaaaggaatgaagggcttgttgctcataatcttgatcaagaaggtttccttgaagcaacaccagagtgcaaacaggaatgtggtttgcctgaggagacagtaatttcctcaaaagaaacaggatctctgctgtgtgcagatcaatcaccaattggtctggaatctttattttcgcaagaaagcatagttgaatcagtggggcattgtgcacttgcttcagcaacaactcataccgaaaatggctttgatgattcaaaagattgccataacaagtctgcacttgaaaatgttcatgtgccagaaccttgttcacacaatgatactaaaggaggcatttttaaaaatgttgattgtatgcatacatcccagcgagatgatagaatggaaggagtaccagaggctaacactgatgaagaacatgttctgtcagcctttttgctggatgcaaatcacctaaacgtagtcattaattctgaagaagtggtttgtgagggtgaagatagtaaggagcttctccattcggaagactgtaaagcttcatccgagaaaacagatgtgaatgatggcaatgtatatggtattagtgatgctgtagtgagatgtgcactgcatgctccagccgatgataattatgagatttttttgggtcccaatactgatgtaccacgtcaggtttataatgacggatgcagtgatgtcaaagaagatcgatttgcttccaaaccctggacaattgatattattgaggatgcctctgtcaaagaaagatcaaatttaaaagattggcaacttgattccaagttggagggcacagaaatagtggaatctggcctttacttcaataaggatattggtaacattttacatagtggatctattggtgaaataactccatctggttctggtttatcaaaagattcatctgtggactatagaggggaggttttagatggcttctcaatggaagcatctcttgaaaggtcttctacacgtggggaacaaaatggttgtagactagatgctattgagaatccttcaattactttagcaacttctggttataagcatgaaggtgctttatctgaggaagcagtgtacacaaagaagaattacgctggaacatgcttgtcaaatcccagggaattaatcatggagctgcaatcccatttctcaaaggaaaacataaatgaatctgatcctcatgacagccttgtattcccaactgctgaaaattcagcagatgaacagctggttaaagtacaccatggttctaatctgtctcagttaggattaactgatctgttggatggaccaattgggtgttccaataccgacgtgttgtgccagtgtgacaatcataaaaatcaatccaatgaggacaaggtagaggaagttgaggcggtgtctgctgctaaatacatagaaagtgaagttgtgctgctcccatctcaagagagatcaaatttgaataatgagcagcttaacaccaagttggaaagcccaaacattatgggatcttgccttaactgtgataacgatgtttgtaatacttcggacaatggatctgtttttgtcattggtaaaagaactccatctgcttctggcttaccagaagattatcctaaggatagtgacttgcaacaaccggttttagatagcttctcagtggtttcatcttttcaagacaatatatctgggaagaaaactgtttctggtgtagcaggcagtgagattctttctttaagtttagcaactcctgattataaacatgaagatggtttctctgaggaagcagtatgcagaacaaagaattatactggaacttcctcggtagatccgaggcatttagacatggaggggcactctatttactctgagggagatacataccaaggtccttgtcaagatctaggcagacatgaagaacaagagagctgcatgtctattcctatgcaagccaaagaaagtggaggggttttgaggtctagccacacgaaagggtcagttacagcagcccaaattgatttggcaggtgatgcccatcttattgtgagtgataatgctgctgccaagcaagtgtttagtgaggagaaagaggaaacaaaatctatctcttcttcagatattgatatccttcatgaaaaatcatactccagtggacacgatgaccatgctgcttgtgctgccgaaactcagttctaccatccacagaaagcatctatatctgatggactacatttgggtcctagttctttgcaagtagaatcactggatgctttggatagcgatatactgtatgttaacacaggagttctcgagcagcatcataaagagggttactatgaacccagtgtctaccaaatcacttcaggcatttgcacaatgtctgaagctgaaccattcgaagttttagaaactggaaaagatgtaaaaacgccatctaagctagatgagcaacttaatcctgggttggacggagatgaagctgagaaacacagcttagactgtggtacagacaccagtcctgtgatgagcaagagaaccctttcttcaccaggatcaggaccatgccagcagtatgtaaatgaaagcaccaccagtacacagtcgactgataatcacccaaacgacctacccgctccgagatctcctgaacaatccgcgtgttttcagaatgacaacgattcgggttcagtaggcatttgtcaaagcagcaggcgaagaggtatagatgaactttgcggtaagctgcagagtttcaaagtttccagcgccgtaaaaggaagctacgtagctatgggtgcacctcgtccgaagcctggggacagcacgagccgatctgcagccgcgctgctcaggaacatagagaacacaactgctgttaaagctggccgtcctcctgtcaagccaaacgccgatggtaaggactcgtctaggcgagccctgcagcccataagcggaaggcctgacagtaggtagttcggcggttccttaataagtgtgtcgtgtttgtgttcaaccctttgttgaaagccaggtccgtgtatttgtgcagcttgttgtcatgaagctgctgtgtgcgtgtcatttaacataagcgtgcgtgaagttgtgttatggaagtggctaaatatgtgttcgttaggaggtcaattggcttgaactgaccctgctgttccgtgatttctgtctaaatatacttgtgtggctgtgtcactttgattggccttatcgatcacatgcaatgggat

SEQ ID NO: 30631 - DNA, 7840 bp, Zea Mays
gcccagcgcccctttctcctcccgaaaggcagggcaaccctacaaaacgctgtctcggcttcgccgtccagcggaacagtgtacgggagcagttcgtcgcgtgtgtcgcgtcgcgttgcgttgcgccacccactaattcgaacggacgggactgggattcgaaatttcgaacacgcgccgcctgagagagagagagagagtgagagaaagagagagagagagcaggagagatggtcaggcctttgtgatctcccgcggggctggaggtgtgcggggatggatctcgcggggatgaagcggcgggagctccaggcgctctgcaagcggcacggcctccccgccgggggcaccaacgccgacctcgtcggacgtctcgacgccgtgctttcggggcccgctgttgtggaggaggaggttgccggagtgccggcgaggaaggggtgtctgaagcaaacgggcggaggtgccaccgaggccaagaaggttacttttggggcggaggtagggaaggccaggagactgaggtctcgggtcatatggtcgccggtcgttgccaagacaagggggaagtctgctcgagccgatgtgggcgctgatgtcccagtgaggcggtccaggaggaattcgttcaatcctgccgaggctgaggaagcaggagaggctgttgctgttgacaggaagcccaagcgcaagaatcaggagaatgacgagggcgttgctgttatcgctcaggctagagttacgagaaggtcaaatttggagtggtctgctactgtattgcctcctgctgttgagaagaagagagggaggcagaatgcagctgagtctgatgtgcagaagtccgctctggtggaagtaacagctaggactacaaggtctcgctcaatcgtacctgttgtggtgccacccactgtggttgagaacaagaggaggaagactggagatccacaaacaactgtagagttgactatgctttcagatgtgcccagaagtgattttcctgccaccaggtctttaaggaacaaaattgtccacgttaacaacagcgtcgtggacgaaactcacactaccaggcagttggaaaacaagatgcgtccgtctactcgtaggcatcaacaggttgcatcttctccggaggataaaggtcaaaaaattcctgctaccagtaagtcccctctactgaggtggtcacggagaaactattctgaggccaatagtgcaaattcagtaaacatcaaattggccaaagactcgagcacagctcagccattggcacaccataattctcattctgaagatttggagaaacaaccagcagttaaagaaccaattaaacggtcaacacgtaaatctattgctttggctgcacttgagaaagagaaggatgtaattgaaggaaagaaccctgaagcacatgttaggcgatcaacgaggaaatcagttgtgcaggttaaagataccaaaagtattgttgaagagactcaatatgctaacagtgaagatgtggcgaagcaaccagcaactaaaggacctgctagggggctgagacgtaaatctgttatcacagaattgcatgagaaagagaagagtctcattgccgaaaagaacatggaaacagatgaagcgatattaacgcggaagcctgtaatcccagttaaaaatattaaagctgttggtgaaggaattcaaattggtaagggcaaagatgtggataaacaatttgttgtgaagcaacctactaggcgatcatcgcgcaaatctgtgctgcctgatatgcttgagaataatagtggacttctagcacccaaaatgaatgctgagatgaatgttaggagatcaacacggaagtctgttcttcctgacatgcataatgagaagcaagatcaccataaaatggctagaaatgagaacttgcaaagtggtaaatatcaagatggtgagaagcaacagaaagtaaaagattctattaggcaatcaaggagatctatcgctacagtgctacttgagggacaaaataatgatgaaggaaaaaagttcaaaaatcctacgaggaggacaacacacaaatctcatgcccttaatgcagttgaagaggtcagcatggatcacattgaagttggtgaagaaggcttgaaattgaggaagcgcagtaggtttttgctggaaatatcatcttcagctaatgtttcctggaagcatcagaatgcacagatctctaatgaaaaagataacacagaaggatcgcagcaggcatcaaattgcacaacttcaaagagaaggtcttcaaagaagagacgaacaactgctccagaagaagtgatgcctttcaaggtggcaaatgatgacatagttatcatggaagaaacaaaggacacacttgaatataataatgagtctagtagtaaagttcaagaaatttgtcaggttaatgctgcaagagaagagttctcttcaggtccattgcttgtaacagtagctcctagtgacgaaatttgcacagtgcagagtgtagctgtggtgatacctgggtcagaatctggtgacgatgcaaatcaaagttctgataagagtaagcaacctcaggaacattctgtcactcaaactgttgatgaccatttatctgaaacaagaagtgggaaattagatcaatcaacatgcatcacaggattagtctctgacaattgtgttgtctcagaggacaaaacattgatgagtgaagaccgtgaagagcaaagccctgtgtccggagaacagagagttagcttggaagcaaatgccaatgagcctgaggaaaagaacctagctaacgtcacatcaactgatctccacaccaaaagtctgcagcatgatattgacagaatagctaaagagactgataaagatgttttgtctttggttttccctattgaagagcatgaagaaaaatatggagtgagccctatagctgttgaaaagtgcgtctgtcgtgaagcaagtgcatgtgaatctgcacgaaaacccctaaccgttatcttttctaacaatctccacaccaaacatctgcaacatgattgtgatgtgctaattaaggagactggtgaagaagttttagctcaggagaattgtaatgaccagcctgttcctgcccagactgaccaagaaattaagttaaacgatgaacttgctgatccggatgttttagctcaggagaattgtaatgaccagcccgttcctgcccagactgacctagaaattaagttacacgatgaacttgctgatccggaccatgaagagcaaagccctgtatccggagaacggagagttagcttggaagcaaatgccaacgagcctgaggaaaagaacctagctaacgtcatatcaattgatctccacaccaaaagtctgcagcatgataatggcagaatagctgaagagactgataaagatgttttgtcttttgttttccctattgaagagcatgaagaaaaatatgcagttagccctatagccgttgaaaagagcttccgtcaggaagcaagtgcaattgaatctgcaggaaaacccctaactgtcatcttttctaacgatctccacaccaaacatctgcaacatgattgtgatgtgctaattaaggagactggtgaagaagttttagctcaggagaattgtaatgaccagcctgttcctgcccagaccgacctagaaattaagttaaatgatgaacttgctgatccggatgttttagctcaggagaattgtaatgaccagcctgttcctgccaacgagcctgaggaaaagaacctagctaacgtcatatcaactgatctccacaccaaaactctgcagcatgataatgacagaatagctgaagagactgataaagaccatgaagagcaaagcaatgtgttcggagaacggagagttagcttggaagcaaatgccaacgagcctgaggaaaagaacctagctaacgtcatatcaactgatctccacaccaaaactctgcagcatgataatgacagaatagctgaagagactgataaagaccatgaagagcaaagcaatgtgtccggagaacggagagttagcttggaagcaaatgccaacgagcctgaggaaaagaacctagctaacgtcatatcaactgatctccacaccaaaactctgcagcatgataatgacagaatagctgaagagactgataaagatgtttcgtctttggttttccctattgaagagcatgaagaaaaatatgcagtgagccctatagctgttgaaaagagcgtcagtcgggaagccagtgcatgtgaatctgcaggaaaacccctaactgtcatcttttctaacgatctccacaccaaacatctgcaacatgattgtgatgtgctaattaaggagactggtgaagatgttttagctcaggagaattgtaatgaccagcctgttccggcccagactgacctagaaatgaagttaaacgatgaacttgctgatccggaagttttagctcaggagaattgtaatgaccagcctgttcttgctcagactgacctagaaactaagttaaacgatgaacttgctgatctggctatggaatcaggttgtagcattactgaaaggaatgaagggcttgttgctcataatcttgatcaagaaggtttccttgaagcaacaccagagtgcaaacaggaatgtggtttgcctgaggagacagtaatttcctcaaaagaaacaggatctctgctgtgtgcagatcaatcaccaattggtctggaatctttattttcgcaagaaagcatagttgaatcagtggggcattgtgcacttgcttcagcaacaactcataccgaaaatggctttgatgattcaaaagattgccataacaagtctgcacttgaaaatgttcatgtgccagaaccttgttcacacaatgatactaaaggaggcatttttaaaaatgttgattgtatgcatacatcccagcgagatgatagaatggaaggagtaccagaggctaacactgatgaagaacatgttctgtcagcctttttgctggatgcaaatcacctaaacgtagtcattaattctgaagaagtggtttgtgagggtgaagatagtaaggagcttctccattcggaagactgtaaagcttcatccgagaaaacagatgtgaatgatggcaatgtatatggtattagtgatgctgtagtgagatgtgcactgcatgctccagccgatgataattatgagatttttttgggtcccaatactgatgtaccacgtcaggtttataatgacggatgcagtgatgtcaaagaagatcgatttgcttccaaaccctggacaattgatattattgaggatgcctctgtcaaagaaagatcaaatttaaaagattggcaacttgattccaagttggagggcacagaaatagtggaatctggcctttacttcaataaggatattggtaacattttacatagtggatctattggtgaaataactccatctggttctggtttatcaaaagattcatctgtggactatagaggggaggttttagatggcttctcaatggaagcatctcttgaaaggtcttctacacgtggggaacaaaatggttgtagactagatgctattgagaatccttcaattactttagcaacttctggttataagcatgaaggtgctttatctgaggaagcagtgtacacaaagaagaattacgctggaacatgcttgtcaaatcccagggaattaatcatggagctgcaatcccatttctcaaaggaaaacataaatgaatctgatcctcatgacagccttgtattcccaactgctgaaaattcagcagatgaacagctggttaaagtacaccatggttctaatctgtctcagttaggattaactgatctgttggatggaccaattgggtgttccaataccgacgtgttgtgccagtgtgacaatcataaaaatcaatccaatgaggacaaggtagaggaagttgaggcggtgtctgctgctaaatacatagaaagtgaagttgtgctgctcccatctcaagagagatcaaatttgaataatgagcagcttaacaccaagttggaaagcccaaacattatgggatcttgccttaactgtgataacgatgtttgtaatacttcggacaatggatctgtttttgtcattggtaaaagaactccatctgcttctggcttaccagaagattatcctaaggatagtgacttgcaacaaccggttttagatagcttctcagtggtttcatcttttcaagacaatatatctgggaagaaaactgtttctggtgtagcaggcagtgagattctttctttaagtttagcaactcctgattataaacatgaagatggtttctctgaggaagcagtatgcagaacaaagaattatactggaacttcctcggtagatccgaggcatttagacatggaggggcactctatttactctgagggagatacataccaaggtccttgtcaagatctaggcagacatgaagaacaagagagctgcatgtctattcctatgcaagccaaagaaagtggaggggttttgaggtctagccacacgaaagggtcagttacagcagcccaaattgatttggcaggtgatgcccatcttattgtgagtgataatgctgctgccaagcaagtgtttagtgaggagaaagaggaaacaaaatctatctcttcttcagatattgatatccttcatgaaaaatcatactccagtggacacgatgaccatgctgcttgtgctgccgaaactcagttctaccatccacagaaagcatctatatctgatggactacatttgggtcctagttctttgcaagtagaatcactggatgctttggatagcgatatactgtatgttaacacaggagttctcgagcagcatcataaagagggttactatgaacccagtgtctaccaaatcacttcaggcatttgcacaatgtctgaagctgaaccattcgaagttttagaaactggaaaagatgtaaaaacgccatctaagctagatgagcaacttaatcctgggttggacggagatgaagctgagaaacacagcttagactgtggtacagacaccagtcctgtgatgagcaagagaaccctttcttcaccaggatcaggaccatgccagcagtatgtaaatgaaagcaccaccagtacacagtcgactgataatcacccaaacgacctacccgctccgagatctcctgaacaatccgcgtgttttcagaatgacaacgattcgggttcagcatttgtcaaagcagcaggcgaagaggtatagatgaactttgcggtaagctgcagagtttcaaagtttccagcgccgtaaaaggaagctacgtagctatgggtgcacctcgtccgaagcctggggacagcacgagccgatctgcagccgcgctgctcaggaacatagagaacacaactgctgttaaagctggccgtcctcctgtcaagccaaacgccgatggtaaggactcgtctaggcgagccctgcagcccataagcggaaggcctgacagtaggtagttcggcggttccttaataagtgtgtcgtgtttgtgttcaaccctttgttgaaagccaggtccgtgtatttgtgcagcttgttgtcatgaagctgctgtgtgcgtgtcatttaacataagcgtgcgtgaagttgtgttatggaagtggctaaatatgtgttcgttaggaggtcaattggcttgaactgaccctgctgttccgtgatttctgtctaaatatacttgtgtggctgtgtcactttgattggccttatcgatcacatgcaatgggat

SEQ ID NO: 30632 - DNA, 8255 bp, Zea Mays
ctttctcctcccgaaaggcagggcaaccctacaaaacgctgtctcggcttcgccgtccagcggaacagtgtacgggagcagttcgtcgcgtgtgtcgcgtcgcgttgcgttgcgccacccactaattcgaacggacgggactgggattcgaaatttcgaacacgcgccgcctgagagagagagagagagtgagagaaagagagagagagagcaggagagatggtcaggcctttgtgatctcccgcggggctggaggtgtgcggggatggatctcgcggggatgaagcggcgggagctccaggcgctctgcaagcggcacggcctccccgccgggggcaccaacgccgacctcgtcggacgtctcgacgccgtgctttcggggcccgctgttgtggaggaggaggttgccggagtgccggcgaggaaggggtgtctgaagcaaacgggcggaggtgccaccgaggccaagaaggttacttttggggcggaggtagggaaggccaggagactgaggtctcgggtcatatggtcgccggtcgttgccaagacaagggggaagtctgctcgagccggtactgattctgctgctgaagacggtatttctgcagatgtgggcgctgatgtcccagtgaggcggtccaggaggaattcgttcaatcctgccgaggctgaggaagcaggagaggctgttgctgttgacaggaagcccaagcgcaagaatcaggagaatgacgagggcgttgctgttatcgctcaggctagagttacgagaaggtcaaatttggagtggtctgctactgtattgcctcctgctgttgagaagaagagagggaggcagaatgcagctgagtctgatgtgcagaagtccgctctggtggaagtaacagctaggactacaaggtctcgctcaatcgtacctgttgtggtgccacccactgtggttgagaacaagaggaggaagactggagatccacaaacaactgtagagttgactatgctttcagatgtgcccagaagtgattttcctgccaccaggtctttaaggaacaaaattgtccacgttaacaacagcgtcgtggacgaaactcacactaccaggcagttggaaaacaagatgcgtccgtctactcgtaggcatcaacaggttgcatcttctccggaggataaaggtcaaaaaattcctgctaccagtaagtcccctctactgaggtggtcacggagaaactattctgaggccaatagtgcaaattcagtaaacatcaaattggccaaagactcgagcacagctcagccattggcacaccataattctcattctgaagatttggagaaacaaccagcagttaaagaaccaattaaacggtcaacacgtaaatctattgctttggctgcacttgagaaagagaaggatgtaattgaaggaaagaaccctgaagcacatgttaggcgatcaacgaggaaatcagttgtgcaggttaaagataccaaaagtattgttgaagagactcaatatgctaacagtgaagatgtggcgaagcaaccagcaactaaaggacctgctagggggctgagacgtaaatctgttatcacagaattgcatgagaaagagaagagtctcattgccgaaaagaacatggaaacagatgaagcgatattaacgcggaagcctgtaatcccagttaaaaatattaaagctgttggtgaaggaattcaaattggtaagggcaaagatgtggataaacaatttgttgtgaagcaacctactaggcgatcatcgcgcaaatctgtgctgcctgatatgcttgagaataatagtggacttctagcacccaaaatgaatgctgagatgaatgttaggagatcaacacggaagtctgttcttcctgacatgcataatgagaagcaagatcaccataaaatggctagaaatgagaacttgcaaagtggtaaatatcaagatggtgagaagcaacagaaagtaaaagattctattaggcaatcaaggagatctatcgctacagtgctacttgagggacaaaataatgatgaaggaaaaaagttcaaaaatcctacgaggaggacaacacacaaatctcatgcccttaatgcagttgaagaggtcagcatggatcacattgaagttggtgaagaaggcttgaaattgaggaagcgcagtaggtttttgctggaaatatcatcttcagctaatgtttcctggaagcatcagaatgcacagatctctaatgaaaaagataacacagaaggatcgcagcaggcatcaaattgcacaacttcaaagagaaggtcttcaaagaagagacgaacaactgctccagaagaagtgatgcctttcaaggtggcaaatgatgacatagttatcatggaagaaacaaaggacacacttgaatataataatgagtctagtagtaaagttcaagaaatttgtcaggttaatgctgcaagagaagagttctcttcaggtccattgcttgtaacagtagctcctagtgacgaaatttgcacagtgcagagtgtagctgtggtgatacctgggtcagaatctggtgacgatgcaaatcaaagttctgataagagtaagcaacctcaggaacattctgtcactcaaactgttgatgaccatttatctgaaacaagaagtgggaaattagatcaatcaacatgcatcacaggattagtctctgacaattgtgttgtctcagaggacaaaacattgatgagtgaaggtgagggagactttgttggtccaaaatcaccaaatggtttatcaattagtttcattgtcgcagaccgtgaagagcaaagccctgtgtccggagaacagagagttagcttggaagcaaatgccaatgagcctgaggaaaagaacctagctaacgtcacatcaactgatctccacaccaaaagtctgcagcatgatattgacagaatagctaaagagactgataaagatgttttgtctttggttttccctattgaagagcatgaagaaaaatatggagtgagccctatagctgttgaaaagtgcgtctgtcgtgaagcaagtgcatgtgaatctgcacgaaaacccctaaccgttatcttttctaacaatctccacaccaaacatctgcaacatgattgtgatgtgctaattaaggagactggtgaagaagttttagctcaggagaattgtaatgaccagcctgttcctgcccagactgaccaagaaattaagttaaacgatgaacttgctgatccggatgttttagctcaggagaattgtaatgaccagcccgttcctgcccagactgacctagaaattaagttacacgatgaacttgctgatccggaccatgaagagcaaagccctgtatccggagaacggagagttagcttggaagcaaatgccaacgagcctgaggaaaagaacctagctaacgtcatatcaattgatctccacaccaaaagtctgcagcatgataatggcagaatagctgaagagactgataaaggtacaactgaattaatcctgtatccccaataaaagctctgcaacattgatgagtgaagataatatgtatgctgaacatctaaatccacctgtgccagctctcattcactgtttttttctaaagatcttgcttcaagattttcaattcactaaattaaacttgctaaatctccagatgttttgtcttttgttttccctattgaagagcatgaagaaaaatatgcagttagccctatagccgttgaaaagagcttccgtcaggaagcaagtgcaattgaatctgcaggaaaacccctaactgtcatcttttctaacgatctccacaccaaacatctgcaacatgattgtgatgtgctaattaaggagactggtgaagaagttttagctcaggagaattgtaatgaccagcctgttcctgcccagaccgacctagaaattaagttaaatgatgaacttgctgatccggatgttttagctcaggagaattgtaatgaccagcctgttcctgccaacgagcctgaggaaaagaacctagctaacgtcatatcaactgatctccacaccaaaactctgcagcatgataatgacagaatagctgaagagactgataaagaccatgaagagcaaagcaatgtgttcggagaacggagagttagcttggaagcaaatgccaacgagcctgaggaaaagaacctagctaacgtcatatcaactgatctccacaccaaaactctgcagcatgataatgacagaatagctgaagagactgataaagaccatgaagagcaaagcaatgtgtccggagaacggagagttagcttggaagcaaatgccaacgagcctgaggaaaagaacctagctaacgtcatatcaactgatctccacaccaaaactctgcagcatgataatgacagaatagctgaagagactgataaagatgtttcgtctttggttttccctattgaagagcatgaagaaaaatatgcagtgagccctatagctgttgaaaagagcgtcagtcgggaagccagtgcatgtgaatctgcaggaaaacccctaactgtcatcttttctaacgatctccacaccaaacatctgcaacatgattgtgatgtgctaattaaggagactggtgaagatgttttagctcaggagaattgtaatgaccagcctgttccggcccagactgacctagaaatgaagttaaacgatgaacttgctgatccggaagttttagctcaggagaattgtaatgaccagcctgttcttgctcagactgacctagaaactaagttaaacgatgaacttgctgatctggctatggaatcaggttgtagcattactgaaaggaatgaagggcttgttgctcataatcttgatcaagaaggtttccttgaagcaacaccagagtgcaaacaggaatgtggtttgcctgaggagacagtaatttcctcaaaagaaacaggatctctgctgtgtgcagatcaatcaccaattggtctggaatctttattttcgcaagaaagcatagttgaatcagtggggcattgtgcacttgcttcagcaacaactcataccgaaaatggctttgatgattcaaaagattgccataacaagtctgcacttgaaaatgttcatgtgccagaaccttgttcacacaatgatactaaaggaggcatttttaaaaatgttgattgtatgcatacatcccagcgagatgatagaatggaaggagtaccagaggctaacactgatgaagaacatgttctgtcagcctttttgctggatgcaaatcacctaaacgtagtcattaattctgaagaagtggtttgtgagggtgaagatagtaaggagcttctccattcggaagactgtaaagcttcatccgagaaaacagatgtgaatgatggcaatgtatatggtattagtgatgctgtagtgagatgtgcactgcatgctccagccgatgataattatgagatttttttgggtcccaatactgatgtaccacgtcaggtttataatgacggatgcagtgatgtcaaagaagatcgatttgcttccaaaccctggacaattgatattattgaggatgcctctgtcaaagaaagatcaaatttaaaagattggcaacttgattccaagttggagggcacagaaatagtggaatctggcctttacttcaataaggatattggtaacattttacatagtggatctattggtgaaataactccatctggttctggtttatcaaaagattcatctgtggactatagaggggaggttttagatggcttctcaatggaagcatctcttgaaaggtcttctacacgtggggaacaaaatggttgtagactagatgctattgagaatccttcaattactttagcaacttctggttataagcatgaaggtgctttatctgaggaagcagtgtacacaaagaagaattacgctggaacatgcttgtcaaatcccagggaattaatcatggagctgcaatcccatttctcaaaggaaaacataaatgaatctgatcctcatgacagccttgtattcccaactgctgaaaattcagcagatgaacagctggttaaagtacaccatggttctaatctgtctcagttaggattaactgatctgttggatggaccaattgggtgttccaataccgacgtgttgtgccagtgtgacaatcataaaaatcaatccaatgaggacaaggtagaggaagttgaggcggtgtctgctgctaaatacatagaaagtgaagttgtgctgctcccatctcaagagagatcaaatttgaataatgagcagcttaacaccaagttggaaagcccaaacattatgggatcttgccttaactgtgataacgatgtttgtaatacttcggacaatggatctgtttttgtcattggtaaaagaactccatctgcttctggcttaccagaagattatcctaaggatagtgacttgcaacaaccggttttagatagcttctcagtggtttcatcttttcaagacaatatatctgggaagaaaactgtttctggtgtagcaggcagtgagattctttctttaagtttagcaactcctgattataaacatgaagatggtttctctgaggaagcagtatgcagaacaaagaattatactggaacttcctcggtagatccgaggcatttagacatggaggggcactctatttactctgagggaggtactgaaaaatctaatctgcaagataatcttgcatttctaagcgctgagagtggaaaagatgaacctattatttgccatgttgagaaactggttgacgcacatgcttcttcagatacataccaaggtccttgtcaagatctaggcagacatgaagaacaagagagctgcatgtctattcctatgcaagccaaagaaagtggaggggttttgaggtctagccacacgaaagggtcagttacagcagcccaaattgatttggcaggtgatgcccatcttattgtgagtccttttgatcatgtaatccgacaatcattataccacagtgataatgctgctgccaagcaagtgtttagtgaggagaaagaggaaacaaaatctatctcttcttcagatattgatatccttcatgaaaaatcatactccagtggacacgatgaccatgctgcttgtgctgccgaaactcagttctaccatccacagaaagcatctatatctgatggactacatttgggtcctagttctttgcaagtagaatcactggatgctttggatagcgatatactgtatgttaacacaggagttctcgagcagcatcataaagagggttactatgaacccagtgtctaccaaatcacttcaggcatttgcacaatgtctgaagctgaaccattcgaagttttagaaactggaaaagatgtaaaaacgccatctaagctagatgagcaacttaatcctgggttggacggagatgaagctgagaaacacagcttagactgtggtacagacaccagtcctgtgatgagcaagagaaccctttcttcaccaggatcaggaccatgccagcagtatgtaaatgaaagcaccaccagtacacagtcgactgataatcacccaaacgacctacccgctccgagatctcctgaacaatccgcgtgttttcagaatgacaacgattcgggttcagcatttgtcaaagcagcaggcgaagaggtatagatgaactttgcggtaagctgcagagtttcaaagtttccagcgccgtaaaaggaagctacgtagctatgggtgcacctcgtccgaagcctggggacagcacgagccgatctgcagccgcgctgctcaggaacatagagaacacaactgctgttaaagctggccgtcctcctgtcaagccaaacgccgatggtaaggactcgtctaggcgagccctgcagcccataagcggaaggcctgacagtaggtagttcggcggttccttaataagtgtgtcgtgtttgtgttcaaccctttgttgaaagccaggtccgtgtatttgtgcagcttgttgtcatgaagctgctgtgtgcgtgtcatttaacataagcgtgcgtgaagttgtgttatggaagtggctaaatatgtgttcgttaggaggtcaattggcttgaactgaccctgctgttccgtgatttctgtctaaatatacttgtgtggctgtgtcactttgattggccttatcgatcacatgcaatgggat

SEQ ID NO: 30633 - DNA, 7637 bp, Zea Mays
gcaaccctacaaaacgctgtctcggcttcgccgtccagcggaacagtgtacgggagcagttcgtcgcgtgtgtcgcgtcgcgttgcgttgcgccacccactaattcgaacggacgggactgggattcgaaatttcgaacacgcgccgcctgagagagagagagagagtgagagaaagagagagagagagcaggagagatggtcaggcctttgtgatctcccgcggggctggaggtgtgcggggatggatctcgcggggatgaagcggcgggagctccaggcgctctgcaagcggcacggcctccccgccgggggcaccaacgccgacctcgtcggacgtctcgacgccgtgctttcggggcccgctgttgtggaggaggaggttgccggagtgccggcgaggaaggggtgtctgaagcaaacgggcggaggtgccaccgaggccaagaaggttacttttggggcggaggtagggaaggccaggagactgaggtctcgggtcatatggtcgccggtcgttgccaagacaagggggaagtctgctcgagccggtactgattctgctgctgaagacggtatttctgcagatgtgggcgctgatgtcccagtgaggcggtccaggaggaattcgttcaatcctgccgaggctgaggaagcaggagaggctgttgctgttgacaggaagcccaagcgcaagaatcaggagaatgacgagggcgttgctgttatcgctcaggctagagttacgagaaggtcaaatttggagtggtctgctactgtattgcctcctgctgttgagaagaagagagggaggcagaatgcagctgagtctgatgtgcagaagtccgctctggtggaagtaacagctaggactacaaggtctcgctcaatcgtacctgttgtggtgccacccactgtggttgagaacaagaggaggaagactggagatccacaaacaactgtagagttgactatgctttcagatgtgcccagaagtgattttcctgccaccaggtctttaaggaacaaaattgtccacgttaacaacagcgtcgtggacgaaactcacactaccaggcagttggaaaacaagatgcgtccgtctactcgtaggcatcaacaggttgcatcttctccggaggataaaggtcaaaaaattcctgctaccagtaagtcccctctactgaggtggtcacggagaaactattctgaggccaatagtgcaaattcagtaaacatcaaattggccaaagactcgagcacagctcagccattggcacaccataattctcattctgaagatttggagaaacaaccagcagttaaagaaccaattaaacggtcaacacgtaaatctattgctttggctgcacttgagaaagagaaggatgtaattgaaggaaagaaccctgaagcacatgttaggcgatcaacgaggaaatcagttgtgcaggttaaagataccaaaagtattgttgaagagactcaatatgctaacagtgaagatgtggcgaagcaaccagcaactaaaggacctgctagggggctgagacgtaaatctgttatcacagaattgcatgagaaagagaagagtctcattgccgaaaagaacatggaaacagatgaagcgatattaacgcggaagcctgtaatcccagttaaaaatattaaagctgttggtgaaggaattcaaattggtaagggcaaagatgtggataaacaatttgttgtgaagcaacctactaggcgatcatcgcgcaaatctgtgctgcctgatatgcttgagaataatagtggacttctagcacccaaaatgaatgctgagatgaatgttaggagatcaacacggaagtctgttcttcctgacatgcataatgagaagcaagatcaccataaaatggctagaaatgagaacttgcaaagtggtaaatatcaagatggtgagaagcaacagaaagtaaaagattctattaggcaatcaaggagatctatcgctacagtgctacttgagggacaaaataatgatgaaggaaaaaagttcaaaaatcctacgaggaggacaacacacaaatctcatgcccttaatgcagttgaagaggtcagcatggatcacattgaagttggtgaagaaggcttgaaattgaggaagcgcagtaggtttttgctggaaatatcatcttcagctaatgtttcctggaagcatcagaatgcacagatctctaatgaaaaagataacacagaaggatcgcagcaggcatcaaattgcacaacttcaaagagaaggtcttcaaagaagagacgaacaactgctccagaagaagtgatgcctttcaaggtggcaaatgatgacatagttatcatggaagaaacaaaggacacacttgaatataataatgagtctagtagtaaagttcaagaaatttgtcaggttaatgctgcaagagaagagttctcttcaggtccattgcttgtaacagtagctcctagtgacgaaatttgcacagtgcagagtgtagctgtggtgatacctgggtcagaatctggtgacgatgcaaatcaaagttctgataagagtaagcaacctcaggaacattctgtcactcaaactgttgatgaccatttatctgaaacaagaagtgggaaattagatcaatcaacatgcatcacaggattagtctctgacaattgtgttgtctcagaggacaaaacattgatgagtgaagaccgtgaagagcaaagccctgtgtccggagaacagagagttagcttggaagcaaatgccaatgagcctgaggaaaagaacctagctaacgtcacatcaactgatctccacaccaaaagtctgcagcatgatattgacagaatagctaaagagactgataaagatgttttgtctttggttttccctattgaagagcatgaagaaaaatatggagtgagccctatagctgttgaaaagtgcgtctgtcgtgaagcaagtgcatgtgaatctgcacgaaaacccctaaccgttatcttttctaacaatctccacaccaaacatctgcaacatgattgtgatgtgctaattaaggagactggtgaagaagttttagctcaggagaattgtaatgaccagcctgttcctgcccagactgaccaagaaattaagttaaacgatgaacttgctgatccggatgttttagctcaggagaattgtaatgaccagcccgttcctgcccagactgacctagaaattaagttacacgatgaacttgctgatccggaccatgaagagcaaagccctgtatccggagaacggagagttagcttggaagcaaatgccaacgagcctgaggaaaagaacctagctaacgtcatatcaattgatctccacaccaaaagtctgcagcatgataatggcagaatagctgaagagactgataaagatgttttgtcttttgttttccctattgaagagcatgaagaaaaatatgcagttagccctatagccgttgaaaagagcttccgtcaggaagcaagtgcaattgaatctgcaggaaaacccctaactgtcatcttttctaacgatctccacaccaaacatctgcaacatgattgtgatgtgctaattaaggagactggtgaagaagttttagctcaggagaattgtaatgaccagcctgttcctgcccagaccgacctagaaattaagttaaatgatgaacttgctgatccggatgttttagctcaggagaattgtaatgaccagcctgttcctgccaacgagcctgaggaaaagaacctagctaacgtcatatcaactgatctccacaccaaaactctgcagcatgataatgacagaatagctgaagagactgataaagatgtttcgtctttggttttccctattgaagagcatgaagaaaaatatgcagtgagccctatagctgttgaaaagagcgtcagtcgggaagccagtgcatgtgaatctgcaggaaaacccctaactgtcatcttttctaacgatctccacaccaaacatctgcaacatgattgtgatgtgctaattaaggagactggtgaagatgttttagctcaggagaattgtaatgaccagcctgttccggcccagactgacctagaaatgaagttaaacgatgaacttgctgatccggaagttttagctcaggagaattgtaatgaccagcctgttcttgctcagactgacctagaaactaagttaaacgatgaacttgctgatctggctatggaatcaggttgtagcattactgaaaggaatgaagggcttgttgctcataatcttgatcaagaaggtttccttgaagcaacaccagagtgcaaacaggaatgtggtttgcctgaggagacagtaatttcctcaaaagaaacaggatctctgctgtgtgcagatcaatcaccaattggtctggaatctttattttcgcaagaaagcatagttgaatcagtggggcattgtgcacttgcttcagcaacaactcataccgaaaatggctttgatgattcaaaagattgccataacaagtctgcacttgaaaatgttcatgtgccagaaccttgttcacacaatgatactaaaggaggcatttttaaaaatgttgattgtatgcatacatcccagcgagatgatagaatggaaggagtaccagaggctaacactgatgaagaacatgttctgtcagcctttttgctggatgcaaatcacctaaacgtagtcattaattctgaagaagtggtttgtgagggtgaagatagtaaggagcttctccattcggaagactgtaaagcttcatccgagaaaacagatgtgaatgatggcaatgtatatggtattagtgatgctgtagtgagatgtgcactgcatgctccagccgatgataattatgagatttttttgggtcccaatactgatgtaccacgtcaggtttataatgacggatgcagtgatgtcaaagaagatcgatttgcttccaaaccctggacaattgatattattgaggatgcctctgtcaaagaaagatcaaatttaaaagattggcaacttgattccaagttggagggcacagaaatagtggaatctggcctttacttcaataaggatattggtaacattttacatagtggatctattggtgaaataactccatctggttctggtttatcaaaagattcatctgtggactatagaggggaggttttagatggcttctcaatggaagcatctcttgaaaggtcttctacacgtggggaacaaaatggttgtagactagatgctattgagaatccttcaattactttagcaacttctggttataagcatgaaggtgctttatctgaggaagcagtgtacacaaagaagaattacgctggaacatgcttgtcaaatcccagggaattaatcatggagctgcaatcccatttctcaaaggaaaacataaatgaatctgatcctcatgacagccttgtattcccaactgctgaaaattcagcagatgaacagctggttaaagtacaccatggttctaatctgtctcagttaggattaactgatctgttggatggaccaattgggtgttccaataccgacgtgttgtgccagtgtgacaatcataaaaatcaatccaatgaggacaaggtagaggaagttgaggcggtgtctgctgctaaatacatagaaagtgaagttgtgctgctcccatctcaagagagatcaaatttgaataatgagcagcttaacaccaagttggaaagcccaaacattatgggatcttgccttaactgtgataacgatgtttgtaatacttcggacaatggatctgtttttgtcattggtaaaagaactccatctgcttctggcttaccagaagattatcctaaggatagtgacttgcaacaaccggttttagatagcttctcagtggtttcatcttttcaagacaatatatctgggaagaaaactgtttctggtgtagcaggcagtgagattctttctttaagtttagcaactcctgattataaacatgaagatggtttctctgaggaagcagtatgcagaacaaagaattatactggaacttcctcggtagatccgaggcatttagacatggaggggcactctatttactctgagggaggtactgaaaaatctaatctgcaagataatcttgcatttctaagcgctgagagtggaaaagatgaacctattatttgccatgttgagaaactggttgacgcacatgcttcttcagatacataccaaggtccttgtcaagatctaggcagacatgaagaacaagagagctgcatgtctattcctatgcaagccaaagaaagtggaggggttttgaggtctagccacacgaaagggtcagttacagcagcccaaattgatttggcaggtgatgcccatcttattgtgagtgataatgctgctgccaagcaagtgtttagtgaggagaaagaggaaacaaaatctatctcttcttcagatattgatatccttcatgaaaaatcatactccagtggacacgatgaccatgctgcttgtgctgccgaaactcagttctaccatccacagaaagcatctatatctgatggactacatttgggtcctagttctttgcaagtagaatcactggatgctttggatagcgatatactgtatgttaacacaggagttctcgagcagcatcataaagagggttactatgaacccagtgtctaccaaatcacttcaggcatttgcacaatgtctgaagctgaaccattcgaagttttagaaactggaaaagatgtaaaaacgccatctaagctagatgagcaacttaatcctgggttggacggagatgaagctgagaaacacagcttagactgtggtacagacaccagtcctgtgatgagcaagagaaccctttcttcaccaggatcaggaccatgccagcagtatgtaaatgaaagcaccaccagtacacagtcgactgataatcacccaaacgacctacccgctccgagatctcctgaacaatccgcgtgttttcagaatgacaacgattcgggttcagtaggcatttgtcaaagcagcaggcgaagaggtatagatgaactttgcggtaagctgcagagtttcaaagtttccagcgccgtaaaaggaagctacgtagctatgggtgcacctcgtccgaagcctggggacagcacgagccgatctgcagccgcgctgctcaggaacatagagaacacaactgctgttaaagctggccgtcctcctgtcaagccaaacgccgatggtaaggactcgtctaggcgagccctgcagcccataagcggaaggcctgacagtaggtagttcggcggttccttaataagtgtgtcgtgtttgtgttcaaccctttgttgaaagccaggtccgtgtatttgtgcagcttgttgtcatgaagctgctgtgtgcgtgtcatttaacataagcgtgcgtgaagttgtgttatggaagtggctaaatatgtgttcgttaggaggtcaattggcttgaactgaccctgctgttccgtgatttctgtctaaatatacttgtgtggctgtgtcactttgattggccttatcgatcacatgcaatgggat

SEQ ID NO: 30634 - DNA, 7195 bp, Zea Mays
cggcttcgccgtccagcggaacagtgtacgggagcagttcgtcgcgtgtgtcgcgtcgcgttgcgttgcgccacccactaattcgaacggacgggactgggattcgaaatttcgaacacgcgccgcctgagagagagagagagagtgagagaaagagagagagagagcaggagagatggtcaggcctttgtgatctcccgcggggctggaggtgtgcggggatggatctcgcggggatgaagcggcgggagctccaggcgctctgcaagcggcacggcctccccgccgggggcaccaacgccgacctcgtcggacgtctcgacgccgtgctttcggggcccgctgttgtggaggaggaggttgccggagtgccggcgaggaaggggtgtctgaagcaaacgggcggaggtgccaccgaggccaagaaggttacttttggggcggaggtagggaaggccaggagactgaggtctcgggtcatatggtcgccggtcgttgccaagacaagggggaagtctgctcgagccggtactgattctgctgctgaagacggtatttctgcagatgtgggcgctgatgtcccagtgaggcggtccaggaggaattcgttcaatcctgccgaggctgaggaagcaggagaggctgttgctgttgacaggaagcccaagcgcaagaatcaggagaatgacgagggcgttgctgttatcgctcaggctagagttacgagaaggtcaaatttggagtggtctgctactgtattgcctcctgctgttgagaagaagagagggaggcagaatgcagctgagtctgatgtgcagaagtccgctctggtggaagtaacagctaggactacaaggtctcgctcaatcgtacctgttgtggtgccacccactgtggttgagaacaagaggaggaagactggagatccacaaacaactgtagagttgactatgctttcagatgtgcccagaagtgattttcctgccaccaggtctttaaggaacaaaattgtccacgttaacaacagcgtcgtggacgaaactcacactaccaggcagttggaaaacaagatgcgtccgtctactcgtaggcatcaacaggttgcatcttctccggaggataaaggtcaaaaaattcctgctaccagtaagtcccctctactgaggtggtcacggagaaactattctgaggccaatagtgcaaattcagtaaacatcaaattggccaaagactcgagcacagctcagccattggcacaccataattctcattctgaagatttggagaaacaaccagcagttaaagaaccaattaaacggtcaacacgtaaatctattgctttggctgcacttgagaaagagaaggatgtaattgaaggaaagaaccctgaagcacatgttaggcgatcaacgaggaaatcagttgtgcaggttaaagataccaaaagtattgttgaagagactcaatatgctaacagtgaagatgtggcgaagcaaccagcaactaaaggacctgctagggggctgagacgtaaatctgttatcacagaattgcatgagaaagagaagagtctcattgccgaaaagaacatggaaacagatgaagcgatattaacgcggaagcctgtaatcccagttaaaaatattaaagctgttggtgaaggaattcaaattggtaagggcaaagatgtggataaacaatttgttgtgaagcaacctactaggcgatcatcgcgcaaatctgtgctgcctgatatgcttgagaataatagtggacttctagcacccaaaatgaatgctgagatgaatgttaggagatcaacacggaagtctgttcttcctgacatgcataatgagaagcaagatcaccataaaatggctagaaatgagaacttgcaaagtggtaaatatcaagatggtgagaagcaacagaaagtaaaagattctattaggcaatcaaggagatctatcgctacagtgctacttgagggacaaaataatgatgaaggaaaaaagttcaaaaatcctacgaggaggacaacacacaaatctcatgcccttaatgcagttgaagaggtcagcatggatcacattgaagttggtgaagaaggcttgaaattgaggaagcgcagtaggtttttgctggaaatatcatcttcagctaatgtttcctggaagcatcagaatgcacagatctctaatgaaaaagataacacagaaggatcgcagcaggcatcaaattgcacaacttcaaagagaaggtcttcaaagaagagacgaacaactgctccagaagaagtgatgcctttcaaggtggcaaatgatgacatagttatcatggaagaaacaaaggacacacttgaatataataatgagtctagtagtaaagttcaagaaatttgtcaggttaatgctgcaagagaagagttctcttcaggtccattgcttgtaacagtagctcctagtgacgaaatttgcacagtgcagagtgtagctgtggtgatacctgggtcagaatctggtgacgatgcaaatcaaagttctgataagagtaagcaacctcaggaacattctgtcactcaaactgttgatgaccatttatctgaaacaagaagtgggaaattagatcaatcaacatgcatcacaggattagtctctgacaattgtgttgtctcagaggacaaaacattgatgagtgaagaccgtgaagagcaaagccctgtgtccggagaacagagagttagcttggaagcaaatgccaatgagcctgaggaaaagaacctagctaacgtcacatcaactgatctccacaccaaaagtctgcagcatgatattgacagaatagctaaagagactgataaagaagttttagctcaggagaattgtaatgaccagcctgttcctgcccagaccgacctagaaattaagttaaatgatgaacttgctgatccggatgttttagctcaggagaattgtaatgaccagcctgttcctgccaacgagcctgaggaaaagaacctagctaacgtcatatcaactgatctccacaccaaaactctgcagcatgataatgacagaatagctgaagagactgataaagaccatgaagagcaaagcaatgtgttcggagaacggagagttagcttggaagcaaatgccaacgagcctgaggaaaagaacctagctaacgtcatatcaactgatctccacaccaaaactctgcagcatgataatgacagaatagctgaagagactgataaagaccatgaagagcaaagcaatgtgtccggagaacggagagttagcttggaagcaaatgccaacgagcctgaggaaaagaacctagctaacgtcatatcaactgatctccacaccaaaactctgcagcatgataatgacagaatagctgaagagactgataaagatgtttcgtctttggttttccctattgaagagcatgaagaaaaatatgcagtgagccctatagctgttgaaaagagcgtcagtcgggaagccagtgcatgtgaatctgcaggaaaacccctaactgtcatcttttctaacgatctccacaccaaacatctgcaacatgattgtgatgtgctaattaaggagactggtgaagatgttttagctcaggagaattgtaatgaccagcctgttccggcccagactgacctagaaatgaagttaaacgatgaacttgctgatccggaagttttagctcaggagaattgtaatgaccagcctgttcttgctcagactgacctagaaactaagttaaacgatgaacttgctgatctggctatggaatcaggttgtagcattactgaaaggaatgaagggcttgttgctcataatcttgatcaagaaggtttccttgaagcaacaccagagtgcaaacaggaatgtggtttgcctgaggagacagtaatttcctcaaaagaaacaggatctctgctgtgtgcagatcaatcaccaattggtctggaatctttattttcgcaagaaagcatagttgaatcagtggggcattgtgcacttgcttcagcaacaactcataccgaaaatggctttgatgattcaaaagattgccataacaagtctgcacttgaaaatgttcatgtgccagaaccttgttcacacaatgatactaaaggaggcatttttaaaaatgttgattgtatgcatacatcccagcgagatgatagaatggaaggagtaccagaggctaacactgatgaagaacatgttctgtcagcctttttgctggatgcaaatcacctaaacgtagtcattaattctgaagaagtggtttgtgagggtgaagatagtaaggagcttctccattcggaagactgtaaagcttcatccgagaaaacagatgtgaatgatggcaatgtatatggtattagtgatgctgtagtgagatgtgcactgcatgctccagccgatgataattatgagatttttttgggtcccaatactgatgtaccacgtcaggtttataatgacggatgcagtgatgtcaaagaagatcgatttgcttccaaaccctggacaattgatattattgaggatgcctctgtcaaagaaagatcaaatttaaaagattggcaacttgattccaagttggagggcacagaaatagtggaatctggcctttacttcaataaggatattggtaacattttacatagtggatctattggtgaaataactccatctggttctggtttatcaaaagattcatctgtggactatagaggggaggttttagatggcttctcaatggaagcatctcttgaaaggtcttctacacgtggggaacaaaatggttgtagactagatgctattgagaatccttcaattactttagcaacttctggttataagcatgaaggtgctttatctgaggaagcagtgtacacaaagaagaattacgctggaacatgcttgtcaaatcccagggaattaatcatggagctgcaatcccatttctcaaaggaaaacataaatgaatctgatcctcatgacagccttgtattcccaactgctgaaaattcagcagatgaacagctggttaaagtacaccatggttctaatctgtctcagttaggattaactgatctgttggatggaccaattgggtgttccaataccgacgtgttgtgccagtgtgacaatcataaaaatcaatccaatgaggacaaggtagaggaagttgaggcggtgtctgctgctaaatacatagaaagtgaagttgtgctgctcccatctcaagagagatcaaatttgaataatgagcagcttaacaccaagttggaaagcccaaacattatgggatcttgccttaactgtgataacgatgtttgtaatacttcggacaatggatctgtttttgtcattggtaaaagaactccatctgcttctggcttaccagaagattatcctaaggatagtgacttgcaacaaccggttttagatagcttctcagtggtttcatcttttcaagacaatatatctgggaagaaaactgtttctggtgtagcaggcagtgagattctttctttaagtttagcaactcctgattataaacatgaagatggtttctctgaggaagcagtatgcagaacaaagaattatactggaacttcctcggtagatccgaggcatttagacatggaggggcactctatttactctgagggaggtactgaaaaatctaatctgcaagataatcttgcatttctaagcgctgagagtggaaaagatgaacctattatttgccatgttgagaaactggttgacgcacatgcttcttcagatacataccaaggtccttgtcaagatctaggcagacatgaagaacaagagagctgcatgtctattcctatgcaagccaaagaaagtggaggggttttgaggtctagccacacgaaagggtcagttacagcagcccaaattgatttggcaggtgatgcccatcttattgtgagtgataatgctgctgccaagcaagtgtttagtgaggagaaagaggaaacaaaatctatctcttcttcagatattgatatccttcatgaaaaatcatactccagtggacacgatgaccatgctgcttgtgctgccgaaactcagttctaccatccacagaaagcatctatatctgatggactacatttgggtcctagttctttgcaagtagaatcactggatgctttggatagcgatatactgtatgttaacacaggagttctcgagcagcatcataaagagggttactatgaacccagtgtctaccaaatcacttcaggcatttgcacaatgtctgaagctgaaccattcgaagttttagaaactggaaaagatgtaaaaacgccatctaagctagatgagcaacttaatcctgggttggacggagatgaagctgagaaacacagcttagactgtggtacagacaccagtcctgtgatgagcaagagaaccctttcttcaccaggatcaggaccatgccagcagtatgtaaatgaaagcaccaccagtacacagtcgactgataatcacccaaacgacctacccgctccgagatctcctgaacaatccgcgtgttttcagaatgacaacgattcgggttcagtaggcatttgtcaaagcagcaggcgaagaggtatagatgaactttgcggtaagctgcagagtttcaaagtttccagcgccgtaaaaggaagctacgtagctatgggtgcacctcgtccgaagcctggggacagcacgagccgatctgcagccgcgctgctcaggaacatagagaacacaactgctgttaaagctggccgtcctcctgtcaagccaaacgccgatggtaaggactcgtctaggcgagccctgcagcccataagcggaaggcctgacagtaggtagttcggcggttccttaataagtgtgtcgtgtttgtgttcaaccctttgttgaaagccaggtccgtgtatttgtgcagcttgttgtcatgaagctgctgtgtgcgtgtcatttaacataagcgtgcgtgaagttgtgttatggaagtggctaaatatgtgttcgttaggaggtcaattggcttgaactgaccctgctgttccgtgatttctgtctaaatatacttgtgtggctgtgtcactttgattggccttatcgatcacatgcaatgggat

SEQ ID NO: 30635 - DNA, 7363 bp, Zea Mays
cgttgcgttgcgccacccactaattcgaacggacgggactgggattcgaaatttcgaacacgcgccgcctgagagagagagagagagtgagagaaagagagagagagagcaggagagatggtcaggcctttgtgatctcccgcggggctggaggtgtgcggggatggatctcgcggggatgaagcggcgggagctccaggcgctctgcaagcggcacggcctccccgccgggggcaccaacgccgacctcgtcggacgtctcgacgccgtgctttcggggcccgctgttgtggaggaggaggttgccggagtgccggcgaggaaggggtgtctgaagcaaacgggcggaggtgccaccgaggccaagaaggttacttttggggcggaggtagggaaggccaggagactgaggtctcgggtcatatggtcgccggtcgttgccaagacaagggggaagtctgctcgagccggtactgattctgctgctgaagacggtatttctgcagatgtgggcgctgatgtcccagtgaggcggtccaggaggaattcgttcaatcctgccgaggctgaggaagcaggagaggctgttgctgttgacaggaagcccaagcgcaagaatcaggagaatgacgagggcgttgctgttatcgctcaggctagagttacgagaaggtcaaatttggagtggtctgctactgtattgcctcctgctgttgagaagaagagagggaggcagaatgcagctgagtctgatgtgcagaagtccgctctggtggaagtaacagctaggactacaaggtctcgctcaatcgtacctgttgtggtgccacccactgtggttgagaacaagaggaggaagactggagatccacaaacaactgtagagttgactatgctttcagatgtgcccagaagtgattttcctgccaccaggtctttaaggaacaaaattgtccacgttaacaacagcgtcgtggacgaaactcacactaccaggcagttggaaaacaagatgcgtccgtctactcgtaggcatcaacaggttgcatcttctccggaggataaaggtcaaaaaattcctgctaccagtaagtcccctctactgaggtggtcacggagaaactattctgaggccaatagtgcaaattcagtaaacatcaaattggccaaagactcgagcacagctcagccattggcacaccataattctcattctgaagatttggagaaacaaccagcagttaaagaaccaattaaacggtcaacacgtaaatctattgctttggctgcacttgagaaagagaaggatgtaattgaaggaaagaaccctgaagcacatgttaggcgatcaacgaggaaatcagttgtgcaggttaaagataccaaaagtattgttgaagagactcaatatgctaacagtgaagatgtggcgaagcaaccagcaactaaaggacctgctagggggctgagacgtaaatctgttatcacagaattgcatgagaaagagaagagtctcattgccgaaaagaacatggaaacagatgaagcgatattaacgcggaagcctgtaatcccagttaaaaatattaaagctgttggtgaaggaattcaaattggtaagggcaaagatgtggataaacaatttgttgtgaagcaacctactaggcgatcatcgcgcaaatctgtgctgcctgatatgcttgagaataatagtggacttctagcacccaaaatgaatgctgagatgaatgttaggagatcaacacggaagtctgttcttcctgacatgcataatgagaagcaagatcaccataaaatggctagaaatgagaacttgcaaagtggtaaatatcaagatggtgagaagcaacagaaagtaaaagattctattaggcaatcaaggagatctatcgctacagtgctacttgagggacaaaataatgatgaaggaaaaaagttcaaaaatcctacgaggaggacaacacacaaatctcatgcccttaatgcagttgaagaggtcagcatggatcacattgaagttggtgaagaaggcttgaaattgaggaagcgcagtaggtttttgctggaaatatcatcttcagctaatgtttcctggaagcatcagaatgcacagatctctaatgaaaaagataacacagaaggatcgcagcaggcatcaaattgcacaacttcaaagagaaggtcttcaaagaagagacgaacaactgctccagaagaagtgatgcctttcaaggtggcaaatgatgacatagttatcatggaagaaacaaaggacacacttgaatataataatgagtctagtagtaaagttcaagaaatttgtcaggttaatgctgcaagagaagagttctcttcaggtccattgcttgtaacagtagctcctagtgacgaaatttgcacagtgcagagtgtagctgtggtgatacctgggtcagaatctggtgacgatgcaaatcaaagttctgataagagtaagcaacctcaggaacattctgtcactcaaactgttgatgaccatttatctgaaacaagaagtgggaaattagatcaatcaacatgcatcacaggattagtctctgacaattgtgttgtctcagaggacaaaacattgatgagtgaagaccgtgaagagcaaagccctgtgtccggagaacagagagttagcttggaagcaaatgccaatgagcctgaggaaaagaacctagctaacgtcacatcaactgatctccacaccaaaagtctgcagcatgatattgacagaatagctaaagagactgataaagaagttttagctcaggagaattgtaatgaccagcctgttcctgcccagactgaccaagaaattaagttaaacgatgaacttgctgatccggatgttttagctcaggagaattgtaatgaccagcccgttcctgcccagactgacctagaaattaagttacacgatgaacttgctgatccggaccatgaagagcaaagccctgtatccggagaacggagagttagcttggaagcaaatgccaacgagcctgaggaaaagaacctagctaacgtcatatcaattgatctccacaccaaaagtctgcagcatgataatggcagaatagctgaagagactgataaagagcatgaagaaaaatatgcagttagccctatagccgttgaaaagagcttccgtcaggaagcaagtgcaattgaatctgcaggaaaacccctaactgtcatcttttctaacgatctccacaccaaacatctgcaacatgattgtgatgtgctaattaaggagactggtgaagaagttttagctcaggagaattgtaatgaccagcctgttcctgcccagaccgacctagaaattaagttaaatgatgaacttgctgatccggatgttttagctcaggagaattgtaatgaccagcctgttcctgccaacgagcctgaggaaaagaacctagctaacgtcatatcaactgatctccacaccaaaactctgcagcatgataatgacagaatagctgaagagactgataaagatgtttcgtctttggttttccctattgaagagcatgaagaaaaatatgcagtgagccctatagctgttgaaaagagcgtcagtcgggaagccagtgcatgtgaatctgcaggaaaacccctaactgtcatcttttctaacgatctccacaccaaacatctgcaacatgattgtgatgtgctaattaaggagactggtgaagatgttttagctcaggagaattgtaatgaccagcctgttccggcccagactgacctagaaatgaagttaaacgatgaacttgctgatccggaagttttagctcaggagaattgtaatgaccagcctgttcttgctcagactgacctagaaactaagttaaacgatgaacttgctgatctggctatggaatcaggttgtagcattactgaaaggaatgaagggcttgttgctcataatcttgatcaagaaggtttccttgaagcaacaccagagtgcaaacaggaatgtggtttgcctgaggagacagtaatttcctcaaaagaaacaggatctctgctgtgtgcagatcaatcaccaattggtctggaatctttattttcgcaagaaagcatagttgaatcagtggggcattgtgcacttgcttcagcaacaactcataccgaaaatggctttgatgattcaaaagattgccataacaagtctgcacttgaaaatgttcatgtgccagaaccttgttcacacaatgatactaaaggaggcatttttaaaaatgttgattgtatgcatacatcccagcgagatgatagaatggaaggagtaccagaggctaacactgatgaagaacatgttctgtcagcctttttgctggatgcaaatcacctaaacgttcattaattctgaagaagtggtttgtgagggtgaagatagtaaggagcttctccattcggaagactgtaaagcttcatccgagaaaacagatgtgaatgatggcaatgtatatggtattagtgatgctgtagtgagatgtgcactgcatgctccagccgatgataattatgagatttttttgggtcccaatactgatgtaccacgtcaggtttataatgacggatgcagtgatgtcaaagaagatcgatttgcttccaaaccctggacaattgatattattgaggatgcctctgtcaaagaaagatcaaatttaaaagattggcaacttgattccaagttggagggcacagaaatagtggaatctggcctttacttcaataaggatattggtaacattttacatagtggatctattggtgaaataactccatctggttctggtttatcaaaagattcatctgtggactatagaggggaggttttagatggcttctcaatggaagcatctcttgaaaggtcttctacacgtggggaacaaaatggttgtagactagatgctattgagaatccttcaattactttagcaacttctggttataagcatgaaggtgctttatctgaggaagcagtgtacacaaagaagaattacgctggaacatgcttgtcaaatcccagggaattaatcatggagctgcaatcccatttctcaaaggaaaacataaatgaatctgatcctcatgacagccttgtattcccaactgctgaaaattcagcagatgaacagctggttaaagtacaccatggttctaatctgtctcagttaggattaactgatctgttggatggaccaattgggtgttccaataccgacgtgttgtgccagtgtgacaatcataaaaatcaatccaatgaggacaaggtagaggaagttgaggcggtgtctgctgctaaatacatagaaagtgaagttgtgctgctcccatctcaagagagatcaaatttgaataatgagcagcttaacaccaagttggaaagcccaaacattatgggatcttgccttaactgtgataacgatgtttgtaatacttcggacaatggatctgtttttgtcattggtaaaagaactccatctgcttctggcttaccagaagattatcctaaggatagtgacttgcaacaaccggttttagatagcttctcagtggtttcatcttttcaagacaatatatctgggaagaaaactgtttctggtgtagcaggcagtgagattctttctttaagtttagcaactcctgattataaacatgaagatggtttctctgaggaagcagtatgcagaacaaagaattatactggaacttcctcggtagatccgaggcatttagacatggaggggcactctatttactctgagggaggtactgaaaaatctaatctgcaagataatcttgcatttctaagcgctgagagtggaaaagatgaacctattatttgccatgttgagaaactggttgacgcacatgcttcttcagatacataccaaggtccttgtcaagatctaggcagacatgaagaacaagagagctgcatgtctattcctatgcaagccaaagaaagtggaggggttttgaggtctagccacacgaaagggtcagttacagcagcccaaattgatttggcaggtgatgcccatcttattgtgagtccttttgatcatgtaatccgacaatcattataccacagtgataatgctgctgccaagcaagtgtttagtgaggagaaagaggaaacaaaatctatctcttcttcagatattgatatccttcatgaaaaatcatactccagtggacacgatgaccatgctgcttgtgctgccgaaactcagttctaccatccacagaaagcatctatatctgatggactacatttgggtcctagttctttgcaagtagaatcactggatgctttggatagcgatatactgtatgttaacacaggagttctcgagcagcatcataaagagggttactatgaacccagtgtctaccaaatcacttcaggcatttgcacaatgtctgaagctgaaccattcgaagttttagaaactggaaaagatgtaaaaacgccatctaagctagatgagcaacttaatcctgggttggacggagatgaagctgagaaacacagcttagactgtggtacagacaccagtcctgtgatgagcaagagaaccctttcttcaccaggatcaggaccatgccagcagtatgtaaatgaaagcaccaccagtacacagtcgactgataatcacccaaacgacctacccgctccgagatctcctgaacaatccgcgtgttttcagaatgacaacgattcgggttcagtaggcatttgtcaaagcagcaggcgaagaggtatagatgaactttgcggtaagctgcagagtttcaaagtttccagcgccgtaaaaggaagctacgtagctatgggtgcacctcgtccgaagcctggggacagcacgagccgatctgcagccgcgctgctcaggaacatagagaacacaactgctgttaaagctggccgtcctcctgtcaagccaaacgccgatggtaaggactcgtctaggcgagccctgcagcccataagcggaaggcctgacagtaggtagttcggcggttccttaataagtgtgtcgtgtttgtgttcaaccctttgttgaaagccaggtccgtgtatttgtgcagcttgttgtcatgaagctgctgtgtgcgtgtcatttaacataagcgtgcgtgaagttgtgttatggaagtggctaaatatgtgttcgttaggaggtcaattggcttgaactgaccctgctgttccgtgatttctgtctaaatatacttgtgtggctgtgtcactttgattggccttatcgatcacatgcaatgggat

SEQ ID NO: 30636 - DNA, 6821 bp, Zea Mays
gattcgaaatttcgaacacgcgccgcctgagagagagagagagagtgagagaaagagagagagagagcaggagagatggtcaggcctttgtgatctcccgcggggctggaggtgtgcggggatggatctcgcggggatgaagcggcgggagctccaggcgctctgcaagcggcacggcctccccgccgggggcaccaacgccgacctcgtcggacgtctcgacgccgtgctttcggggcccgctgttgtggaggaggaggttgccggagtgccggcgaggaaggggtgtctgaagcaaacgggcggaggtgccaccgaggccaagaaggttacttttggggcggaggtagggaaggccaggagactgaggtctcgggtcatatggtcgccggtcgttgccaagacaagggggaagtctgctcgagccggtactgattctgctgctgaagacggtatttctgcagatgtgggcgctgatgtcccagtgaggcggtccaggaggaattcgttcaatcctgccgaggctgaggaagcaggagaggctgttgctgttgacaggaagcccaagcgcaagaatcaggagaatgacgagggcgttgctgttatcgctcaggctagagttacgagaaggtcaaatttggagtggtctgctactgtattgcctcctgctgttgagaagaagagagggaggcagaatgcagctgagtctgatgtgcagaagtccgctctggtggaagtaacagctaggactacaaggtctcgctcaatcgtacctgttgtggtgccacccactgtggttgagaacaagaggaggaagactggagatccacaaacaactgtagagttgactatgctttcagatgtgcccagaagtgattttcctgccaccaggtctttaaggaacaaaattgtccacgttaacaacagcgtcgtggacgaaactcacactaccaggcagttggaaaacaagatgcgtccgtctactcgtaggcatcaacaggttgcatcttctccggaggataaaggtcaaaaaattcctgctaccagtaagtcccctctactgaggtggtcacggagaaactattctgaggccaatagtgcaaattcagtaaacatcaaattggccaaagactcgagcacagctcagccattggcacaccataattctcattctgaagatttggagaaacaaccagcagttaaagaaccaattaaacggtcaacacgtaaatctattgctttggctgcacttgagaaagagaaggatgtaattgaaggaaagaaccctgaagcacatgttaggcgatcaacgaggaaatcagttgtgcaggttaaagataccaaaagtattgttgaagagactcaatatgctaacagtgaagatgtggcgaagcaaccagcaactaaaggacctgctagggggctgagacgtaaatctgttatcacagaattgcatgagaaagagaagagtctcattgccgaaaagaacatggaaacagatgaagcgatattaacgcggaagcctgtaatcccagttaaaaatattaaagctgttggtgaaggaattcaaattggtaagggcaaagatgtggataaacaatttgttgtgaagcaacctactaggcgatcatcgcgcaaatctgtgctgcctgatatgcttgagaataatagtggacttctagcacccaaaatgaatgctgagatgaatgttaggagatcaacacggaagtctgttcttcctgacatgcataatgagaagcaagatcaccataaaatggctagaaatgagaacttgcaaagtggtaaatatcaagatggtgagaagcaacagaaagtaaaagattctattaggcaatcaaggagatctatcgctacagtgctacttgagggacaaaataatgatgaaggaaaaaagttcaaaaatcctacgaggaggacaacacacaaatctcatgcccttaatgcagttgaagaggtcagcatggatcacattgaagttggtgaagaaggcttgaaattgaggaagcgcagtaggtttttgctggaaatatcatcttcagctaatgtttcctggaagcatcagaatgcacagatctctaatgaaaaagataacacagaaggatcgcagcaggcatcaaattgcacaacttcaaagagaaggtcttcaaagaagagacgaacaactgctccagaagaagtgatgcctttcaaggtggcaaatgatgacatagttatcatggaagaaacaaaggacacacttgaatataataatgagtctagtagtaaagttcaagaaatttgtcaggttaatgctgcaagagaagagttctcttcaggtccattgcttgtaacagtagctcctagtgacgaaatttgcacagtgcagagtgtagctgtggtgatacctgggtcagaatctggtgacgatgcaaatcaaagttctgataagagtaagcaacctcaggaacattctgtcactcaaactgttgatgaccatttatctgaaacaagaagtgggaaattagatcaatcaacatgcatcacaggattagtctctgacaattgtgttgtctcagaggacaaaacattgatgagtgaaggtgagggagactttgttggtccaaaatcaccaaatggtttatcaattagtttcattgtcgcagaccgtgaagagcaaagccctgtgtccggagaacagagagttagcttggaagcaaatgccaatgagcctgaggaaaagaacctagctaacgtcacatcaactgatctccacaccaaaagtctgcagcatgatattgacagaatagctaaagagactgataaagatgttttgtctttggttttccctattgaagagcatgaagaaaaatatggagtgagccctatagctgttgaaaagtgcgtctgtcgtgaagcaagtgcatgtgaatctgcacgaaaacccctaaccgttatcttttctaacaatctccacaccaaacatctgcaacatgattgtgatgtgctaattaaggagactggtgaagaagttttagctcaggagaattgtaatgaccagcctgttcctgcccagactgaccaagaaattaagttaaacgatgaacttgctgatccggatgttttagctcaggagaattgtaatgaccagcccgttcctgcccagactgacctagaaattaagttacacgatgaacttgctgatccggaccatgaagagcaaagccctgtatccggagaacggagagttagcttggaagcaaatgccaacgagcctgaggaaaagaacctagctaacgtcatatcaattgatctccacaccaaaagtctgcagcatgataatggcagaatagctgaagagactgataaagatgttttagctcaggagaattgtaatgaccagcctgttccggcccagactgacctagaaatgaagttaaacgatgaacttgctgatccggaagttttagctcaggagaattgtaatgaccagcctgttcttgctcagactgacctagaaactaagttaaacgatgaacttgctgatctggctatggaatcaggttgtagcattactgaaaggaatgaagggcttgttgctcataatcttgatcaagaaggtttccttgaagcaacaccagagtgcaaacaggaatgtggtttgcctgaggagacagtaatttcctcaaaagaaacaggatctctgctgtgtgcagatcaatcaccaattggtctggaatctttattttcgcaagaaagcatagttgaatcagtggggcattgtgcacttgcttcagcaacaactcataccgaaaatggctttgatgattcaaaagattgccataacaagtctgcacttgaaaatgttcatgtgccagaaccttgttcacacaatgatactaaaggaggcatttttaaaaatgttgattgtatgcatacatcccagcgagatgatagaatggaaggagtaccagaggctaacactgatgaagaacatgttctgtcagcctttttgctggatgcaaatcacctaaacgtagtcattaattctgaagaagtggtttgtgagggtgaagatagtaaggagcttctccattcggaagactgtaaagcttcatccgagaaaacagatgtgaatgatggcaatgtatatggtattagtgatgctgtagtgagatgtgcactgcatgctccagccgatgataattatgagatttttttgggtcccaatactgatgtaccacgtcaggtttataatgacggatgcagtgatgtcaaagaagatcgatttgcttccaaaccctggacaattgatattattgaggatgcctctgtcaaagaaagatcaaatttaaaagattggcaacttgattccaagttggagggcacagaaatagtggaatctggcctttacttcaataaggatattggtaacattttacatagtggatctattggtgaaataactccatctggttctggtttatcaaaagattcatctgtggactatagaggggaggttttagatggcttctcaatggaagcatctcttgaaaggtcttctacacgtggggaacaaaatggttgtagactagatgctattgagaatccttcaattactttagcaacttctggttataagcatgaaggtgctttatctgaggaagcagtgtacacaaagaagaattacgctggaacatgcttgtcaaatcccagggaattaatcatggagctgcaatcccatttctcaaaggaaaacataaatgaatctgatcctcatgacagccttgtattcccaactgctgaaaattcagcagatgaacagctggttaaagtacaccatggttctaatctgtctcagttaggattaactgatctgttggatggaccaattgggtgttccaataccgacgtgttgtgccagtgtgacaatcataaaaatcaatccaatgaggacaaggtagaggaagttgaggcggtgtctgctgctaaatacatagaaagtgaagttgtgctgctcccatctcaagagagatcaaatttgaataatgagcagcttaacaccaagttggaaagcccaaacattatgggatcttgccttaactgtgataacgatgtttgtaatacttcggacaatggatctgtttttgtcattggtaaaagaactccatctgcttctggcttaccagaagattatcctaaggatagtgacttgcaacaaccggttttagatagcttctcagtggtttcatcttttcaagacaatatatctgggaagaaaactgtttctggtgtagcaggcagtgagattctttctttaagtttagcaactcctgattataaacatgaagatggtttctctgaggaagcagtatgcagaacaaagaattatactggaacttcctcggtagatccgaggcatttagacatggaggggcactctatttactctgagggagatacataccaaggtccttgtcaagatctaggcagacatgaagaacaagagagctgcatgtctattcctatgcaagccaaagaaagtggaggggttttgaggtctagccacacgaaagggtcagttacagcagcccaaattgatttggcaggtgatgcccatcttattgtgagtgataatgctgctgccaagcaagtgtttagtgaggagaaagaggaaacaaaatctatctcttcttcagatattgatatccttcatgaaaaatcatactccagtggacacgatgaccatgctgcttgtgctgccgaaactcagttctaccatccacagaaagcatctatatctgatggactacatttgggtcctagttctttgcaagtagaatcactggatgctttggatagcgatatactgtatgttaacacaggagttctcgagcagcatcataaagagggttactatgaacccagtgtctaccaaatcacttcaggcatttgcacaatgtctgaagctgaaccattcgaagttttagaaactggaaaagatgtaaaaacgccatctaagctagatgagcaacttaatcctgggttggacggagatgaagctgagaaacacagcttagactgtggtacagacaccagtcctgtgatgagcaagagaaccctttcttcaccaggatcaggaccatgccagcagtatgtaaatgaaagcaccaccagtacacagtcgactgataatcacccaaacgacctacccgctccgagatctcctgaacaatccgcgtgttttcagaatgacaacgattcgggttcagcatttgtcaaagcagcaggcgaagaggtatagatgaactttgcggtaagctgcagagtttcaaagtttccagcgccgtaaaaggaagctacgtagctatgggtgcacctcgtccgaagcctggggacagcacgagccgatctgcagccgcgctgctcaggaacatagagaacacaactgctgttaaagctggccgtcctcctgtcaagccaaacgccgatggtaaggactcgtctaggcgagccctgcagcccataagcggaaggcctgacagtaggtagttcggcggttccttaataagtgtgtcgtgtttgtgttcaaccctttgttgaaagccaggtccgtgtatttgtgcagcttgttgtcatgaagctgctgtgtgcgtgtcatttaacataagcgtgcgtgaagttgtgttatggaagtggctaaatatgtgttcgttaggaggtcaattggcttgaactgaccctgctgttccgtgatttctgtctaaatatacttgtgtggctgtgtcactttgattggccttatcgatcacatgcaatgggat

SEQ ID NO: 30637 - DNA, 7719 bp, Zea Mays
atggatctcgcggggatgaagcggcgggagctccaggcgctctgcaagcggcacggcctccccgccgggggcaccaacgccgacctcgtcggacgtctcgacgccgtgctttcggggcccgctgttgtggaggaggaggttgccggagtgccggcgaggaaggggtgtctgaagcaaacgggcggaggtgccaccgaggccaagaaggttacttttggggcggaggtagggaaggccaggagactgaggtctcgggtcatatggtcgccggtcgttgccaagacaagggggaagtctgctcgagccggtactgattctgctgctgaagacggtatttctgcagatgtgggcgctgatgtcccagtgaggcggtccaggaggaattcgttcaatcctgccgaggctgaggaagcaggagaggctgttgctgttgacaggaagcccaagcgcaagaatcaggagaatgacgagggcgttgctgttatcgctcaggctagagttacgagaaggtcaaatttggagtggtctgctactgtattgcctcctgctgttgagaagaagagagggaggcagaatgcagctgagtctgatgtgcagaagtccgctctggtggaagtaacagctaggactacaaggtctcgctcaatcgtacctgttgtggtgccacccactgtggttgagaacaagaggaggaagactggagatccacaaacaactgtagagttgactatgctttcagatgtgcccagaagtgattttcctgccaccaggtctttaaggaacaaaattgtccacgttaacaacagcgtcgtggacgaaactcacactaccaggcagttggaaaacaagatgcgtccgtctactcgtaggcatcaacaggttgcatcttctccggaggataaaggtcaaaaaattcctgctaccagtaagtcccctctactgaggtggtcacggagaaactattctgaggccaatagtgcaaattcagtaaacatcaaattggccaaagactcgagcacagctcagccattggcacaccataattctcattctgaagatttggagaaacaaccagcagttaaagaaccaattaaacggtcaacacgtaaatctattgctttggctgcacttgagaaagagaaggatgtaattgaaggaaagaaccctgaagcacatgttaggcgatcaacgaggaaatcagttgtgcaggttaaagataccaaaagtattgttgaagagactcaatatgctaacagtgaagatgtggcgaagcaaccagcaactaaaggacctgctagggggctgagacgtaaatctgttatcacagaattgcatgagaaagagaagagtctcattgccgaaaagaacatggaaacagatgaagcgatattaacgcggaagcctgtaatcccagttaaaaatattaaagctgttggtgaaggaattcaaattggtaagggcaaagatgtggataaacaatttgttgtgaagcaacctactaggcgatcatcgcgcaaatctgtgctgcctgatatgcttgagaataatagtggacttctagcacccaaaatgaatgctgagatgaatgttaggagatcaacacggaagtctgttcttcctgacatgcataatgagaagcaagatcaccataaaatggctagaaatgagaacttgcaaagtggtaaatatcaagatggtgagaagcaacagaaagtaaaagattctattaggcaatcaaggagatctatcgctacagtgctacttgagggacaaaataatgatgaaggaaaaaagttcaaaaatcctacgaggaggacaacacacaaatctcatgcccttaatgcagttgaagaggtcagcatggatcacattgaagttggtgaagaaggcttgaaattgaggaagcgcagtaggtttttgctggaaatatcatcttcagctaatgtttcctggaagcatcagaatgcacagatctctaatgaaaaagataacacagaaggatcgcagcaggcatcaaattgcacaacttcaaagagaaggtcttcaaagaagagacgaacaactgctccagaagaagtgatgcctttcaaggtggcaaatgatgacatagttatcatggaagaaacaaaggacacacttgaatataataatgagtctagtagtaaagttcaagaaatttgtcaggttaatgctgcaagagaagagttctcttcaggtccattgcttgtaacagtagctcctagtgacgaaatttgcacagtgcagagtgtagctgtggtgatacctgggtcagaatctggtgacgatgcaaatcaaagttctgataagagtaagcaacctcaggaacattctgtcactcaaactgttgatgaccatttatctgaaacaagaagtgggaaattagatcaatcaacatgcatcacaggattagtctctgacaattgtgttgtctcagaggacaaaacattgatgagtgaaggaccgtgaagagcaaagccctgtgtccggagaacagagagttagcttggaagcaaatgccaatgagcctgaggaaaagaacctagctaacgtcacatcaactgatctccacaccaaaagtctgcagcatgatattgacagaatagctaaagagactgataaagatgttttgtctttggttttccctattgaagagcatgaagaaaaatatggagtgagccctatagctgttgaaaagtgcgtctgtcgtgaagcaagtgcatgtgaatctgcacgaaaacccctaaccgttatcttttctaacaatctccacaccaaacatctgcaacatgattgtgatgtgctaattaaggagactggtgaagaagttttagctcaggagaattgtaatgaccagcctgttcctgcccagactgaccaagaaattaagttaaacgatgaacttgctgatccggatgttttagctcaggagaattgtaatgaccagcccgttcctgcccagactgacctagaaattaagttacacgatgaacttgctgatccggaccatgaagagcaaagccctgtatccggagaacggagagttagcttggaagcaaatgccaacgagcctgaggaaaagaacctagctaacgtcatatcaattgatctccacaccaaaagtctgcagcatgataatggcagaatagctgaagagactgataaagatgttttgtcttttgttttccctattgaagagcatgaagaaaaatatgcagttagccctatagccgttgaaaagagcttccgtcaggaagcaagtgcaattgaatctgcaggaaaacccctaactgtcatcttttctaacgatctccacaccaaacatctgcaacatgattgtgatgtgctaattaaggagactggtgaagaagttttagctcaggagaattgtaatgaccagcctgttcctgcccagaccgacctagaaattaagttaaatgatgaacttgctgatccggatgttttagctcaggagaattgtaatgaccagcctgttcctgccaacgagcctgaggaaaagaacctagctaacgtcatatcaactgatctccacaccaaaactctgcagcatgataatgacagaatagctgaagagactgataaagaccatgaagagcaaagcaatgtgttcggagaacggagagttagcttggaagcaaatgccaacgagcctgaggaaaagaacctagctaacgtcatatcaactgatctccacaccaaaactctgcagcatgataatgacagaatagctgaagagactgataaagaccatgaagagcaaagcaatgtgtccggagaacggagagttagcttggaagcaaatgccaacgagcctgaggaaaagaacctagctaacgtcatatcaactgatctccacaccaaaactctgcagcatgataatgacagaatagctgaagagactgataaagatgtttcgtctttggttttccctattgaagagcatgaagaaaaatatgcagtgagccctatagctgttgaaaagagcgtcagtcgggaagccagtgcatgtgaatctgcaggaaaacccctaactgtcatcttttctaacgatctccacaccaaacatctgcaacatgattgtgatgtgctaattaaggagactggtgaagatgttttagctcaggagaattgtaatgaccagcctgttccggcccagactgacctagaaatgaagttaaacgatgaacttgctgatccggaagttttagctcaggagaattgtaatgaccagcctgttcttgctcagactgacctagaaactaagttaaacgatgaacttgctgatctggctatggaatcaggttgtagcattactgaaaggaatgaagggcttgttgctcataatcttgatcaagaaggtttccttgaagcaacaccagagtgcaaacaggaatgtggtttgcctgaggagacagtaatttcctcaaaagaaacaggatctctgctgtgtgcagatcaatcaccaattggtctggaatctttattttcgcaagaaagcatagttgaatcagtggggcattgtgcacttgcttcagcaacaactcataccgaaaatggctttgatgattcaaaagattgccataacaagtctgcacttgaaaatgttcatgtgccagaaccttgttcacacaatgatactaaaggaggcatttttaaaaatgttgattgtatgcatacatcccagcgagatgatagaatggaaggagtaccagaggctaacactgatgaagaacatgttctgtcagcctttttgctggatgcaaatcacctaaacgtagtcattaattctgaagaagtggtttgtgagggtgaagatagtaaggagcttctccattcggaagactgtaaagcttcatccgagaaaacagatgtgaatgatggcaatgtatatggtattagtgatgctgtagtgagatgtgcactgcatgctccagccgatgataattatgagatttttttgggtcccaatactgatgtaccacgtcaggtttataatgacggatgcagtgatgtcaaagaagatcgatttgcttccaaaccctggacaattgatattattgaggatgcctctgtcaaagaaagatcaaatttaaaagattggcaacttgattccaagttggagggcacagaaatagtggaatctggcctttacttcaataaggatattggtaacattttacatagtggatctattggtgaaataactccatctggttctggtttatcaaaagattcatctgtggactatagaggggaggttttagatggcttctcaatggaagcatctcttgaaaggtcttctacacgtggggaacaaaatggttgtagactagatgctattgagaatccttcaattactttagcaacttctggttataagcatgaaggtgctttatctgaggaagcagtgtacacaaagaagaattacgctggaacatgcttgtcaaatcccagggaattaatcatggagctgcaatcccatttctcaaaggaaaacataaatgaatctgatcctcatgacagccttgtattcccaactgctgaaaattcagcagatgaacagctggttaaagtacaccatggttctaatctgtctcagttaggattaactgatctgttggatggaccaattgggtgttccaataccgacgtgttgtgccagtgtgacaatcataaaaatcaatccaatgaggacaaggtagaggaagttgaggcggtgtctgctgctaaatacatagaaagtgaagttgtgctgctcccatctcaagagagatcaaatttgaataatgagcagcttaacaccaagttggaaagcccaaacattatgggatcttgccttaactgtgataacgatgtttgtaatacttcggacaatggatctgtttttgtcattggtaaaagaactccatctgcttctggcttaccagaagattatcctaaggatagtgacttgcaacaaccggttttagatagcttctcagtggtttcatcttttcaagacaatatatctgggaagaaaactgtttctggtgtagcaggcagtgagattctttctttaagtttagcaactcctgattataaacatgaagatggtttctctgaggaagcagtatgcagaacaaagaattatactggaacttcctcggtagatccgaggcatttagacatggaggggcactctatttactctgagggaggtactgaaaaatctaatctgcaagataatcttgcatttctaagcgctgagagtggaaaagatgaacctattatttgccatgttgagaaactggttgacgcacatgcttcttcagatacataccaaggtccttgtcaagatctaggcagacatgaagaacaagagagctgcatgtctattcctatgcaagccaaagaaagtggaggggttttgaggtctagccacacgaaagggtcagttacagcagcccaaattgatttggcaggtgatgcccatcttattgtgagtgataatgctgctgccaagcaagtgtttagtgaggagaaagaggaaacaaaatctatctcttcttcagatattgatatccttcatgaaaaatcatactccagtggacacgatgaccatgctgcttgtgctgccgaaactcagttctaccatccacagaaagcatctatatctgatggactacatttgggtcctagttctttgcaagtagaatcactggatgctttggatagcgatatactgtatgttaacacaggagttctcgagcagcatcataaagagggttactatgaacccagtgtctaccaaatcacttcaggcatttgcacaatgtctgaagctgaaccattcgaagttttagaaactggaaaagatgtaaaaacgccatctaagctagatgagcaacttaatcctgggttggacggagatgaagctgagaaacacagcttagactgtggtacagacaccagtcctgtgatgagcaagagaaccctttcttcaccaggatcaggaccatgccagcagtatgtaaatgaaagcaccaccagtacacagtcgactgataatcacccaaacgacctacccgctccgagatctcctgaacaatccgcgtgttttcagaatgacaacgattcgggttcagtaggcatttgtcaaagcagcaggcgaagaggtatagatgaactttgcggtaagctgcagagtttcaaagtttccagcgccgtaaaaggaagctacgtagctatgggtgcacctcgtccgaagcctggggacagcacgagccgatctgcagccgcgctgctcaggaacatagagaacacaactgctgttaaagctggccgtcctcctgtcaagccaaacgccgatggtaaggactcgtctaggcgagccctgcagcccataagcggaaggcctgacagtaggtagttcggcggttccttaataagtgtgtcgtgtttgtgttcaaccctttgttgaaagccaggtccgtgtatttgtgcagcttgttgtcatgaagctgctgtgtgcgtgtcatttaacataagcgtgcgtgaagttgtgttatggaagtggctaaatatgtgttcgttaggaggtcaattggcttgaactgaccctgctgttccgtgatttctgtctaaatatacttgtgtggctgtgtcactttgattggccttatcgatcacatgcaatgggat

SEQ ID NO: 30638 - DNA, 7727 bp, Zea Mays
atggatctcgcggggatgaagcggcgggagctccaggcgctctgcaagcggcacggcctccccgccgggggcaccaacgccgacctcgtcggacgtctcgacgccgtgctttcggggcccgctgttgtggaggaggaggttgccggagtgccggcgaggaaggggtgtctgaagcaaacgggcggaggtgccaccgaggccaagaaggttacttttggggcggaggtagggaaggccaggagactgaggtctcgggtcatatggtcgccggtcgttgccaagacaagggggaagtctgctcgagccggtactgattctgctgctgaagacggtatttctgcagatgtgggcgctgatgtcccagtgaggcggtccaggaggaattcgttcaatcctgccgaggctgaggaagcaggagaggctgttgctgttgacaggaagcccaagcgcaagaatcaggagaatgacgagggcgttgctgttatcgctcaggctagagttacgagaaggtcaaatttggagtggtctgctactgtattgcctcctgctgttgagaagaagagagggaggcagaatgcagctgagtctgatgtgcagaagtccgctctggtggaagtaacagctaggactacaaggtctcgctcaatcgtacctgttgtggtgccacccactgtggttgagaacaagaggaggaagactggagatccacaaacaactgtagagttgactatgctttcagatgtgcccagaagtgattttcctgccaccaggtctttaaggaacaaaattgtccacgttaacaacagcgtcgtggacgaaactcacactaccaggcagttggaaaacaagatgcgtccgtctactcgtaggcatcaacaggttgcatcttctccggaggataaaggtcaaaaaattcctgctaccagtaagtcccctctactgaggtggtcacggagaaactattctgaggccaatagtgcaaattcagtaaacatcaaattggccaaagactcgagcacagctcagccattggcacaccataattctcattctgaagatttggagaaacaaccagcagttaaagaaccaattaaacggtcaacacgtaaatctattgctttggctgcacttgagaaagagaaggatgtaattgaaggaaagaaccctgaagcacatgttaggcgatcaacgaggaaatcagttgtgcaggttaaagataccaaaagtattgttgaagagactcaatatgctaacagtgaagatgtggcgaagcaaccagcaactaaaggacctgctagggggctgagacgtaaatctgttatcacagaattgcatgagaaagagaagagtctcattgccgaaaagaacatggaaacagatgaagcgatattaacgcggaagcctgtaatcccagttaaaaatattaaagctgttggtgaaggaattcaaattggtaagggcaaagatgtggataaacaatttgttgtgaagcaacctactaggcgatcatcgcgcaaatctgtgctgcctgatatgcttgagaataatagtggacttctagcacccaaaatgaatgctgagatgaatgttaggagatcaacacggaagtctgttcttcctgacatgcataatgagaagcaagatcaccataaaatggctagaaatgagaacttgcaaagtggtaaatatcaagatggtgagaagcaacagaaagtaaaagattctattaggcaatcaaggagatctatcgctacagtgctacttgagggacaaaataatgatgaaggaaaaaagttcaaaaatcctacgaggaggacaacacacaaatctcatgcccttaatgcagttgaagaggtcagcatggatcacattgaagttggtgaagaaggcttgaaattgaggaagcgcagtaggtttttgctggaaatatcatcttcagctaatgtttcctggaagcatcagaatgcacagatctctaatgaaaaagataacacagaaggatcgcagcaggcatcaaattgcacaacttcaaagagaaggtcttcaaagaagagacgaacaactgctccagaagaagtgatgcctttcaaggtggcaaatgatgacatagttatcatggaagaaacaaaggacacacttgaatataataatgagtctagtagtaaagttcaagaaatttgtcaggttaatgctgcaagagaagagttctcttcaggtccattgcttgtaacagtagctcctagtgacgaaatttgcacagtgcagagtgtagctgtggtgatacctgggtcagaatctggtgacgatgcaaatcaaagttctgataagagtaagcaacctcaggaacattctgtcactcaaactgttgatgaccatttatctgaaacaagaagtgggaaattagatcaatcaacatgcatcacaggattagtctctgacaattgtgttgtctcagaggacaaaacattgatgagtgaagaccgtgaagagcaaagccctgtgtccggagaacagagagttagcttggaagcaaatgccaatgagcctgaggaaaagaacctagctaacgtcacatcaactgatctccacaccaaaagtctgcagcatgatattgacagaatagctaaagagactgataaagatgttttgtctttggttttccctattgaagagcatgaagaaaaatatggagtgagccctatagctgttgaaaagtgcgtctgtcgtgaagcaagtgcatgtgaatctgcacgaaaacccctaaccgttatcttttctaacaatctccacaccaaacatctgcaacatgattgtgatgtgctaattaaggagactggtgaagaagttttagctcaggagaattgtaatgaccagcctgttcctgcccagactgaccaagaaattaagttaaacgatgaacttgctgatccggatgttttagctcaggagaattgtaatgaccagcccgttcctgcccagactgacctagaaattaagttacacgatgaacttgctgatccggaccatgaagagcaaagccctgtatccggagaacggagagttagcttggaagcaaatgccaacgagcctgaggaaaagaacctagctaacgtcatatcaattgatctccacaccaaaagtctgcagcatgataatggcagaatagctgaagagactgataaagagcatgaagaaaaatatgcagttagccctatagccgttgaaaagagcttccgtcaggaagcaagtgcaattgaatctgcaggaaaacccctaactgtcatcttttctaacgatctccacaccaaacatctgcaacatgattgtgatgtgctaattaaggagactggtgaagaagttttagctcaggagaattgtaatgaccagcctgttcctgcccagaccgacctagaaattaagttaaatgatgaacttgctgatccggatgttttagctcaggagaattgtaatgaccagcctgttcctgccaacgagcctgaggaaaagaacctagctaacgtcatatcaactgatctccacaccaaaactctgcagcatgataatgacagaatagctgaagagactgataaagaccatgaagagcaaagcaatgtgttcggagaacggagagttagcttggaagcaaatgccaacgagcctgaggaaaagaacctagctaacgtcatatcaactgatctccacaccaaaactctgcagcatgataatgacagaatagctgaagagactgataaagaccatgaagagcaaagcaatgtgtccggagaacggagagttagcttggaagcaaatgccaacgagcctgaggaaaagaacctagctaacgtcatatcaactgatctccacaccaaaactctgcagcatgataatgacagaatagctgaagagactgataaagatgtttcgtctttggttttccctattgaagagcatgaagaaaaatatgcagtgagccctatagctgttgaaaagagcgtcagtcgggaagccagtgcatgtgaatctgcaggaaaacccctaactgtcatcttttctaacgatctccacaccaaacatctgcaacatgattgtgatgtgctaattaaggagactggtgaagatgttttagctcaggagaattgtaatgaccagcctgttccggcccagactgacctagaaatgaagttaaacgatgaacttgctgatccggaagttttagctcaggagaattgtaatgaccagcctgttcttgctcagactgacctagaaactaagttaaacgatgaacttgctgatctggctatggaatcaggttgtagcattactgaaaggaatgaagggcttgttgctcataatcttgatcaagaaggtttccttgaagcaacaccagagtgcaaacaggaatgtggtttgcctgaggagacagtaatttcctcaaaagaaacaggatctctgctgtgtgcagatcaatcaccaattggtctggaatctttattttcgcaagaaagcatagttgaatcagtggggcattgtgcacttgcttcagcaacaactcataccgaaaatggctttgatgattcaaaagattgccataacaagtctgcacttgaaaatgttcatgtgccagaaccttgttcacacaatgatactaaaggaggcatttttaaaaatgttgattgtatgcatacatcccagcgagatgatagaatggaaggagtaccagaggctaacactgatgaagaacatgttctgtcagcctttttgctggatgcaaatcacctaaacgtagtcattaattctgaagaagtggtttgtgagggtgaagatagtaaggagcttctccattcggaagactgtaaagcttcatccgagaaaacagatgtgaatgatggcaatgtatatggtattagtgatgctgtagtgagatgtgcactgcatgctccagccgatgataattatgagatttttttgggtcccaatactgatgtaccacgtcaggtttataatgacggatgcagtgatgtcaaagaagatcgatttgcttccaaaccctggacaattgatattattgaggatgcctctgtcaaagaaagatcaaatttaaaagattggcaacttgattccaagttggagggcacagaaatagtggaatctggcctttacttcaataaggatattggtaacattttacatagtggatctattggtgaaataactccatctggttctggtttatcaaaagattcatctgtggactatagaggggaggttttagatggcttctcaatggaagcatctcttgaaaggtcttctacacgtggggaacaaaatggttgtagactagatgctattgagaatccttcaattactttagcaacttctggttataagcatgaaggtgctttatctgaggaagcagtgtacacaaagaagaattacgctggaacatgcttgtcaaatcccagggaattaatcatggagctgcaatcccatttctcaaaggaaaacataaatgaatctgatcctcatgacagccttgtattcccaactgctgaaaattcagcagatgaacagctggttaaagtacaccatggttctaatctgtctcagttaggattaactgatctgttggatggaccaattgggtgttccaataccgacgtgttgtgccagtgtgacaatcataaaaatcaatccaatgaggacaaggtagaggaagttgaggcggtgtctgctgctaaatacatagaaagtgaagttgtgctgctcccatctcaagagagatcaaatttgaataatgagcagcttaacaccaagttggaaagcccaaacattatgggatcttgccttaactgtgataacgatgtttgtaatacttcggacaatggatctgtttttgtcattggtaaaagaactccatctgcttctggcttaccagaagattatcctaaggatagtgacttgcaacaaccggttttagatagcttctcagtggtttcatcttttcaagacaatatatctgggaagaaaactgtttctggtgtagcaggcagtgagattctttctttaagtttagcaactcctgattataaacatgaagatggtttctctgaggaagcagtatgcagaacaaagaattatactggaacttcctcggtagatccgaggcatttagacatggaggggcactctatttactctgagggaggtactgaaaaatctaatctgcaagataatcttgcatttctaagcgctgagagtggaaaagatgaacctattatttgccatgttgagaaactggttgacgcacatgcttcttcagatacataccaaggtccttgtcaagatctaggcagacatgaagaacaagagagctgcatgtctattcctatgcaagccaaagaaagtggaggggttttgaggtctagccacacgaaagggtcagttacagcagcccaaattgatttggcaggtgatgcccatcttattgtgagtccttttgatcatgtaatccgacaatcattataccacagtgataatgctgctgccaagcaagtgtttagtgaggagaaagaggaaacaaaatctatctcttcttcagatattgatatccttcatgaaaaatcatactccagtggacacgatgaccatgctgcttgtgctgccgaaactcagttctaccatccacagaaagcatctatatctgatggactacatttgggtcctagttctttgcaagtagaatcactggatgctttggatagcgatatactgtatgttaacacaggagttctcgagcagcatcataaagagggttactatgaacccagtgtctaccaaatcacttcaggcatttgcacaatgtctgaagctgaaccattcgaagttttagaaactggaaaagatgtaaaaacgccatctaagctagatgagcaacttaatcctgggttggacggagatgaagctgagaaacacagcttagactgtggtacagacaccagtcctgtgatgagcaagagaaccctttcttcaccaggatcaggaccatgccagcagtatgtaaatgaaagcaccaccagtacacagtcgactgataatcacccaaacgacctacccgctccgagatctcctgaacaatccgcgtgttttcagaatgacaacgattcgggttcagtaggcatttgtcaaagcagcaggcgaagaggtatagatgaactttgcggtaagctgcagagtttcaaagtttccagcgccgtaaaaggaagctacgtagctatgggtgcacctcgtccgaagcctggggacagcacgagccgatctgcagccgcgctgctcaggaacatagagaacacaactgctgttaaagctggccgtcctcctgtcaagccaaacgccgatggtaaggactcgtctaggcgagccctgcagcccataagcggaaggcctgacagtaggtagttcggcggttccttaataagtgtgtcgtgtttgtgttcaaccctttgttgaaagccaggtccgtgtatttgtgcagcttgttgtcatgaagctgctgtgtgcgtgtcatttaacataagcgtgcgtgaagttgtgttatggaagtggctaaatatgtgttcgttaggaggtcaattggcttgaactgaccctgctgttccgtgatttctgtctaaatatacttgtgtggctgtgtcactttgattggccttatcgatcacatgcaatgggat

SEQ ID NO: 30639 - DNA, 7766 bp, Zea Mays
atggatctcgcggggatgaagcggcgggagctccaggcgctctgcaagcggcacggcctccccgccgggggcaccaacgccgacctcgtcggacgtctcgacgccgtgctttcggggcccgctgttgtggaggaggaggttgccggagtgccggcgaggaaggggtgtctgaagcaaacgggcggaggtgccaccgaggccaagaaggttacttttggggcggaggtagggaaggccaggagactgaggtctcgggtcatatggtcgccggtcgttgccaagacaagggggaagtctgctcgagccgatgtgggcgctgatgtcccagtgaggcggtccaggaggaattcgttcaatcctgccgaggctgaggaagcaggagaggctgttgctgttgacaggaagcccaagcgcaagaatcaggagaatgacgagggcgttgctgttatcgctcaggctagagttacgagaaggtcaaatttggagtggtctgctactgtattgcctcctgctgttgagaagaagagagggaggcagaatgcagctgagtctgatgtgcagaagtccgctctggtggaagtaacagctaggactacaaggtctcgctcaatcgtacctgttgtggtgccacccactgtggttgagaacaagaggaggaagactggagatccacaaacaactgtagagttgactatgctttcagatgtgcccagaagtgattttcctgccaccaggtctttaaggaacaaaattgtccacgttaacaacagcgtcgtggacgaaactcacactaccaggcagttggaaaacaagatgcgtccgtctactcgtaggcatcaacaggttgcatcttctccggaggataaaggtcaaaaaattcctgctaccagtaagtcccctctactgaggtggtcacggagaaactattctgaggccaatagtgcaaattcagtaaacatcaaattggccaaagactcgagcacagctcagccattggcacaccataattctcattctgaagatttggagaaacaaccagcagttaaagaaccaattaaacggtcaacacgtaaatctattgctttggctgcacttgagaaagagaaggatgtaattgaaggaaagaaccctgaagcacatgttaggcgatcaacgaggaaatcagttgtgcaggttaaagataccaaaagtattgttgaagagactcaatatgctaacagtgaagatgtggcgaagcaaccagcaactaaaggacctgctagggggctgagacgtaaatctgttatcacagaattgcatgagaaagagaagagtctcattgccgaaaagaacatggaaacagatgaagcgatattaacgcggaagcctgtaatcccagttaaaaatattaaagctgttggtgaaggaattcaaattggtaagggcaaagatgtggataaacaatttgttgtgaagcaacctactaggcgatcatcgcgcaaatctgtgctgcctgatatgcttgagaataatagtggacttctagcacccaaaatgaatgctgagatgaatgttaggagatcaacacggaagtctgttcttcctgacatgcataatgagaagcaagatcaccataaaatggctagaaatgagaacttgcaaagtggtaaatatcaagatggtgagaagcaacagaaagtaaaagattctattaggcaatcaaggagatctatcgctacagtgctacttgagggacaaaataatgatgaaggaaaaaagttcaaaaatcctacgaggaggacaacacacaaatctcatgcccttaatgcagttgaagaggtcagcatggatcacattgaagttggtgaagaaggcttgaaattgaggaagcgcagtaggtttttgctggaaatatcatcttcagctaatgtttcctggaagcatcagaatgcacagatctctaatgaaaaagataacacagaaggatcgcagcaggcatcaaattgcacaacttcaaagagaaggtcttcaaagaagagacgaacaactgctccagaagaagtgatgcctttcaaggtggcaaatgatgacatagttatcatggaagaaacaaaggacacacttgaatataataatgagtctagtagtaaagttcaagaaatttgtcaggttaatgctgcaagagaagagttctcttcaggtccattgcttgtaacagtagctcctagtgacgaaatttgcacagtgcagagtgtagctgtggtgatacctgggtcagaatctggtgacgatgcaaatcaaagttctgataagagtaagcaacctcaggaacattctgtcactcaaactgttgatgaccatttatctgaaacaagaagtgggaaattagatcaatcaacatgcatcacaggattagtctctgacaattgtgttgtctcagaggacaaaacattgatgagtgaagaccgtgaagagcaaagccctgtgtccggagaacagagagttagcttggaagcaaatgccaatgagcctgaggaaaagaacctagctaacgtcacatcaactgatctccacaccaaaagtctgcagcatgatattgacagaatagctaaagagactgataaagagcatgaagaaaaatatggagtgagccctatagctgttgaaaagtgcgtctgtcgtgaagcaagtgcatgtgaatctgcacgaaaacccctaaccgttatcttttctaacaatctccacaccaaacatctgcaacatgattgtgatgtgctaattaaggagactggtgaagaagttttagctcaggagaattgtaatgaccagcctgttcctgcccagactgaccaagaaattaagttaaacgatgaacttgctgatccggatgttttagctcaggagaattgtaatgaccagcccgttcctgcccagactgacctagaaattaagttacacgatgaacttgctgatccggaccatgaagagcaaagccctgtatccggagaacggagagttagcttggaagcaaatgccaacgagcctgaggaaaagaacctagctaacgtcatatcaattgatctccacaccaaaagtctgcagcatgataatggcagaatagctgaagagactgataaagatgttttgtcttttgttttccctattgaagagcatgaagaaaaatatgcagttagccctatagccgttgaaaagagcttccgtcaggaagcaagtgcaattgaatctgcaggaaaacccctaactgtcatcttttctaacgatctccacaccaaacatctgcaacatgattgtgatgtgctaattaaggagactggtgaaggtaatattgcattaatacttgttccacaacttgttactgatctgcggagatggtgatgaaaacttgtgctgtttgcactgtgttgacattttttaaatgtattctttccctttctcagaagttttagctcaggagaattgtaatgaccagcctgttcctgcccagaccgacctagaaattaagttaaatgatgaacttgctgatccggatgttttagctcaggagaattgtaatgaccagcctgttcctgccaacgagcctgaggaaaagaacctagctaacgtcatatcaactgatctccacaccaaaactctgcagcatgataatgacagaatagctgaagagactgataaagaccatgaagagcaaagcaatgtgttcggagaacggagagttagcttggaagcaaatgccaacgagcctgaggaaaagaacctagctaacgtcatatcaactgatctccacaccaaaactctgcagcatgataatgacagaatagctgaagagactgataaagaccatgaagagcaaagcaatgtgtccggagaacggagagttagcttggaagcaaatgccaacgagcctgaggaaaagaacctagctaacgtcatatcaactgatctccacaccaaaactctgcagcatgataatgacagaatagctgaagagactgataaagatgtttcgtctttggttttccctattgaagagcatgaagaaaaatatgcagtgagccctatagctgttgaaaagagcgtcagtcgggaagccagtgcatgtgaatctgcaggaaaacccctaactgtcatcttttctaacgatctccacaccaaacatctgcaacatgattgtgatgtgctaattaaggagactggtgaagatgttttagctcaggagaattgtaatgaccagcctgttccggcccagactgacctagaaatgaagttaaacgatgaacttgctgatccggaagttttagctcaggagaattgtaatgaccagcctgttcttgctcagactgacctagaaactaagttaaacgatgaacttgctgatctggctatggaatcaggttgtagcattactgaaaggaatgaagggcttgttgctcataatcttgatcaagaaggtttccttgaagcaacaccagagtgcaaacaggaatgtggtttgcctgaggagacagtaatttcctcaaaagaaacaggatctctgctgtgtgcagatcaatcaccaattggtctggaatctttattttcgcaagaaagcatagttgaatcagtggggcattgtgcacttgcttcagcaacaactcataccgaaaatggctttgatgattcaaaagattgccataacaagtctgcacttgaaaatgttcatgtgccagaaccttgttcacacaatgatactaaaggaggcatttttaaaaatgttgattgtatgcatacatcccagcgagatgatagaatggaaggagtaccagaggctaacactgatgaagaacatgttctgtcagcctttttgctggatgcaaatcacctaaacgtagtcattaattctgaagaagtggtttgtgagggtgaagatagtaaggagcttctccattcggaagactgtaaagcttcatccgagaaaacagatgtgaatgatggcaatgtatatggtattagtgatgctgtagtgagatgtgcactgcatgctccagccgatgataattatgagatttttttgggtcccaatactgatgtaccacgtcaggtttataatgacggatgcagtgatgtcaaagaagatcgatttgcttccaaaccctggacaattgatattattgaggatgcctctgtcaaagaaagatcaaatttaaaagattggcaacttgattccaagttggagggcacagaaatagtggaatctggcctttacttcaataaggatattggtaacattttacatagtggatctattggtgaaataactccatctggttctggtttatcaaaagattcatctgtggactatagaggggaggttttagatggcttctcaatggaagcatctcttgaaaggtcttctacacgtggggaacaaaatggttgtagactagatgctattgagaatccttcaattactttagcaacttctggttataagcatgaaggtgctttatctgaggaagcagtgtacacaaagaagaattacgctggaacatgcttgtcaaatcccagggaattaatcatggagctgcaatcccatttctcaaaggaaaacataaatgaatctgatcctcatgacagccttgtattcccaactgctgaaaattcagcagatgaacagctggttaaagtacaccatggttctaatctgtctcagttaggattaactgatctgttggatggaccaattgggtgttccaataccgacgtgttgtgccagtgtgacaatcataaaaatcaatccaatgaggacaaggtagaggaagttgaggcggtgtctgctgctaaatacatagaaagtgaagttgtgctgctcccatctcaagagagatcaaatttgaataatgagcagcttaacaccaagttggaaagcccaaacattatgggatcttgccttaactgtgataacgatgtttgtaatacttcggacaatggatctgtttttgtcattggtaaaagaactccatctgcttctggcttaccagaagattatcctaaggatagtgacttgcaacaaccggttttagatagcttctcagtggtttcatcttttcaagacaatatatctgggaagaaaactgtttctggtgtagcaggcagtgagattctttctttaagtttagcaactcctgattataaacatgaagatggtttctctgaggaagcagtatgcagaacaaagaattatactggaacttcctcggtagatccgaggcatttagacatggaggggcactctatttactctgagggaggtactgaaaaatctaatctgcaagataatcttgcatttctaagcgctgagagtggaaaagatgaacctattatttgccatgttgagaaactggttgacgcacatgcttcttcagatacataccaaggtccttgtcaagatctaggcagacatgaagaacaagagagctgcatgtctattcctatgcaagccaaagaaagtggaggggttttgaggtctagccacacgaaagggtcagttacagcagcccaaattgatttggcaggtgatgcccatcttattgtgagtgataatgctgctgccaagcaagtgtttagtgaggagaaagaggaaacaaaatctatctcttcttcagatattgatatccttcatgaaaaatcatactccagtggacacgatgaccatgctgcttgtgctgccgaaactcagttctaccatccacagaaagcatctatatctgatggactacatttgggtcctagttctttgcaagtagaatcactggatgctttggatagcgatatactgtatgttaacacaggagttctcgagcagcatcataaagagggttactatgaacccagtgtctaccaaatcacttcaggcatttgcacaatgtctgaagctgaaccattcgaagttttagaaactggaaaagatgtaaaaacgccatctaagctagatgagcaacttaatcctgggttggacggagatgaagctgagaaacacagcttagactgtggtacagacaccagtcctgtgatgagcaagagaaccctttcttcaccaggatcaggaccatgccagcagtatgtaaatgaaagcaccaccagtacacagtcgactgataatcacccaaacgacctacccgctccgagatctcctgaacaatccgcgtgttttcagaatgacaacgattcgggttcagcatttgtcaaagcagcaggcgaagaggtatagatgaactttgcggtaagctgcagagtttcaaagtttccagcgccgtaaaaggaagctacgtagctatgggtgcacctcgtccgaagcctggggacagcacgagccgatctgcagccgcgctgctcaggaacatagagaacacaactgctgttaaagctggccgtcctcctgtcaagccaaacgccgatggtaaggactcgtctaggcgagccctgcagcccataagcggaaggcctgacagtaggtagttcggcggttccttaataagtgtgtcgtgtttgtgttcaaccctttgttgaaagccaggtccgtgtatttgtgcagcttgttgtcatgaagctgctgtgtgcgtgtcatttaacataagcgtgcgtgaagttgtgttatggaagtggctaaatatgtgttcgttaggaggtcaattggcttgaactgaccctgctgttccgtgatttctgtctaaatatacttgtgtggctgtgtcactttgattggccttatcgatcacatgcaatgggat

SEQ ID NO: 30640 - DNA, 6949 bp, Zea Mays
atggatctcgcggggatgaagcggcgggagctccaggcgctctgcaagcggcacggcctccccgccgggggcaccaacgccgacctcgtcggacgtctcgacgccgtgctttcggggcccgctgttgtggaggaggaggttgccggagtgccggcgaggaaggggtgtctgaagcaaacgggcggaggtgccaccgaggccaagaaggttacttttggggcggaggtagggaaggccaggagactgaggtctcgggtcatatggtcgccggtcgttgccaagacaagggggaagtctgctcgagccgatgtgggcgctgatgtcccagtgaggcggtccaggaggaattcgttcaatcctgccgaggctgaggaagcaggagaggctgttgctgttgacaggaagcccaagcgcaagaatcaggagaatgacgagggcgttgctgttatcgctcaggctagagttacgagaaggtcaaatttggagtggtctgctactgtattgcctcctgctgttgagaagaagagagggaggcagaatgcagctgagtctgatgtgcagaagtccgctctggtggaagtaacagctaggactacaaggtctcgctcaatcgtacctgttgtggtgccacccactgtggttgagaacaagaggaggaagactggagatccacaaacaactgtagagttgactatgctttcagatgtgcccagaagtgattttcctgccaccaggtctttaaggaacaaaattgtccacgttaacaacagcgtcgtggacgaaactcacactaccaggcagttggaaaacaagatgcgtccgtctactcgtaggcatcaacaggttgcatcttctccggaggataaaggtcaaaaaattcctgctaccagtaagtcccctctactgaggtggtcacggagaaactattctgaggccaatagtgcaaattcagtaaacatcaaattggccaaagactcgagcacagctcagccattggcacaccataattctcattctgaagatttggagaaacaaccagcagttaaagaaccaattaaacggtcaacacgtaaatctattgctttggctgcacttgagaaagagaaggatgtaattgaaggaaagaaccctgaagcacatgttaggcgatcaacgaggaaatcagttgtgcaggttaaagataccaaaagtattgttgaagagactcaatatgctaacagtgaagatgtggcgaagcaaccagcaactaaaggacctgctagggggctgagacgtaaatctgttatcacagaattgcatgagaaagagaagagtctcattgccgaaaagaacatggaaacagatgaagcgatattaacgcggaagcctgtaatcccagttaaaaatattaaagctgttggtgaaggaattcaaattggtaagggcaaagatgtggataaacaatttgttgtgaagcaacctactaggcgatcatcgcgcaaatctgtgctgcctgatatgcttgagaataatagtggacttctagcacccaaaatgaatgctgagatgaatgttaggagatcaacacggaagtctgttcttcctgacatgcataatgagaagcaagatcaccataaaatggctagaaatgagaacttgcaaagtggtaaatatcaagatggtgagaagcaacagaaagtaaaagattctattaggcaatcaaggagatctatcgctacagtgctacttgagggacaaaataatgatgaaggaaaaaagttcaaaaatcctacgaggaggacaacacacaaatctcatgcccttaatgcagttgaagaggtcagcatggatcacattgaagttggtgaagaaggcttgaaattgaggaagcgcagtaggtttttgctggaaatatcatcttcagctaatgtttcctggaagcatcagaatgcacagatctctaatgaaaaagataacacagaaggatcgcagcaggcatcaaattgcacaacttcaaagagaaggtcttcaaagaagagacgaacaactgctccagaagaagtgatgcctttcaaggtggcaaatgatgacatagttatcatggaagaaacaaaggacacacttgaatataataatgagtctagtagtaaagttcaagaaatttgtcaggttaatgctgcaagagaagagttctcttcaggtccattgcttgtaacagtagctcctagtgacgaaatttgcacagtgcagagtgtagctgtggtgatacctgggtcagaatctggtgacgatgcaaatcaaagttctgataagagtaagcaacctcaggaacattctgtcactcaaactgttgatgaccatttatctgaaacaagaagtgggaaattagatcaatcaacatgcatcacaggattagtctctgacaattgtgttgtctcagaggacaaaacattgatgagtgaagaccgtgaagagcaaagccctgtgtccggagaacagagagttagcttggaagcaaatgccaatgagcctgaggaaaagaacctagctaacgtcacatcaactgatctccacaccaaaagtctgcagcatgatattgacagaatagctaaagagactgataaagatgttttgtctttggttttccctattgaagagcatgaagaaaaatatggagtgagccctatagctgttgaaaagtgcgtctgtcgtgaagcaagtgcatgtgaatctgcacgaaaacccctaaccgttatcttttctaacaatctccacaccaaacatctgcaacatgattgtgatgtgctaattaaggagactggtgaagaagttttagctcaggagaattgtaatgaccagcctgttcctgcccagactgaccaagaaattaagttaaacgatgaacttgctgatccggatgttttagctcaggagaattgtaatgaccagcccgttcctgcccagactgacctagaaattaagttacacgatgaacttgctgatccggaccatgaagagcaaagccctgtatccggagaacggagagttagcttggaagcaaatgccaacgagcctgaggaaaagaacctagctaacgtcatatcaattgatctccacaccaaaagtctgcagcatgataatggcagaatagctgaagagactgataaagatgttttagctcaggagaattgtaatgaccagcctgttcctgccaacgagcctgaggaaaagaacctagctaacgtcatatcaactgatctccacaccaaaactctgcagcatgataatgacagaatagctgaagagactgataaagatgtttcgtctttggttttccctattgaagagcatgaagaaaaatatgcagtgagccctatagctgttgaaaagagcgtcagtcgggaagccagtgcatgtgaatctgcaggaaaacccctaactgtcatcttttctaacgatctccacaccaaacatctgcaacatgattgtgatgtgctaattaaggagactggtgaagatgttttagctcaggagaattgtaatgaccagcctgttccggcccagactgacctagaaatgaagttaaacgatgaacttgctgatccggaagttttagctcaggagaattgtaatgaccagcctgttcttgctcagactgacctagaaactaagttaaacgatgaacttgctgatctggctatggaatcaggttgtagcattactgaaaggaatgaagggcttgttgctcataatcttgatcaagaaggtttccttgaagcaacaccagagtgcaaacaggaatgtggtttgcctgaggagacagtaatttcctcaaaagaaacaggatctctgctgtgtgcagatcaatcaccaattggtctggaatctttattttcgcaagaaagcatagttgaatcagtggggcattgtgcacttgcttcagcaacaactcataccgaaaatggctttgatgattcaaaagattgccataacaagtctgcacttgaaaatgttcatgtgccagaaccttgttcacacaatgatactaaaggaggcatttttaaaaatgttgattgtatgcatacatcccagcgagatgatagaatggaaggagtaccagaggctaacactgatgaagaacatgttctgtcagcctttttgctggatgcaaatcacctaaacgtagtcattaattctgaagaagtggtttgtgagggtgaagatagtaaggagcttctccattcggaagactgtaaagcttcatccgagaaaacagatgtgaatgatggcaatgtatatggtattagtgatgctgtagtgagatgtgcactgcatgctccagccgatgataattatgagatttttttgggtcccaatactgatgtaccacgtcaggtttataatgacggatgcagtgatgtcaaagaagatcgatttgcttccaaaccctggacaattgatattattgaggatgcctctgtcaaagaaagatcaaatttaaaagattggcaacttgattccaagttggagggcacagaaatagtggaatctggcctttacttcaataaggatattggtaacattttacatagtggatctattggtgaaataactccatctggttctggtttatcaaaagattcatctgtggactatagaggggaggttttagatggcttctcaatggaagcatctcttgaaaggtcttctacacgtggggaacaaaatggttgtagactagatgctattgagaatccttcaattactttagcaacttctggttataagcatgaaggtgctttatctgaggaagcagtgtacacaaagaagaattacgctggaacatgcttgtcaaatcccagggaattaatcatggagctgcaatcccatttctcaaaggaaaacataaatgaatctgatcctcatgacagccttgtattcccaactgctgaaaattcagcagatgaacagctggttaaagtacaccatggttctaatctgtctcagttaggattaactgatctgttggatggaccaattgggtgttccaataccgacgtgttgtgccagtgtgacaatcataaaaatcaatccaatgaggacaaggtagaggaagttgaggcggtgtctgctgctaaatacatagaaagtgaagttgtgctgctcccatctcaagagagatcaaatttgaataatgagcagcttaacaccaagttggaaagcccaaacattatgggatcttgccttaactgtgataacgatgtttgtaatacttcggacaatggatctgtttttgtcattggtaaaagaactccatctgcttctggcttaccagaagattatcctaaggatagtgacttgcaacaaccggttttagatagcttctcagtggtttcatcttttcaagacaatatatctgggaagaaaactgtttctggtgtagcaggcagtgagattctttctttaagtttagcaactcctgattataaacatgaagatggtttctctgaggaagcagtatgcagaacaaagaattatactggaacttcctcggtagatccgaggcatttagacatggaggggcactctatttactctgagggagatacataccaaggtccttgtcaagatctaggcagacatgaagaacaagagagctgcatgtctattcctatgcaagccaaagaaagtggaggggttttgaggtctagccacacgaaagggtcagttacagcagcccaaattgatttggcaggtgatgcccatcttattgtgagtgataatgctgctgccaagcaagtgtttagtgaggagaaagaggaaacaaaatctatctcttcttcagatattgatatccttcatgaaaaatcatactccagtggacacgatgaccatgctgcttgtgctgccgaaactcagttctaccatccacagaaagcatctatatctgatggactacatttgggtcctagttctttgcaagtagaatcactggatgctttggatagcgatatactgtatgttaacacaggagttctcgagcagcatcataaagagggttactatgaacccagtgtctaccaaatcacttcaggcatttgcacaatgtctgaagctgaaccattcgaagttttagaaactggaaaagatgtaaaaacgccatctaagctagatgagcaacttaatcctgggttggacggagatgaagctgagaaacacagcttagactgtggtacagacaccagtcctgtgatgagcaagagaaccctttcttcaccaggatcaggaccatgccagcagtatgtaaatgaaagcaccaccagtacacagtcgactgataatcacccaaacgacctacccgctccgagatctcctgaacaatccgcgtgttttcagaatgacaacgattcgggttcagcatttgtcaaagcagcaggcgaagaggtatagatgaactttgcggtaagctgcagagtttcaaagtttccagcgccgtaaaaggaagctacgtagctatgggtgcacctcgtccgaagcctggggacagcacgagccgatctgcagccgcgctgctcaggaacatagagaacacaactgctgttaaagctggccgtcctcctgtcaagccaaacgccgatggtaaggactcgtctaggcgagccctgcagcccataagcggaaggcctgacagtaggtagttcggcggttccttaataagtgtgtcgtgtttgtgttcaaccctttgttgaaagccaggtccgtgtatttgtgcagcttgttgtcatgaagctgctgtgtgcgtgtcatttaacataagcgtgcgtgaagttgtgttatggaagtggctaaatatgtgttcgttaggaggtcaattggcttgaactgaccctgctgttccgtgatttctgtctaaatatacttgtgtggctgtgtcactttgattggccttatcgatcacatgcaatgggat

SEQ ID NO: 30641 - DNA, 7483 bp, Zea Mays
atggatctcgcggggatgaagcggcgggagctccaggcgctctgcaagcggcacggcctccccgccgggggcaccaacgccgacctcgtcggacgtctcgacgccgtgctttcggggcccgctgttgtggaggaggaggttgccggagtgccggcgaggaaggggtgtctgaagcaaacgggcggaggtgccaccgaggccaagaaggttacttttggggcggaggtagggaaggccaggagactgaggtctcgggtcatatggtcgccggtcgttgccaagacaagggggaagtctgctcgagccggtactgattctgctgctgaagacggtatttctgcagatgtgggcgctgatgtcccagtgaggcggtccaggaggaattcgttcaatcctgccgaggctgaggaagcaggagaggctgttgctgttgacaggaagcccaagcgcaagaatcaggagaatgacgagggcgttgctgttatcgctcaggctagagttacgagaaggtcaaatttggagtggtctgctactgtattgcctcctgctgttgagaagaagagagggaggcagaatgcagctgagtctgatgtgcagaagtccgctctggtggaagtaacagctaggactacaaggtctcgctcaatcgtacctgttgtggtgccacccactgtggttgagaacaagaggaggaagactggagatccacaaacaactgtagagttgactatgctttcagatgtgcccagaagtgattttcctgccaccaggtctttaaggaacaaaattgtccacgttaacaacagcgtcgtggacgaaactcacactaccaggcagttggaaaacaagatgcgtccgtctactcgtaggcatcaacaggttgcatcttctccggaggataaaggtcaaaaaattcctgctaccagtaagtcccctctactgaggtggtcacggagaaactattctgaggccaatagtgcaaattcagtaaacatcaaattggccaaagactcgagcacagctcagccattggcacaccataattctcattctgaagatttggagaaacaaccagcagttaaagaaccaattaaacggtcaacacgtaaatctattgctttggctgcacttgagaaagagaaggatgtaattgaaggaaagaaccctgaagcacatgttaggcgatcaacgaggaaatcagttgtgcaggttaaagataccaaaagtattgttgaagagactcaatatgctaacagtgaagatgtggcgaagcaaccagcaactaaaggacctgctagggggctgagacgtaaatctgttatcacagaattgcatgagaaagagaagagtctcattgccgaaaagaacatggaaacagatgaagcgatattaacgcggaagcctgtaatcccagttaaaaatattaaagctgttggtgaaggaattcaaattggtaagggcaaagatgtggataaacaatttgttgtgaagcaacctactaggcgatcatcgcgcaaatctgtgctgcctgatatgcttgagaataatagtggacttctagcacccaaaatgaatgctgagatgaatgttaggagatcaacacggaagtctgttcttcctgacatgcataatgagaagcaagatcaccataaaatggctagaaatgagaacttgcaaagtggtaaatatcaagatggtgagaagcaacagaaagtaaaagattctattaggcaatcaaggagatctatcgctacagtgctacttgagggacaaaataatgatgaaggaaaaaagttcaaaaatcctacgaggaggacaacacacaaatctcatgcccttaatgcagttgaagaggtcagcatggatcacattgaagttggtgaagaaggcttgaaattgaggaagcgcagtaggtttttgctggaaatatcatcttcagctaatgtttcctggaagcatcagaatgcacagatctctaatgaaaaagataacacagaaggatcgcagcaggcatcaaattgcacaacttcaaagagaaggtcttcaaagaagagacgaacaactgctccagaagaagtgatgcctttcaaggtggcaaatgatgacatagttatcatggaagaaacaaaggacacacttgaatataataatgagtctagtagtaaagttcaagaaatttgtcaggttaatgctgcaagagaagagttctcttcaggtccattgcttgtaacagtagctcctagtgacgaaatttgcacagtgcagagtgtagctgtggtgatacctgggtcagaatctggtgacgatgcaaatcaaagttctgataagagtaagcaacctcaggaacattctgtcactcaaactgttgatgaccatttatctgaaacaagaagtgggaaattagatcaatcaacatgcatcacaggattagtctctgacaattgtgttgtctcagaggacaaaacattgatgagtgaagaccgtgaagagcaaagccctgtgtccggagaacagagagttagcttggaagcaaatgccaatgagcctgaggaaaagaacctagctaacgtcacatcaactgatctccacaccaaaagtctgcagcatgatattgacagaatagctaaagagactgataaagaagttttagctcaggagaattgtaatgaccagcctgttcctgcccagactgaccaagaaattaagttaaacgatgaacttgctgatccggatgttttagctcaggagaattgtaatgaccagcccgttcctgcccagactgacctagaaattaagttacacgatgaacttgctgatccggaccatgaagagcaaagccctgtatccggagaacggagagttagcttggaagcaaatgccaacgagcctgaggaaaagaacctagctaacgtcatatcaattgatctccacaccaaaagtctgcagcatgataatggcagaatagctgaagagactgataaagagcatgaagaaaaatatgcagttagccctatagccgttgaaaagagcttccgtcaggaagcaagtgcaattgaatctgcaggaaaacccctaactgtcatcttttctaacgatctccacaccaaacatctgcaacatgattgtgatgtgctaattaaggagactggtgaagaagttttagctcaggagaattgtaatgaccagcctgttcctgcccagaccgacctagaaattaagttaaatgatgaacttgctgatccggatgttttagctcaggagaattgtaatgaccagcctgttcctgccaacgagcctgaggaaaagaacctagctaacgtcatatcaactgatctccacaccaaaactctgcagcatgataatgacagaatagctgaagagactgataaagaccatgaagagcaaagcaatgtgttcggagaacggagagttagcttggaagcaaatgccaacgagcctgaggaaaagaacctagctaacgtcatatcaactgatctccacaccaaaactctgcagcatgataatgacagaatagctgaagagactgataaagaccatgaagagcaaagcaatgtgtccggagaacggagagttagcttggaagcaaatgccaacgagcctgaggaaaagaacctagctaacgtcatatcaactgatctccacaccaaaactctgcagcatgataatgacagaatagctgaagagactgataaagatgtttcgtctttggttttccctattgaagagcatgaagaaaaatatgcagtgagccctatagctgttgaaaagagcgtcagtcgggaagccagtgcatgtgaatctgcaggaaaacccctaactgtcatcttttctaacgatctccacaccaaacatctgcaacatgattgtgatgtgctaattaaggagactggtgaagatgttttagctcaggagaattgtaatgaccagcctgttccggcccagactgacctagaaatgaagttaaacgatgaacttgctgatccggaagttttagctcaggagaattgtaatgaccagcctgttcttgctcagactgacctagaaactaagttaaacgatgaacttgctgatctggctatggaatcaggttgtagcattactgaaaggaatgaagggcttgttgctcataatcttgatcaagaaggtttccttgaagcaacaccagagtgcaaacaggaatgtggtttgcctgaggagacagtaatttcctcaaaagaaacaggatctctgctgtgtgcagatcaatcaccaattggtctggaatctttattttcgcaagaaagcatagttgaatcagtggggcattgtgcacttgcttcagcaacaactcataccgaaaatggctttgatgattcaaaagattgccataacaagtctgcacttgaaaatgttcatgtgccagaaccttgttcacacaatgatactaaaggaggcatttttaaaaatgttgattgtatgcatacatcccagcgagatgatagaatggaaggagtaccagaggctaacactgatgaagaacatgttctgtcagcctttttgctggatgcaaatcacctaaacgtagtcattaattctgaagaagtggtttgtgagggtgaagatagtaaggagcttctccattcggaagactgtaaagcttcatccgagaaaacagatgtgaatgatggcaatgtatatggtattagtgatgctgtagtgagatgtgcactgcatgctccagccgatgataattatgagatttttttgggtcccaatactgatgtaccacgtcaggtttataatgacggatgcagtgatgtcaaagaagatcgatttgcttccaaaccctggacaattgatattattgaggatgcctctgtcaaagaaagatcaaatttaaaagattggcaacttgattccaagttggagggcacagaaatagtggaatctggcctttacttcaataaggatattggtaacattttacatagtggatctattggtgaaataactccatctggttctggtttatcaaaagattcatctgtggactatagaggggaggttttagatggcttctcaatggaagcatctcttgaaaggtcttctacacgtggggaacaaaatggttgtagactagatgctattgagaatccttcaattactttagcaacttctggttataagcatgaaggtgctttatctgaggaagcagtgtacacaaagaagaattacgctggaacatgcttgtcaaatcccagggaattaatcatggagctgcaatcccatttctcaaaggaaaacataaatgaatctgatcctcatgacagccttgtattcccaactgctgaaaattcagcagatgaacagctggttaaagtacaccatggttctaatctgtctcagttaggattaactgatctgttggatggaccaattgggtgttccaataccgacgtgttgtgccagtgtgacaatcataaaaatcaatccaatgaggacaaggtagaggaagttgaggcggtgtctgctgctaaatacatagaaagtgaagttgtgctgctcccatctcaagagagatcaaatttgaataatgagcagcttaacaccaagttggaaagcccaaacattatgggatcttgccttaactgtgataacgatgtttgtaatacttcggacaatggatctgtttttgtcattggtaaaagaactccatctgcttctggcttaccagaagattatcctaaggatagtgacttgcaacaaccggttttagatagcttctcagtggtttcatcttttcaagacaatatatctgggaagaaaactgtttctggtgtagcaggcagtgagattctttctttaagtttagcaactcctgattataaacatgaagatggtttctctgaggaagcagtatgcagaacaaagaattatactggaacttcctcggtagatccgaggcatttagacatggaggggcactctatttactctgagggaggtactgaaaaatctaatctgcaagataatcttgcatttctaagcgctgagagtggaaaagatgaacctattatttgccatgttgagaaactggttgacgcacatgcttcttcagatacataccaaggtccttgtcaagatctaggcagacatgaagaacaagagagctgcatgtctattcctatgcaagccaaagaaagtggaggggttttgaggtctagccacacgaaagggtcagttacagcagcccaaattgatttggcaggtgatgcccatcttattgtgagtgataatgctgctgccaagcaagtgtttagtgaggagaaagaggaaacaaaatctatctcttcttcagatattgatatccttcatgaaaaatcatactccagtggacacgatgaccatgctgcttgtgctgccgaaactcagttctaccatccacagaaagcatctatatctgatggactacatttgggtcctagttctttgcaagtagaatcactggatgctttggatagcgatatactgtatgttaacacaggagttctcgagcagcatcataaagagggttactatgaacccagtgtctaccaaatcacttcaggcatttgcacaatgtctgaagctgaaccattcgaagttttagaaactggaaaagatgtaaaaacgccatctaagctagatgagcaacttaatcctgggttggacggagatgaagctgagaaacacagcttagactgtggtacagacaccagtcctgtgatgagcaagagaaccctttcttcaccaggatcaggaccatgccagcagtatgtaaatgaaagcaccaccagtacacagtcgactgataatcacccaaacgacctacccgctccgagatctcctgaacaatccgcgtgttttcagaatgacaacgattcgggttcagcatttgtcaaagcagcaggcgaagaggtatagatgaactttgcggtaagctgcagagtttcaaagtttccagcgccgtaaaaggaagctacgtagctatgggtgcacctcgtccgaagcctggggacagcacgagccgatctgcagccgcgctgctcaggaacatagagaacacaactgctgttaaagctggccgtcctcctgtcaagccaaacgccgatggtaaggactcgtctaggcgagccctgcagcccataagcggaaggcctgacagtaggtagttcggcggttccttaataagtgtgtcgtgtttgtgttcaaccctttgttgaaagccaggtccgtgtatttgtgcagcttgttgtcatgaagctgctgtgtgcgtgtcatttaacataagcgtgcgtgaagttgtgttatggaagtggctaaatatgtgttcgttaggaggtcaattggcttgaactgaccctgctgttccgtgatttctgtctaaatatacttgtgtggctgtgtcactttgattggccttatcgatcacatgcaatgggat

SEQ ID NO: 30642 - DNA, 7260 bp, Zea Mays
tctgaagcaaacgggcggaggtgccaccgaggccaagaaggttacttttggggcggaggtagggaaggccaggagactgaggtctcgggtcatatggtcgccggtcgttgccaagacaagggggaagtctgctcgagccggtactgattctgctgctgaagacggtatttctgcagatgtgggcgctgatgtcccagtgaggcggtccaggaggaattcgttcaatcctgccgaggctgaggaagcaggagaggctgttgctgttgacaggaagcccaagcgcaagaatcaggagaatgacgagggcgttgctgttatcgctcaggctagagttacgagaaggtcaaatttggagtggtctgctactgtattgcctcctgctgttgagaagaagagagggaggcagaatgcagctgagtctgatgtgcagaagtccgctctggtggaagtaacagctaggactacaaggtctcgctcaatcgtacctgttgtggtgccacccactgtggttgagaacaagaggaggaagactggagatccacaaacaactgtagagttgactatgctttcagatgtgcccagaagtgattttcctgccaccaggtctttaaggaacaaaattgtccacgttaacaacagcgtcgtggacgaaactcacactaccaggcagttggaaaacaagatgcgtccgtctactcgtaggcatcaacaggttgcatcttctccggaggataaaggtcaaaaaattcctgctaccagtaagtcccctctactgaggtggtcacggagaaactattctgaggccaatagtgcaaattcagtaaacatcaaattggccaaagactcgagcacagctcagccattggcacaccataattctcattctgaagatttggagaaacaaccagcagttaaagaaccaattaaacggtcaacacgtaaatctattgctttggctgcacttgagaaagagaaggatgtaattgaaggaaagaaccctgaagcacatgttaggcgatcaacgaggaaatcagttgtgcaggttaaagataccaaaagtattgttgaagagactcaatatgctaacagtgaagatgtggcgaagcaaccagcaactaaaggacctgctagggggctgagacgtaaatctgttatcacagaattgcatgagaaagagaagagtctcattgccgaaaagaacatggaaacagatgaagcgatattaacgcggaagcctgtaatcccagttaaaaatattaaagctgttggtgaaggaattcaaattggtaagggcaaagatgtggataaacaatttgttgtgaagcaacctactaggcgatcatcgcgcaaatctgtgctgcctgatatgcttgagaataatagtggacttctagcacccaaaatgaatgctgagatgaatgttaggagatcaacacggaagtctgttcttcctgacatgcataatgagaagcaagatcaccataaaatggctagaaatgagaacttgcaaagtggtaaatatcaagatggtgagaagcaacagaaagtaaaagattctattaggcaatcaaggagatctatcgctacagtgctacttgagggacaaaataatgatgaaggaaaaaagttcaaaaatcctacgaggaggacaacacacaaatctcatgcccttaatgcagttgaagaggtcagcatggatcacattgaagttggtgaagaaggcttgaaattgaggaagcgcagtaggtttttgctggaaatatcatcttcagctaatgtttcctggaagcatcagaatgcacagatctctaatgaaaaagataacacagaaggatcgcagcaggcatcaaattgcacaacttcaaagagaaggtcttcaaagaagagacgaacaactgctccagaagaagtgatgcctttcaaggtggcaaatgatgacatagttatcatggaagaaacaaaggacacacttgaatataataatgagtctagtagtaaagttcaagaaatttgtcaggttaatgctgcaagagaagagttctcttcaggtccattgcttgtaacagtagctcctagtgacgaaatttgcacagtgcagagtgtagctgtggtgatacctgggtcagaatctggtgacgatgcaaatcaaagttctgataagagtaagcaacctcaggaacattctgtcactcaaactgttgatgaccatttatctgaaacaagaagtgggaaattagatcaatcaacatgcatcacaggattagtctctgacaattgtgttgtctcagaggacaaaacattgatgagtgaagaccgtgaagagcaaagccctgtgtccggagaacagagagttagcttggaagcaaatgccaatgagcctgaggaaaagaacctagctaacgtcacatcaactgatctccacaccaaaagtctgcagcatgatattgacagaatagctaaagagactgataaagatgttttgtctttggttttccctattgaagagcatgaagaaaaatatggagtgagccctatagctgttgaaaagtgcgtctgtcgtgaagcaagtgcatgtgaatctgcacgaaaacccctaaccgttatcttttctaacaatctccacaccaaacatctgcaacatgattgtgatgtgctaattaaggagactggtgaagaagttttagctcaggagaattgtaatgaccagcctgttcctgcccagactgaccaagaaattaagttaaacgatgaacttgctgatccggatgttttagctcaggagaattgtaatgaccagcccgttcctgcccagactgacctagaaattaagttacacgatgaacttgctgatccggaccatgaagagcaaagccctgtatccggagaacggagagttagcttggaagcaaatgccaacgagcctgaggaaaagaacctagctaacgtcatatcaattgatctccacaccaaaagtctgcagcatgataatggcagaatagctgaagagactgataaagatgttttagctcaggagaattgtaatgaccagcctgttcctgccaacgagcctgaggaaaagaacctagctaacgtcatatcaactgatctccacaccaaaactctgcagcatgataatgacagaatagctgaagagactgataaagaccatgaagagcaaagcaatgtgttcggagaacggagagttagcttggaagcaaatgccaacgagcctgaggaaaagaacctagctaacgtcatatcaactgatctccacaccaaaactctgcagcatgataatgacagaatagctgaagagactgataaagaccatgaagagcaaagcaatgtgtccggagaacggagagttagcttggaagcaaatgccaacgagcctgaggaaaagaacctagctaacgtcatatcaactgatctccacaccaaaactctgcagcatgataatgacagaatagctgaagagactgataaagatgtttcgtctttggttttccctattgaagagcatgaagaaaaatatgcagtgagccctatagctgttgaaaagagcgtcagtcgggaagccagtgcatgtgaatctgcaggaaaacccctaactgtcatcttttctaacgatctccacaccaaacatctgcaacatgattgtgatgtgctaattaaggagactggtgaagatgttttagctcaggagaattgtaatgaccagcctgttccggcccagactgacctagaaatgaagttaaacgatgaacttgctgatccggaagttttagctcaggagaattgtaatgaccagcctgttcttgctcagactgacctagaaactaagttaaacgatgaacttgctgatctggctatggaatcaggttgtagcattactgaaaggaatgaagggcttgttgctcataatcttgatcaagaaggtttccttgaagcaacaccagagtgcaaacaggaatgtggtttgcctgaggagacagtaatttcctcaaaagaaacaggatctctgctgtgtgcagatcaatcaccaattggtctggaatctttattttcgcaagaaagcatagttgaatcagtggggcattgtgcacttgcttcagcaacaactcataccgaaaatggctttgatgattcaaaagattgccataacaagtctgcacttgaaaatgttcatgtgccagaaccttgttcacacaatgatactaaaggaggcatttttaaaaatgttgattgtatgcatacatcccagcgagatgatagaatggaaggagtaccagaggctaacactgatgaagaacatgttctgtcagcctttttgctggatgcaaatcacctaaacgtagtcattaattctgaagaagtggtttgtgagggtgaagatagtaaggagcttctccattcggaagactgtaaagcttcatccgagaaaacagatgtgaatgatggcaatgtatatggtattagtgatgctgtagtgagatgtgcactgcatgctccagccgatgataattatgagatttttttgggtcccaatactgatgtaccacgtcaggtttataatgacggatgcagtgatgtcaaagaagatcgatttgcttccaaaccctggacaattgatattattgaggatgcctctgtcaaagaaagatcaaatttaaaagattggcaacttgattccaagttggagggcacagaaatagtggaatctggcctttacttcaataaggatattggtaacattttacatagtggatctattggtgaaataactccatctggttctggtttatcaaaagattcatctgtggactatagaggggaggttttagatggcttctcaatggaagcatctcttgaaaggtcttctacacgtggggaacaaaatggttgtagactagatgctattgagaatccttcaattactttagcaacttctggttataagcatgaaggtgctttatctgaggaagcagtgtacacaaagaagaattacgctggaacatgcttgtcaaatcccagggaattaatcatggagctgcaatcccatttctcaaaggaaaacataaatgaatctgatcctcatgacagccttgtattcccaactgctgaaaattcagcagatgaacagctggttaaagtacaccatggttctaatctgtctcagttaggattaactgatctgttggatggaccaattgggtgttccaataccgacgtgttgtgccagtgtgacaatcataaaaatcaatccaatgaggacaaggtagaggaagttgaggcggtgtctgctgctaaatacatagaaagtgaagttgtgctgctcccatctcaagagagatcaaatttgaataatgagcagcttaacaccaagttggaaagcccaaacattatgggatcttgccttaactgtgataacgatgtttgtaatacttcggacaatggatctgtttttgtcattggtaaaagaactccatctgcttctggcttaccagaagattatcctaaggatagtgacttgcaacaaccggttttagatagcttctcagtggtttcatcttttcaagacaatatatctgggaagaaaactgtttctggtgtagcaggcagtgagattctttctttaagtttagcaactcctgattataaacatgaagatggtttctctgaggaagcagtatgcagaacaaagaattatactggaacttcctcggtagatccgaggcatttagacatggaggggcactctatttactctgagggaggtactgaaaaatctaatctgcaagataatcttgcatttctaagcgctgagagtggaaaagatgaacctattatttgccatgttgagaaactggttgacgcacatgcttcttcagatacataccaaggtccttgtcaagatctaggcagacatgaagaacaagagagctgcatgtctattcctatgcaagccaaagaaagtggaggggttttgaggtctagccacacgaaagggtcagttacagcagcccaaattgatttggcaggtgatgcccatcttattgtgagtgataatgctgctgccaagcaagtgtttagtgaggagaaagaggaaacaaaatctatctcttcttcagatattgatatccttcatgaaaaatcatactccagtggacacgatgaccatgctgcttgtgctgccgaaactcagttctaccatccacagaaagcatctatatctgatggactacatttgggtcctagttctttgcaagtagaatcactggatgctttggatagcgatatactgtatgttaacacaggagttctcgagcagcatcataaagagggttactatgaacccagtgtctaccaaatcacttcaggcatttgcacaatgtctgaagctgaaccattcgaagttttagaaactggaaaagatgtaaaaacgccatctaagctagatgagcaacttaatcctgggttggacggagatgaagctgagaaacacagcttagactgtggtacagacaccagtcctgtgatgagcaagagaaccctttcttcaccaggatcaggaccatgccagcagtatgtaaatgaaagcaccaccagtacacagtcgactgataatcacccaaacgacctacccgctccgagatctcctgaacaatccgcgtgttttcagaatgacaacgattcgggttcagtaggcatttgtcaaagcagcaggcgaagaggtatagatgaactttgcggtaagctgcagagtttcaaagtttccagcgccgtaaaaggaagctacgtagctatgggtgcacctcgtccgaagcctggggacagcacgagccgatctgcagccgcgctgctcaggaacatagagaacacaactgctgttaaagctggccgtcctcctgtcaagccaaacgccgatggtaaggactcgtctaggcgagccctgcagcccataagcggaaggcctgacagtaggtagttcggcggttccttaataagtgtgtcgtgtttgtgttcaaccctttgttgaaagccaggtccgtgtatttgtgcagcttgttgtcatgaagctgctgtgtgcgtgtcatttaacataagcgtgcgtgaagttgtgttatggaagtggctaaatatgtgttcgttaggaggtcaattggcttgaactgaccctgctgttccgtgatttctgtctaaatatacttgtgtggctgtgtcactttgattggccttatcgatcacatgcaatgggat

SEQ ID NO: 30643 - DNA, 5401 bp, Zea Mays
gtggcaaatgatgacatagttatcatggaagaaacaaaggacacacttgaatataataatgagtctagtagtaaagttcaagaaatttgtcaggttaatgctgcaagagaagagttctcttcaggtccattgcttgtaacagtagctcctagtgacgaaatttgcacagtgcagagtgtagctgtggtgatacctgggtcagaatctggtgacgatgcaaatcaaagttctgataagagtaagcaacctcaggaacattctgtcactcaaactgttgatgaccatttatctgaaacaagaagtgggaaattagatcaatcaacatgcatcacaggattagtctctgacaattgtgttgtctcagaggacaaaacattgatgagtgaaggtgagggagactttgttggtccaaaatcaccaaatggtttatcaattagtttcattgtcgcagaccgtgaagagcaaagccctgtgtccggagaacagagagttagcttggaagcaaatgccaatgagcctgaggaaaagaacctagctaacgtcacatcaactgatctccacaccaaaagtctgcagcatgatattgacagaatagctaaagagactgataaagatgttttgtctttggttttccctattgaagagcatgaagaaaaatatggagtgagccctatagctgttgaaaagtgcgtctgtcgtgaagcaagtgcatgtgaatctgcacgaaaacccctaaccgttatcttttctaacaatctccacaccaaacatctgcaacatgattgtgatgtgctaattaaggagactggtgaagaagttttagctcaggagaattgtaatgaccagcctgttcctgcccagactgaccaagaaattaagttaaacgatgaacttgctgatccggatgttttagctcaggagaattgtaatgaccagcccgttcctgcccagactgacctagaaattaagttacacgatgaacttgctgatccggaccatgaagagcaaagccctgtatccggagaacggagagttagcttggaagcaaatgccaacgagcctgaggaaaagaacctagctaacgtcatatcaattgatctccacaccaaaagtctgcagcatgataatggcagaatagctgaagagactgataaagatgttttgtcttttgttttccctattgaagagcatgaagaaaaatatgcagttagccctatagccgttgaaaagagcttccgtcaggaagcaagtgcaattgaatctgcaggaaaacccctaactgtcatcttttctaacgatctccacaccaaacatctgcaacatgattgtgatgtgctaattaaggagactggtgaagaagttttagctcaggagaattgtaatgaccagcctgttcctgcccagaccgacctagaaattaagttaaatgatgaacttgctgatccggatgttttagctcaggagaattgtaatgaccagcctgttcctgccaacgagcctgaggaaaagaacctagctaacgtcatatcaactgatctccacaccaaaactctgcagcatgataatgacagaatagctgaagagactgataaagatgtttcgtctttggttttccctattgaagagcatgaagaaaaatatgcagtgagccctatagctgttgaaaagagcgtcagtcgggaagccagtgcatgtgaatctgcaggaaaacccctaactgtcatcttttctaacgatctccacaccaaacatctgcaacatgattgtgatgtgctaattaaggagactggtgaagatgttttagctcaggagaattgtaatgaccagcctgttccggcccagactgacctagaaatgaagttaaacgatgaacttgctgatccggaagttttagctcaggagaattgtaatgaccagcctgttcttgctcagactgacctagaaactaagttaaacgatgaacttgctgatctggctatggaatcaggttgtagcattactgaaaggaatgaagggcttgttgctcataatcttgatcaagaaggtttccttgaagcaacaccagagtgcaaacaggaatgtggtttgcctgaggagacagtaatttcctcaaaagaaacaggatctctgctgtgtgcagatcaatcaccaattggtctggaatctttattttcgcaagaaagcatagttgaatcagtggggcattgtgcacttgcttcagcaacaactcataccgaaaatggctttgatgattcaaaagattgccataacaagtctgcacttgaaaatgttcatgtgccagaaccttgttcacacaatgatactaaaggaggcatttttaaaaatgttgattgtatgcatacatcccagcgagatgatagaatggaaggagtaccagaggctaacactgatgaagaacatgttctgtcagcctttttgctggatgcaaatcacctaaacgtagtcattaattctgaagaagtggtttgtgagggtgaagatagtaaggagcttctccattcggaagactgtaaagcttcatccgagaaaacagatgtgaatgatggcaatgtatatggtattagtgatgctgtagtgagatgtgcactgcatgctccagccgatgataattatgagatttttttgggtcccaatactgatgtaccacgtcaggtttataatgacggatgcagtgatgtcaaagaagatcgatttgcttccaaaccctggacaattgatattattgaggatgcctctgtcaaagaaagatcaaatttaaaagattggcaacttgattccaagttggagggcacagaaatagtggaatctggcctttacttcaataaggatattggtaacattttacatagtggatctattggtgaaataactccatctggttctggtttatcaaaagattcatctgtggactatagaggggaggttttagatggcttctcaatggaagcatctcttgaaaggtcttctacacgtggggaacaaaatggttgtagactagatgctattgagaatccttcaattactttagcaacttctggttataagcatgaaggtgctttatctgaggaagcagtgtacacaaagaagaattacgctggaacatgcttgtcaaatcccagggaattaatcatggagctgcaatcccatttctcaaaggaaaacataaatgaatctgatcctcatgacagccttgtattcccaactgctgaaaattcagcagatgaacagctggttaaagtacaccatggttctaatctgtctcagttaggattaactgatctgttggatggaccaattgggtgttccaataccgacgtgttgtgccagtgtgacaatcataaaaatcaatccaatgaggacaaggtagaggaagttgaggcggtgtctgctgctaaatacatagaaagtgaagttgtgctgctcccatctcaagagagatcaaatttgaataatgagcagcttaacaccaagttggaaagcccaaacattatgggatcttgccttaactgtgataacgatgtttgtaatacttcggacaatggatctgtttttgtcattggtaaaagaactccatctgcttctggcttaccagaagattatcctaaggatagtgacttgcaacaaccggttttagatagcttctcagtggtttcatcttttcaagacaatatatctgggaagaaaactgtttctggtgtagcaggcagtgagattctttctttaagtttagcaactcctgattataaacatgaagatggtttctctgaggaagcagtatgcagaacaaagaattatactggaacttcctcggtagatccgaggcatttagacatggaggggcactctatttactctgagggaggtactgaaaaatctaatctgcaagataatcttgcatttctaagcgctgagagtggaaaagatgaacctattatttgccatgttgagaaactggttgacgcacatgcttcttcagatacataccaaggtccttgtcaagatctaggcagacatgaagaacaagagagctgcatgtctattcctatgcaagccaaagaaagtggaggggttttgaggtctagccacacgaaagggtcagttacagcagcccaaattgatttggcaggtgatgcccatcttattgtgagtccttttgatcatgtaatccgacaatcattataccacagtgataatgctgctgccaagcaagtgtttagtgaggagaaagaggaaacaaaatctatctcttcttcagatattgatatccttcatgaaaaatcatactccagtggacacgatgaccatgctgcttgtgctgccgaaactcagttctaccatccacagaaagcatctatatctgatggactacatttgggtcctagttctttgcaagtagaatcactggatgctttggatagcgatatactgtatgttaacacaggagttctcgagcagcatcataaagagggttactatgaacccagtgtctaccaaatcacttcaggcatttgcacaatgtctgaagctgaaccattcgaagttttagaaactggaaaagatgtaaaaacgccatctaagctagatgagcaacttaatcctgggttggacggagatgaagctgagaaacacagcttagactgtggtacagacaccagtcctgtgatgagcaagagaaccctttcttcaccaggatcaggaccatgccagcagtatgtaaatgaaagcaccaccagtacacagtcgactgataatcacccaaacgacctacccgctccgagatctcctgaacaatccgcgtgttttcagaatgacaacgattcgggttcagcatttgtcaaagcagcaggcgaagaggtatagatgaactttgcggtaagctgcagagtttcaaagtttccagcgccgtaaaaggaagctacgtagctatgggtgcacctcgtccgaagcctggggacagcacgagccgatctgcagccgcgctgctcaggaacatagagaacacaactgctgttaaagctggccgtcctcctgtcaagccaaacgccgatggtaaggactcgtctaggcgagccctgcagcccataagcggaaggcctgacagtaggtagttcggcggttccttaataagtgtgtcgtgtttgtgttcaaccctttgttgaaagccaggtccgtgtatttgtgcagcttgttgtcatgaagctgctgtgtgcgtgtcatttaacataagcgtgcgtgaagttgtgttatggaagtggctaaatatgtgttcgttaggaggtcaattggcttgaactgaccctgctgttccgtgatttctgtctaaatatacttgtgtggctgtgtcactttgattggccttatcgatcacatgcaatgggat

SEQ ID NO: 30644 - DNA, 4798 bp, Zea Mays
gaaaacttgtgctgtttgcactgtgtttaatttaccaattttaaacatactgagttctaagtcaagttgttggctacttgtaattctaattatttttaataggctttatgtttgttctatctggaacagctaggcatatgtttcattgtcatttgttgtcttttaagtatcttacatttttttgaatgtattctttccctttctcagaagttttagctcaggagaattgtaatgaccagcctgttcctgcccagactgaccaagaaattaagttaaacgatgaacttgctgatccggatgttttagctcaggagaattgtaatgaccagcccgttcctgcccagactgacctagaaattaagttacacgatgaacttgctgatccggaccatgaagagcaaagccctgtatccggagaacggagagttagcttggaagcaaatgccaacgagcctgaggaaaagaacctagctaacgtcatatcaattgatctccacaccaaaagtctgcagcatgataatggcagaatagctgaagagactgataaagatgttttgtcttttgttttccctattgaagagcatgaagaaaaatatgcagttagccctatagccgttgaaaagagcttccgtcaggaagcaagtgcaattgaatctgcaggaaaacccctaactgtcatcttttctaacgatctccacaccaaacatctgcaacatgattgtgatgtgctaattaaggagactggtgaagaagttttagctcaggagaattgtaatgaccagcctgttcctgcccagaccgacctagaaattaagttaaatgatgaacttgctgatccggatgttttagctcaggagaattgtaatgaccagcctgttcctgccaacgagcctgaggaaaagaacctagctaacgtcatatcaactgatctccacaccaaaactctgcagcatgataatgacagaatagctgaagagactgataaagatgtttcgtctttggttttccctattgaagagcatgaagaaaaatatgcagtgagccctatagctgttgaaaagagcgtcagtcgggaagccagtgcatgtgaatctgcaggaaaacccctaactgtcatcttttctaacgatctccacaccaaacatctgcaacatgattgtgatgtgctaattaaggagactggtgaagatgttttagctcaggagaattgtaatgaccagcctgttccggcccagactgacctagaaatgaagttaaacgatgaacttgctgatccggaagttttagctcaggagaattgtaatgaccagcctgttcttgctcagactgacctagaaactaagttaaacgatgaacttgctgatctggctatggaatcaggttgtagcattactgaaaggaatgaagggcttgttgctcataatcttgatcaagaaggtttccttgaagcaacaccagagtgcaaacaggaatgtggtttgcctgaggagacagtaatttcctcaaaagaaacaggatctctgctgtgtgcagatcaatcaccaattggtctggaatctttattttcgcaagaaagcatagttgaatcagtggggcattgtgcacttgcttcagcaacaactcataccgaaaatggctttgatgattcaaaagattgccataacaagtctgcacttgaaaatgttcatgtgccagaaccttgttcacacaatgatactaaaggaggcatttttaaaaatgttgattgtatgcatacatcccagcgagatgatagaatggaaggagtaccagaggctaacactgatgaagaacatgttctgtcagcctttttgctggatgcaaatcacctaaacgtagtcattaattctgaagaagtggtttgtgagggtgaagatagtaaggagcttctccattcggaagactgtaaagcttcatccgagaaaacagatgtgaatgatggcaatgtatatggtattagtgatgctgtagtgagatgtgcactgcatgctccagccgatgataattatgagatttttttgggtcccaatactgatgtaccacgtcaggtttataatgacggatgcagtgatgtcaaagaagatcgatttgcttccaaaccctggacaattgatattattgaggatgcctctgtcaaagaaagatcaaatttaaaagattggcaacttgattccaagttggagggcacagaaatagtggaatctggcctttacttcaataaggatattggtaacattttacatagtggatctattggtgaaataactccatctggttctggtttatcaaaagattcatctgtggactatagaggggaggttttagatggcttctcaatggaagcatctcttgaaaggtcttctacacgtggggaacaaaatggttgtagactagatgctattgagaatccttcaattactttagcaacttctggttataagcatgaaggtgctttatctgaggaagcagtgtacacaaagaagaattacgctggaacatgcttgtcaaatcccagggaattaatcatggagctgcaatcccatttctcaaaggaaaacataaatgaatctgatcctcatgacagccttgtattcccaactgctgaaaattcagcagatgaacagctggttaaagtacaccatggttctaatctgtctcagttaggattaactgatctgttggatggaccaattgggtgttccaataccgacgtgttgtgccagtgtgacaatcataaaaatcaatccaatgaggacaaggtagaggaagttgaggcggtgtctgctgctaaatacatagaaagtgaagttgtgctgctcccatctcaagagagatcaaatttgaataatgagcagcttaacaccaagttggaaagcccaaacattatgggatcttgccttaactgtgataacgatgtttgtaatacttcggacaatggatctgtttttgtcattggtaaaagaactccatctgcttctggcttaccagaagattatcctaaggatagtgacttgcaacaaccggttttagatagcttctcagtggtttcatcttttcaagacaatatatctgggaagaaaactgtttctggtgtagcaggcagtgagattctttctttaagtttagcaactcctgattataaacatgaagatggtttctctgaggaagcagtatgcagaacaaagaattatactggaacttcctcggtagatccgaggcatttagacatggaggggcactctatttactctgagggaggtactgaaaaatctaatctgcaagataatcttgcatttctaagcgctgagagtggaaaagatgaacctattatttgccatgttgagaaactggttgacgcacatgcttcttcagatacataccaaggtccttgtcaagatctaggcagacatgaagaacaagagagctgcatgtctattcctatgcaagccaaagaaagtggaggggttttgaggtctagccacacgaaagggtcagttacagcagcccaaattgatttggcaggtgatgcccatcttattgtgagtccttttgatcatgtaatccgacaatcattataccacagtgataatgctgctgccaagcaagtgtttagtgaggagaaagaggaaacaaaatctatctcttcttcagatattgatatccttcatgaaaaatcatactccagtggacacgatgaccatgctgcttgtgctgccgaaactcagttctaccatccacagaaagcatctatatctgatggactacatttgggtcctagttctttgcaagtagaatcactggatgctttggatagcgatatactgtatgttaacacaggagttctcgagcagcatcataaagagggttactatgaacccagtgtctaccaaatcacttcaggcatttgcacaatgtctgaagctgaaccattcgaagttttagaaactggaaaagatgtaaaaacgccatctaagctagatgagcaacttaatcctgggttggacggagatgaagctgagaaacacagcttagactgtggtacagacaccagtcctgtgatgagcaagagaaccctttcttcaccaggatcaggaccatgccagcagtatgtaaatgaaagcaccaccagtacacagtcgactgataatcacccaaacgacctacccgctccgagatctcctgaacaatccgcgtgttttcagaatgacaacgattcgggttcagtaggcatttgtcaaagcagcaggcgaagaggtatagatgaactttgcggtaagctgcagagtttcaaagtttccagcgccgtaaaaggaagctacgtagctatgggtgcacctcgtccgaagcctggggacagcacgagccgatctgcagccgcgctgctcaggaacatagagaacacaactgctgttaaagctggccgtcctcctgtcaagccaaacgccgatggtaaggactcgtctaggcgagccctgcagcccataagcggaaggcctgacagtaggtagttcggcggttccttaataagtgtgtcgtgtttgtgttcaaccctttgttgaaagccaggtccgtgtatttgtgcagcttgttgtcatgaagctgctgtgtgcgtgtcatttaacataagcgtgcgtgaagttgtgttatggaagtggctaaatatgtgttcgttaggaggtcaattggcttgaactgaccctgctgttccgtgatttctgtctaaatatacttgtgtggctgtgtcactttgattggccttatcgatcacatgcaatgggat

SEQ ID NO: 30645 - DNA, 4036 bp, Zea Mays
attaatcctgcccagactgacctagaaattaagttaaacgatgaacttgctgatccggaccatgaagagcaaagcaatgtgttcggagaacggagagttagcttggaagcaaatgccaacgagcctgaggaaaagaacctagctaacgtcatatcaactgatctccacaccaaaactctgcagcatgataatgacagaatagctgaagagactgataaagaccatgaagagcaaagcaatgtgtccggagaacggagagttagcttggaagcaaatgccaacgagcctgaggaaaagaacctagctaacgtcatatcaactgatctccacaccaaaactctgcagcatgataatgacagaatagctgaagagactgataaagatgtttcgtctttggttttccctattgaagagcatgaagaaaaatatgcagtgagccctatagctgttgaaaagagcgtcagtcgggaagccagtgcatgtgaatctgcaggaaaacccctaactgtcatcttttctaacgatctccacaccaaacatctgcaacatgattgtgatgtgctaattaaggagactggtgaagatgttttagctcaggagaattgtaatgaccagcctgttccggcccagactgacctagaaatgaagttaaacgatgaacttgctgatccggaagttttagctcaggagaattgtaatgaccagcctgttcttgctcagactgacctagaaactaagttaaacgatgaacttgctgatctggctatggaatcaggttgtagcattactgaaaggaatgaagggcttgttgctcataatcttgatcaagaaggtttccttgaagcaacaccagagtgcaaacaggaatgtggtttgcctgaggagacagtaatttcctcaaaagaaacaggatctctgctgtgtgcagatcaatcaccaattggtctggaatctttattttcgcaagaaagcatagttgaatcagtggggcattgtgcacttgcttcagcaacaactcataccgaaaatggctttgatgattcaaaagattgccataacaagtctgcacttgaaaatgttcatgtgccagaaccttgttcacacaatgatactaaaggaggcatttttaaaaatgttgattgtatgcatacatcccagcgagatgatagaatggaaggagtaccagaggctaacactgatgaagaacatgttctgtcagcctttttgctggatgcaaatcacctaaacgtagtcattaattctgaagaagtggtttgtgagggtgaagatagtaaggagcttctccattcggaagactgtaaagcttcatccgagaaaacagatgtgaatgatggcaatgtatatggtattagtgatgctgtagtgagatgtgcactgcatgctccagccgatgataattatgagatttttttgggtcccaatactgatgtaccacgtcaggtttataatgacggatgcagtgatgtcaaagaagatcgatttgcttccaaaccctggacaattgatattattgaggatgcctctgtcaaagaaagatcaaatttaaaagattggcaacttgattccaagttggagggcacagaaatagtggaatctggcctttacttcaataaggatattggtaacattttacatagtggatctattggtgaaataactccatctggttctggtttatcaaaagattcatctgtggactatagaggggaggttttagatggcttctcaatggaagcatctcttgaaaggtcttctacacgtggggaacaaaatggttgtagactagatgctattgagaatccttcaattactttagcaacttctggttataagcatgaaggtgctttatctgaggaagcagtgtacacaaagaagaattacgctggaacatgcttgtcaaatcccagggaattaatcatggagctgcaatcccatttctcaaaggaaaacataaatgaatctgatcctcatgacagccttgtattcccaactgctgaaaattcagcagatgaacagctggttaaagtacaccatggttctaatctgtctcagttaggattaactgatctgttggatggaccaattgggtgttccaataccgacgtgttgtgccagtgtgacaatcataaaaatcaatccaatgaggacaaggtagaggaagttgaggcggtgtctgctgctaaatacatagaaagtgaagttgtgctgctcccatctcaagagagatcaaatttgaataatgagcagcttaacaccaagttggaaagcccaaacattatgggatcttgccttaactgtgataacgatgtttgtaatacttcggacaatggatctgtttttgtcattggtaaaagaactccatctgcttctggcttaccagaagattatcctaaggatagtgacttgcaacaaccggttttagatagcttctcagtggtttcatcttttcaagacaatatatctgggaagaaaactgtttctggtgtagcaggcagtgagattctttctttaagtttagcaactcctgattataaacatgaagatggtttctctgaggaagcagtatgcagaacaaagaattatactggaacttcctcggtagatccgaggcatttagacatggaggggcactctatttactctgagggagatacataccaaggtccttgtcaagatctaggcagacatgaagaacaagagagctgcatgtctattcctatgcaagccaaagaaagtggaggggttttgaggtctagccacacgaaagggtcagttacagcagcccaaattgatttggcaggtgatgcccatcttattgtgagtgataatgctgctgccaagcaagtgtttagtgaggagaaagaggaaacaaaatctatctcttcttcagatattgatatccttcatgaaaaatcatactccagtggacacgatgaccatgctgcttgtgctgccgaaactcagttctaccatccacagaaagcatctatatctgatggactacatttgggtcctagttctttgcaagtagaatcactggatgctttggatagcgatatactgtatgttaacacaggagttctcgagcagcatcataaagagggttactatgaacccagtgtctaccaaatcacttcaggcatttgcacaatgtctgaagctgaaccattcgaagttttagaaactggaaaagatgtaaaaacgccatctaagctagatgagcaacttaatcctgggttggacggagatgaagctgagaaacacagcttagactgtggtacagacaccagtcctgtgatgagcaagagaaccctttcttcaccaggatcaggaccatgccagcagtatgtaaatgaaagcaccaccagtacacagtcgactgataatcacccaaacgacctacccgctccgagatctcctgaacaatccgcgtgttttcagaatgacaacgattcgggttcagcatttgtcaaagcagcaggcgaagaggtatagatgaactttgcggtaagctgcagagtttcaaagtttccagcgccgtaaaaggaagctacgtagctatgggtgcacctcgtccgaagcctggggacagcacgagccgatctgcagccgcgctgctcaggaacatagagaacacaactgctgttaaagctggccgtcctcctgtcaagccaaacgccgatggtaaggactcgtctaggcgagccctgcagcccataagcggaaggcctgacagtaggtagttcggcggttccttaataagtgtgtcgtgtttgtgttcaaccctttgttgaaagccaggtccgtgtatttgtgcagcttgttgtcatgaagctgctgtgtgcgtgtcatttaacataagcgtgcgtgaagttgtgttatggaagtggctaaatatgtgttcgttaggaggtcaattggcttgaactgaccctgctgttccgtgatttctgtctaaatatacttgtgtggctgtgtcactttgattggccttatcgatcacatgcaatgggat

SEQ ID NO: 30646 - DNA, 4105 bp, Zea Mays
ctgatccggaccatgaagagcaaagcaatgtgttcggagaacggagagttagcttggaagcaaatgccaacgagcctgaggaaaagaacctagctaacgtcatatcaactgatctccacaccaaaactctgcagcatgataatgacagaatagctgaagagactgataaagaccatgaagagcaaagcaatgtgtccggagaacggagagttagcttggaagcaaatgccaacgagcctgaggaaaagaacctagctaacgtcatatcaactgatctccacaccaaaactctgcagcatgataatgacagaatagctgaagagactgataaagatgtttcgtctttggttttccctattgaagagcatgaagaaaaatatgcagtgagccctatagctgttgaaaagagcgtcagtcgggaagccagtgcatgtgaatctgcaggaaaacccctaactgtcatcttttctaacgatctccacaccaaacatctgcaacatgattgtgatgtgctaattaaggagactggtgaagatgttttagctcaggagaattgtaatgaccagcctgttccggcccagactgacctagaaatgaagttaaacgatgaacttgctgatccggaagttttagctcaggagaattgtaatgaccagcctgttcttgctcagactgacctagaaactaagttaaacgatgaacttgctgatctggctatggaatcaggttgtagcattactgaaaggaatgaagggcttgttgctcataatcttgatcaagaaggtttccttgaagcaacaccagagtgcaaacaggaatgtggtttgcctgaggagacagtaatttcctcaaaagaaacaggatctctgctgtgtgcagatcaatcaccaattggtctggaatctttattttcgcaagaaagcatagttgaatcagtggggcattgtgcacttgcttcagcaacaactcataccgaaaatggctttgatgattcaaaagattgccataacaagtctgcacttgaaaatgttcatgtgccagaaccttgttcacacaatgatactaaaggaggcatttttaaaaatgttgattgtatgcatacatcccagcgagatgatagaatggaaggagtaccagaggctaacactgatgaagaacatgttctgtcagcctttttgctggatgcaaatcacctaaacgtagtcattaattctgaagaagtggtttgtgagggtgaagatagtaaggagcttctccattcggaagactgtaaagcttcatccgagaaaacagatgtgaatgatggcaatgtatatggtattagtgatgctgtagtgagatgtgcactgcatgctccagccgatgataattatgagatttttttgggtcccaatactgatgtaccacgtcaggtttataatgacggatgcagtgatgtcaaagaagatcgatttgcttccaaaccctggacaattgatattattgaggatgcctctgtcaaagaaagatcaaatttaaaagattggcaacttgattccaagttggagggcacagaaatagtggaatctggcctttacttcaataaggatattggtaacattttacatagtggatctattggtgaaataactccatctggttctggtttatcaaaagattcatctgtggactatagaggggaggttttagatggcttctcaatggaagcatctcttgaaaggtcttctacacgtggggaacaaaatggttgtagactagatgctattgagaatccttcaattactttagcaacttctggttataagcatgaaggtgctttatctgaggaagcagtgtacacaaagaagaattacgctggaacatgcttgtcaaatcccagggaattaatcatggagctgcaatcccatttctcaaaggaaaacataaatgaatctgatcctcatgacagccttgtattcccaactgctgaaaattcagcagatgaacagctggttaaagtacaccatggttctaatctgtctcagttaggattaactgatctgttggatggaccaattgggtgttccaataccgacgtgttgtgccagtgtgacaatcataaaaatcaatccaatgaggacaaggtagaggaagttgaggcggtgtctgctgctaaatacatagaaagtgaagttgtgctgctcccatctcaagagagatcaaatttgaataatgagcagcttaacaccaagttggaaagcccaaacattatgggatcttgccttaactgtgataacgatgtttgtaatacttcggacaatggatctgtttttgtcattggtaaaagaactccatctgcttctggcttaccagaagattatcctaaggatagtgacttgcaacaaccggttttagatagcttctcagtggtttcatcttttcaagacaatatatctgggaagaaaactgtttctggtgtagcaggcagtgagattctttctttaagtttagcaactcctgattataaacatgaagatggtttctctgaggaagcagtatgcagaacaaagaattatactggaacttcctcggtagatccgaggcatttagacatggaggggcactctatttactctgagggaggtactgaaaaatctaatctgcaagataatcttgcatttctaagcgctgagagtggaaaagatgaacctattatttgccatgttgagaaactggttgacgcacatgcttcttcagatacataccaaggtccttgtcaagatctaggcagacatgaagaacaagagagctgcatgtctattcctatgcaagccaaagaaagtggaggggttttgaggtctagccacacgaaagggtcagttacagcagcccaaattgatttggcaggtgatgcccatcttattgtgagtgataatgctgctgccaagcaagtgtttagtgaggagaaagaggaaacaaaatctatctcttcttcagatattgatatccttcatgaaaaatcatactccagtggacacgatgaccatgctgcttgtgctgccgaaactcagttctaccatccacagaaagcatctatatctgatggactacatttgggtcctagttctttgcaagtagaatcactggatgctttggatagcgatatactgtatgttaacacaggagttctcgagcagcatcataaagagggttactatgaacccagtgtctaccaaatcacttcaggcatttgcacaatgtctgaagctgaaccattcgaagttttagaaactggaaaagatgtaaaaacgccatctaagctagatgagcaacttaatcctgggttggacggagatgaagctgagaaacacagcttagactgtggtacagacaccagtcctgtgatgagcaagagaaccctttcttcaccaggatcaggaccatgccagcagtatgtaaatgaaagcaccaccagtacacagtcgactgataatcacccaaacgacctacccgctccgagatctcctgaacaatccgcgtgttttcagaatgacaacgattcgggttcagtaggcatttgtcaaagcagcaggcgaagaggtatagatgaactttgcggtaagctgcagagtttcaaagtttccagcgccgtaaaaggaagctacgtagctatgggtgcacctcgtccgaagcctggggacagcacgagccgatctgcagccgcgctgctcaggaacatagagaacacaactgctgttaaagctggccgtcctcctgtcaagccaaacgccgatggtaaggactcgtctaggcgagccctgcagcccataagcggaaggcctgacagtaggtagttcggcggttccttaataagtgtgtcgtgtttgtgttcaaccctttgttgaaagccaggtccgtgtatttgtgcagcttgttgtcatgaagctgctgtgtgcgtgtcatttaacataagcgtgcgtgaagttgtgttatggaagtggctaaatatgtgttcgttaggaggtcaattggcttgaactgaccctgctgttccgtgatttctgtctaaatatacttgtgtggctgtgtcactttgattggccttatcgatcacatgcaatgggat

SEQ ID NO: 30647 - DNA, 466 bp, Zea Mays
gttacgccgaccggtgggcccgaccgtgcaggatcgtcaactacctcccggatggagtgtggcatgggcggacctgctcgagctccgtaaaacggccgctgaccgaacccaaccggagtataaaaccctatcagacctcgcctccttctcaaccctcctgcgccgccacaaaggaacctcgatgtagcaagaggaaggggagtacaacgagagggagagagaggtttccgccgccgccggatagatccataccacggtggtggcagggccgtagtaaagcgcctggggtgaccgcgagcggctactgaagctatccgtggcatctcctggcgatgtaatccaacaacgcgccaccaatttctcgacgcctttccaccgccgccgcgagtgcctgtgccgccgtgggtagggttctgcgcgtcgccaactctgacgagcaagtgaccgagaacccagatgttcagca

SEQ ID NO: 30648 - DNA, 2813 bp, Zea Mays
cagcacaaaaccctcccccctctccagaaaaaagaacagaacttcaatgtctatgaggatacaaagtacatgatgatgacagaggaagataaaagaggcaaagaaattgaaaagggtggatacatggatctgatgatggaacagatacgtaactcgcaaggagaatcagtgagtgaagtaggcaatgaaatgcaaagtggcctatgcacacaaaatgaaaccatgaacaaaaacctactagtggccccatgtgagacatacacacagatgattcttgaggaggactcaacgcttgcaaatgcagacatatccaagcggcaacaggatgtgttaacaggatatgtttcaaaccagggtggatacatggatctgatgatggaacagatatataactcgcaaggagaatcagtgagtgaagtaggcaatgaaatgcaaagtggcctatgcacacaaaatgaaaccatgaacaacaacctactagaagcaccatgtgaggcatacacacagatgattcttgaggaggactccccgcttgcaaatgcagacatatccaaggagacatttggggaatgcaatgaagctgatacatctaaatatggggaaacaatataccacagggatctctttgagataatgcatgtacaacaactaactgaatgtgcgcaaaatgatgatggaaaagaaactaaaacatcgagtgctagtgcaaactttgatgatgcagaagctgaaacaacaaatgcaggagatgaagagttaacagaggatcagattgatgccttcattatgagtgagcagatagctacaacagaagggaacaatgcatcaatagacagcaaatacacacctcaagttgggatggaatttaagaccaggggagatgcagagcacttcttattcttctatggttttttggctggttttaaaccagcaatcacccacactttcaggacttccaacaaaaaaagaagcaatgaagtaacaaaggtggagctgaaatgtaacaaacatggcaaaacaaaaaagacaaaccagcaggaacaagatatttgcatagaaaaaaagcgctgcgagaaagggccaaaaaggaatacaaatgtccaagttaaaacagattgcagagtattcatggttataaaggaacatggacaaaaatgggtgatcgataagttagacttggaacacaatcatgagctcagaccagcagacaacaacaacatgtttagtgggcataagtacatgacagatatggaaaaaggaattataagaacattgaactacaacaacatacctacacggaagatgattgctatattgtcttatctgagaggaggaatgccagaggactttaaggacatagttaactattcactaactgtttctgaatttgagagagactggaagcaaatggttgaggactaccacctagaaaacaacaagtatttcagcaaaatgtgggaaacaagagccaggttcataccagtatatttcaaaaatgacttcttcccattcttgcaaagcacaggtagaagcgaggggacaaactcaaggtttaaagacaatgtgacttcgacttatagtgtgattagctttttgcgtgagtaccaaaggattgtggagcaagtgaatgtgtcagaggagtatgaggataatgaaagcaatcgtaaacgtccaaaggaactaatgtttggatacacaatagagaggcaagcacaagaagtctacaatagaaacatattcaagaaattccagttccagttgcaatcaacaccaaggctaagttacaacagaacatctaatctgcatacttttgaggtgtatccaaaatcaaaccaagaagaaaagccacataaaataaggaggtaccttgttatggctaacctaacatatggaatggaagagttcacttgtgtatgtggcaagtttgacaaggatggcattttatgctcccatatacttaaagtgatcattgaagaagggctcacgaaaatcccagagcaatacatactgaacaggtggaagaaaaaacataaacaaatagatggaccactgctgcgtgcatcaatgccgacccacccagtgctaagacacaacctattgagccggaaagcagcattactcacatcagcaacagcaaaaacagagaaaactatggagtttatatgtgaagaattagacaaactacaagaaaaggtttgccaaatgctatcatcagaagaagatgtaatagcaggaccttcgacaggaagagagaaggaagacaatgctgcaaaacatacatgaccagtagttgaaaatctgcataaccctgaagcagttaaacagaaaggaaggccaaaaaaacctacaaggttaaagccactagtggaggaaatccgcatcaagatgaagaaggcagagcaaaagaaaaacaagaaaacaagcaatgcagcagcaagcccacaaggaaaggagaagaagaagatgaaaagacaaacaccttgaagaattactgctcccccctcccaacagaaccaccaacactcacactgaaaaagatgcagaaaaaatggagagaaaaatgaagaacacttagtggagaaaggggaagggatggactgtgcatttatgatatattcatatagttggtgcaaacaacaaaaaaagtttatttttctttcagttgagtcatgtaatcgcttgcaaaaacaaattgttgaaaaacagatcatgcttgcctgattagatccatcgcatcagcccatccatgtaccgcataactagcttatctggtattgggtcgtgctccattggctaggcccaccagcaatgat

SEQ ID NO: 30649 - DNA, 2015 bp, Zea Mays
aaaaagaacagaacttcaatgtctatgaggatacaaagtacatgatgatgacagaggaagataaaagaggcaaagaaattgaaaagggtggatacatggatctgatgatggaacagatatataactcgcaaggagaatcagtgagtgaagtaggcaatgaaatgcaaagtggcctatgcacacaaaatgaaaccatgaacaacaacctactagaagcaccatgtgaggcatacacacagatgattcttgaggaggactccccgcttgcaaatgcagacatatccaaggagacatttggggaatgcaatgaagctgatacatctaaatatggggaaacaatataccacagggatctctttgagataatgcatgtacaacaactaactgaatgtgcgcaaaatgatgatggaaaagaaactaaaacatcgagtgctagtgcaaactttgatgatgcagaagctgaaacaacaaatgcaggagatgaagagttaacagaggatcagattgatgccttcattatgagtgagcagatagctacaacagaagggaacaatgcatcaatagacagcaaatacacacctcaagttgggatggaatttaagaccaggggagatgcagagcacttcttattcttctatggttttttggctggttttaaaccagcaatcacccacactttcaggacttccaacaaaaaaagaagcaatgaagtaacaaaggtggagctgaaatgtaacaaacatggcaaaacaaaaaagacaaaccagcaggaacaagatatttgcatagaaaaaaagcgctgcgagaaagggccaaaaaggaatacaaatgtccaagttaaaacagattgcagagtattcatggttataaaggaacatggacaaaaatgggtgatcgataagttagacttggaacacaatcatgagctcagaccagcagacaacaacaacatgtttagtgggcataagtacatgacagatatggaaaaaggaattataagaacattgaactacaacaacatacctacacggaagatgattgctatattgtcttatctgagaggaggaatgccagaggactttaaggacatagttaactattcactaactgtttctgaatttgagagagactggaagcaaatggttgaggactaccacctagaaaacaacaagtatttcagcaaaatgtgggaaacaagagccaggttcataccagtatatttcaaaaatgacttcttcccattcttgcaaagcacaggtagaagcgaggggacaaactcaaggtttaaagacaatgtgacttcgacttatagtgtgattagctttttgcgtgagtaccaaaggattgtggagcaagtgaatgtgtcagaggagtatgaggataatgaaagcaatcgtaaacgtccaaaggaactaatgtttggatacacaatagagaggcaagcacaagaagtctacaatagaaacatattcaagaaattccagttccagttgcaatcaacaccaaggctaagttacaacagaacatctaatctgcatacttttgaggtgtatccaaaatcaaaccaagaagaaaagccacataaaataaggaggtaccttgttatggctaacctaacatatggaatggaagagttcacttgtgtatgtggcaagtttgacaaggatggcattttatgctcccatatacttaaagtgatcattgaagaagggctcacgaaaatcccagagcaatacatactgaacaggtggaagaaaaaacataaacaaatagatggaccactgctgcgtgcatcaatgccgacccacccagtgctaagacacaacctattgagccggaaagcagcattactcacatcagcaacagcaaaaacagagaaaactatggagtttatatgtgaagaattagacaaactacaagaaaaggtttgccaaatgctatcatcagaagaagatgtaatagcaggaccttcgacaggaagagagaaggaagacaatgctgcaaaacatacatga

SEQ ID NO: 30650 - DNA, 3357 bp, Zea Mays
gcccacccagtcatagccaactacacgacacaacctgccttccttggttcctccaccccgtcctcccctgtcccgtcgcgtcagccactcgccgcggccaactaccgccgccgctgttgcagccgcccatctgcttccatcgcgtcgcggaggccgctcgcttcgccgccgcacgctccgctcttccggtgccctcctccgggaccctcggccacgccgcgtcgccttaaaccctagatctgcgctccccgcccccgcgctggccgcggccgcgtactgacgccggcacgctgccgatctccatacgtcgctcgatcccagctgcttcgaatttagataagtttcttccatgcatcgtgttggaagtgctggtaacacggctggctcgactcgaccgagaaaggagaagcgcttcacatatgtgctcaatgatgctgatgataaaaagcattgtgcaggaatcaattgcatggcttatctaaatggttctacatttagtacaagtgattacctttttagcgggagtcgtgatggtaccttgaaaagatgggaattaaataatggggatgcaagtttctcagcaacttttgagtctcatgttgattgggttaatgatgccattatagttggagaaaagcttgtttcctgttcctcagacaccacaataaaggtctggaattgcttctccgatggtgcttgtaccaggactttccgccagcattctgattatgtgatttgtcttgctgctgctgagaagaatagcaatattgtagcctctggtggtcttggtggtgaggtttttgtttgggaccttgatgctgctcttgctcctgtagccaaatctgtggacgcaaaagaagacgaggttcctaatggaaactcagggcctcctttgacaacattgtgcagtgtaaattctagtagcaatattgcttcctctaatagtcaatcacatgggtacagtccaattgctgccaaaggtcacaaagattcagtttacgcattggctatgaatgatacaggaactcttcttctctctggtggcactgaaaaggttgtccgggtgtgggatccgaggacaggttcaaaaaacatgaaattgagggggcacactgacaatatcagggccttacttgttgattctacagggaggtattgcctatcaggatcatctgattcgatgataagactatgggatctaggacaacagcgttgtgttcattcttatgctgtgcatactgattcagtttgggcgcttgcaaccactcattcgtttggtcatgtctacagtggtggaagagaccaatctgtatacctaacagacttatccacaagagagagtgttttactttgcacaaatgaatgccctattctacagttgtctctgcaagatgacacaatatgggtggcaacaactgattcttctgtatatggatggccagctgaagggctcacaccccaaaaggttttccaaaagggtggctcattcttagctgggaatttgtcattctcaagggcaagagcttctttagaaggatcagcacctgtccctgtatacaaagagccatcttttgtcgtcccaggggttccagcaatagttcaacatgaaataatgaataatagaaggcatgtactgacaaaggataccactggttcagtcaaattgtgggagatcacccggggtgctgttattgaagactttggcaaggtttcatttgaggataagaaaaaggagttgtttgagatggtaagcatacctgcttggttcaccatggatgctcgattaggatgcttgtctgtccacctggatactccacaatgcttttctgcagaaatatatgcagttgatctaaatgtttctggagcacaagaagatctcaagattaatttggctcatgataccctttgtggcttgctagttcattggagtaaaagaaagcagaaatctagttcgcatggcttgcctaatggtgatagttcaatagggaaagatgttccgtcaaaagactcgcaccgatcaagaactgaggtggatgacacaactgaaaaccacacaactcatgtgctcccatcatttgagttttctacagtttcacctccatcaattatcacagaaggttctagtggagggccttggagaaagagaattactgatttggatggaaccgaaggtgatctaccttggtggtgtgtggactgtgttactcacaatcgatatccaaaggaaaatacaaagtgtggcttttatttacatcctgctgaaggttcgcctgcgccaaacataactcaagggaagcttagtgctccacggatattacgaattcacaaggttgctaactatgtggttgagaaactcgttcttgacaaaccattggatggaggctctgatagtacgtttgttatgggattgagttctgctcaatcacagctctcacagctagatagttcttcgcggcttggactaaagccatggcaaaaaacaaagccatgtattgaggtattgtgcaataaccaggttctatcaccagatatgagtttggctacagtgcgaacatatatatggaagaagccggaagatttgattcttcattatagagtggtccaatcgagatgatcacggcttcagatgtacatgctcacatggttctccagatatgtcccagcatgtccgcacctttagatggtgtggttgaagatgcctttggcttagagaggaagcatcatcttcacagaggaaatattttgctcttgctccgccctccccccggtagctgttcccagaatcgacttgttcgcttctctgtaaagttcctgaccttgccctggtagtaagatgtatcatagcacaggtataaggctctctgctggctgccgagcttgtaaatgtagaagattaggtgcttaataaaagatcgaaaggatatgttttttctttcgtttttctttgacagcatttgtaagaaaaaaaaagaggctgacgctcggcccagatcgtggcgctccgacgtcgattattggatttaaccccgccgatccccttggaggtgtttggttgagaccagggtaagaggtggacgggaacccgggaacaataaagctgtttttgggacatgttgatgtcgggagctactttacctctcatccttcaacaattgttctatatactctatagggctattttagttttttttgttttttgctagcgagaaatcagaaataaatgattgctttgttttgataatcaaagctgttggatcatggtctcatggatgtgtcccctccccactgataatctgatatacattttgatctggacggtgtgtgattcggtggcagctaggacagcgtgtcgcattg

SEQ ID NO: 30651 - DNA, 5311 bp, Zea Mays
gccaactacacgacacaacctgccttccttggttcctccaccccgtcctcccctgtcccgtcgcgtcagccactcgccgcggccaactaccgccgccgctgttgcagccgcccatctgcttccatcgcgtcgcggaggccgctcgcttcgccgccgcacgctccgctcttccggtgccctcctccgggaccctcggccacgccgcgtcgccttaaaccctagatctgcgctccccgcccccgcgctggccgcggccgcgtactgacgccggcacgctgccgatctccatacgtcgctcgatcccaggtttagctgcttcgaatttagataagtttcttccatgcatcgtgttggaagtgctggtaacacggctggctcgactcgaccgagaaaggagaagcgcttcacatatgtgctcaatgatgctgatgataaaaagcattgtgcaggaatcaattgcatggcttatctaaatggttctacatttagtacaagtgattacctttttagcgggagtcgtgatggtaccttgaaaagatgggaattaaataatggggatgcaagtttctcagcaacttttgagtctcatgttgattgggttaatgatgccattatagttggagaaaagcttgtttcctgttcctcagacaccacaataaaggtctggaattgcttctccgatggtgcttgtaccaggactttccgccagcattctgattatgtgatttgtcttgctgctgctgagaagaatagcaatattgtagcctctggtggtcttggtggtgaggtttttgtttgggaccttgatgctgctcttgctcctgtagccaaatctgtggacgcaaaagaagacgaggttcctaatggaaactcagggcctcctttgacaacattgtgcagtgtaaattctagtagcaatattgcttcctctaatagtcaatcacatgggtacagtccaattgctgccaaaggtcacaaagattcagtttacgcattggctatgaatgatacaggaactcttcttctctctggtggcactgaaaaggttgtccgggtgtgggatccgaggacaggttcaaaaaacatgaaattgagggggcacactgacaatatcagggccttacttgttgattctacagggaggttggtgtttaggaaattttcaaatgagctcttttagattcatctggggtatgctgttcctgttttttgacgtcattgtttaaaaattgaacctcatcttccttattttcactccacgctttgctttaatcttgaatgtttgagtttacatatgtaggcatgagtcatgactttacaattgacagtcgtaataccaaggcatttgtgtttcctggttgtttacaatttaggccctgtttggatgccaagtttttatggagtttcagaaaaaaaataccatggttttgtgaaacacctaagttttggagcgtcatgaagtgttggatttggttttgaaaactataatggtatttcaaaaactgtagtcttcttggagttttaaaaactccactagatgcctcttgtttctaaaccttggttttgcacatcaatgcatcaatcagtgttattaaaactacgtttaaacgtcaaaactctaatcagagattgaaaccgtgttttggcgttctaaactgtaaaacacagtttcatgcgttttagaccattatctacttttgggcccagtctgttagttaattttgggtccaatctggcccagtctccacacgcttgccctactcccctaccctgaagcccaatgactagtagcacactgctctgctctctatcgtcaccgccgcctgaaggtattgttgccttgttcctgtcgtctgctgcacctgtgcgccctctccctccgcgccgtgccgctcctctccctccgcgctgccctctctctccatgcctctgtttgctagcagccggtagccagcacccagcaatcgactcctctcatcctctctgctctctgttttggtaagcatctaacctctctttcttggtatttcacttcatgttattgtctgaaattatgatatattggtatttttcctatgctgtttaaactacgtttaaacaaagtttaaacgtttaaaagtcaaaacttcacccatgagtgtttgaatgttttatcgtttcaataaccttggcatcaatactctatataaacttataaagcaccagtttcagttgtcgtgcgtttccacggttccacagttgtcgtgcgtcaccctttctcttcccgctttatgcaaaaataaggtaaaatggtgcacaagtgggggttcaaaccttggttgttggctccatattcatacccacgcaaccaatagaacatatatttttgtatttttttaaaacaaagtctacccatgtgaaatagaaaccgcagcaatgcacggacatctaactagtggtttctgaaaccgcagtttcttaatacccacggtctctcaatgctacagcctccaaacaggcgcttactattcattcatagaaaattgaatttctattatttgtgcatgaaagagaagtctgtttatggctgagtttacatatgttgactgttgtaataccaagacatctgtgtttcctggctgtttaccatgatagcactcagcttgcctggtttactgcttgctcagaaagactttggacttctattatttgtgcatgaagagacgtgtgtttatggtgttatagttttattacttttttcgtggtcagcaatcttttagtgcagttcatgtaagatagtgtctgctccagaaacactatttggtgtcagtcagcactcagaaagaactgtttaatatcatcaatcagttcaaatgaggaatttaaccttttagattaacatgttaatgtcaatggtgacagtagtttgcagagtcgatctctcttgctatccaagttgtgtaatttgccgtgttatccactttcatgttagtgcaaatgagttgatgaggaaatggcttgtacgcttatgtgacacattatataactatgatggttacaacaaagtggcgtacctggaagcagcagttttggatggtcaaattactgattttctggatgataacactgagtattgcctatcaggatcatctgattcgatgataagactatgggatctaggacaacagcgttgtgttcattcttatgctgtgcatactgattcagtttgggcgcttgcaaccactcattcgtttggtcatgtctacagtggtggaagagaccaatctgtatacctaacagacttatccacaagagagagtgttttactttgcacaaatgaatgccctattctacagttgtctctgcaagatgacacaatatgggtggcaacaactgattcttctgtatatggatggccagctgaagggctcacaccccaaaaggttttccaaaagggtggctcattcttagctgggaatttgtcattctcaagggcaagagcttctttagaaggatcagcacctgtccctgtatacaaagagccatcttttgtcgtcccaggggttccagcaatagttcaacatgaaataatgaataatagaaggcatgtactgacaaaggtgagatttcttttacttatcttttattactaaactgcaaggagtggcatattgatgtgtgcactcatatcctttaattcaggataccactggttcagtcaaattgtgggagatcacccggggtgctgttattgaagactttggcaaggtttcatttgaggataagaaaaaggagttgtttgagatggtaagcatacctgcttggttcaccatggatgctcgattaggatgcttgtctgtccacctggatactccacaatgcttttctgcagaaatatatgcagttgatctaaatgtttctggagcacaagaagatctcaagattaatttggctcatgataccctttgtggcttgctagttcattggagtaaaagaaagcagaaatctagttcgcatggcttgcctaatggtgatagttcaatagggaaagatgttccgtcaaaagactcgcaccgatcaagaactgagaaggttctagtggagggccttggagaaagagaattactgatttggatggaaccgaaggtgatctaccttggtggtgtgtggactgtgttactcacaatcgatatccaaaggaaaatacaaagtgtggcttttatttacatcctgctgaaggttcgcctgcgccaaacataactcaagggaagcttagtgctccacggatattacgaattcacaaggttgctaactatgtggttgagaaactcgttcttgacaaaccattggatggaggctctgatagtacgtttgttatgggattgagttctgctcaatcacagctctcacagctagatagttcttcgcggcttggactaaagccatggcaaaaaacaaagccatgtattgaggtattgtgcaataaccaggttctatcaccagatatgagtttggctacagtgcgaacatatatatggaagaagccggaagatttgattcttcattatagagtggtccaatcgagatgatcacggcttcagatgtacatgctcacatggttctccagatatgtcccagcatgtccgcacctttagatggtgtggttgaagatgcctttggcttagagaggaagcatcatcttcacagaggaaatattttgctcttgctccgccctccccccggtagctgttcccagaatcgacttgttcgcttctctgtaaagttcctgaccttgccctggtagtaagatgtatcatagcacaggtataaggctctctgctggctgccgagcttgtaaatgtagaagattaggtgcttaataaaagatcgaaaggatatgttttttctttcgtttttctttgacagcatttgtaagaaaaaaaaagaggctgacgctcggcccagatcgtggcgctccgacgtcgattattggatttaaccccgccgatccccttggaggtgtttggttgagaccagggtaagaggtggacgggaacccgggaacaataaagctgtttttgggacatgttgatgtcgggagctactttacctctcatccttcaacaattgttctatatactctatagggctattttagttttttttgttttttgctagcgagaaatcagaaataaatgattgctttgttttgataatcaaagctgttggatcatggtctcatggatgtgtcccctccccactgataatctgatatacattttgatctggacggtgtgtgattcggtggcagctaggacagcgtgtcgcattg

SEQ ID NO: 30652 - DNA, 3284 bp, Zea Mays
gccaactacacgacacaacctgccttccttggttcctccaccccgtcctcccctgtcccgtcgcgtcagccactcgccgcggccaactaccgccgccgctgttgcagccgcccatctgcttccatcgcgtcgcggaggccgctcgcttcgccgccgcacgctccgctcttccggtgccctcctccgggaccctcggccacgccgcgtcgccttaaaccctagatctgcgctccccgcccccgcgctggccgcggccgcgtactgacgccggcacgctgccgatctccatacgtcgctcgatcccaggtttagctgcttcgaatttagataagtttcttccatgcatcgtgttggaagtgctggtaacacggctggctcgactcgaccgagaaaggagaagcgcttcacatatgtgctcaatgatgctgatgataaaaagcattgtgcaggaatcaattgcatggcttatctaaatggttctacatttagtacaagtgattacctttttagcgggagtcgtgatggtaccttgaaaagatgggaattaaataatggggatgcaagtttctcagcaacttttgagtctcatgttgattgggttaatgatgccattatagttggagaaaagcttgtttcctgttcctcagacaccacaataaaggtctggaattgcttctccgatggtgcttgtaccaggactttccgccagcattctgattatgtgatttgtcttgctgctgctgagaagaatagcaatattgtagcctctggtggtcttggtggtgaggtttttgtttgggaccttgatgctgctcttgctcctgtagccaaatctgtggacgcaaaagaagacgaggttcctaatggaaactcagggcctcctttgacaacattgtgcagtgtaaattctagtagcaatattgcttcctctaatagtcaatcacatgggtacagtccaattgctgccaaaggtcacaaagattcagtttacgcattggctatgaatgatacaggaactcttcttctctctggtggcactgaaaaggttgtccgggtgtgggatccgaggacaggttcaaaaaacatgaaattgagggggcacactgacaatatcagggccttacttgttgattctacagggaggtattgcctatcaggatcatctgattcgatgataagactatgggatctaggacaacagcgttgtgttcattcttatgctgtgcatactgattcagtttgggcgcttgcaaccactcattcgtttggtcatgtctacagtggtggaagagaccaatctgtatacctaacagacttatccacaagagagagtgttttactttgcacaaatgaatgccctattctacagttgtctctgcaagatgacacaatatgggtggcaacaactgattcttctgtatatggatggccagctgaagggctcacaccccaaaaggttttccaaaagggtggctcattcttagctgggaatttgtcattctcaagggcaagagcttctttagaaggatcagcacctgtccctgtatacaaagagccatcttttgtcgtcccaggggttccagcaatagttcaacatgaaataatgaataatagaaggcatgtactgacaaaggataccactggttcagtcaaattgtgggagatcacccggggtgctgttattgaagactttggcaaggtttcatttgaggataagaaaaaggagttgtttgagatggtaagcatacctgcttggttcaccatggatgctcgattaggatgcttgtctgtccacctggatactccacaatgcttttctgcagaaatatatgcagttgatctaaatgtttctggagcacaagaagatctcaagattaatttggctcatgataccctttgtggcttgctagttcattggagtaaaagaaagcagaaatctagttcgcatggcttgcctaatggtgatagttcaatagggaaagatgttccgtcaaaagactcgcaccgatcaagaactgaggtggatgacacaactgaaaaccacacaactcatgtgctcccatcatttgagttttctacagtttcacctccatcaattatcacagaaggttctagtggagggccttggagaaagagaattactgatttggatggaaccgaaggtgtggcttttatttacatcctgctgaaggttcgcctgcgccaaacataactcaagggaagcttagtgctccacggatattacgaattcacaaggttgctaactatgtggttgagaaactcgttcttgacaaaccattggatggaggctctgatagtacgtttgttatgggattgagttctgctcaatcacagctctcacagctagatagttcttcgcggcttggactaaagccatggcaaaaaacaaagccatgtattgaggtattgtgcaataaccaggttctatcaccagatatgagtttggctacagtgcgaacatatatatggaagaagccggaagatttgattcttcattatagagtggtccaatcgagatgatcacggcttcagatgtacatgctcacatggttctccagatatgtcccagcatgtccgcacctttagatggtgtggttgaagatgcctttggcttagagaggaagcatcatcttcacagaggaaatattttgctcttgctccgccctccccccggtagctgttcccagaatcgacttgttcgcttctctgtaaagttcctgaccttgccctggtagtaagatgtatcatagcacaggtataaggctctctgctggctgccgagcttgtaaatgtagaagattaggtgcttaataaaagatcgaaaggatatgttttttctttcgtttttctttgacagcatttgtaagaaaaaaaaagaggctgacgctcggcccagatcgtggcgctccgacgtcgattattggatttaaccccgccgatccccttggaggtgtttggttgagaccagggtaagaggtggacgggaacccgggaacaataaagctgtttttgggacatgttgatgtcgggagctactttacctctcatccttcaacaattgttctatatactctatagggctattttagttttttttgttttttgctagcgagaaatcagaaataaatgattgctttgttttgataatcaaagctgttggatcatggtctcatggatgtgtcccctccccactgataatctgatatacattttgatctggacggtgtgtgattcggtggcagctaggacagcgtgtcgcattg

SEQ ID NO: 30653 - DNA, 2995 bp, Zea Mays
gccaactacacgacacaacctgccttccttggttcctccaccccgtcctcccctgtcccgtcgcgtcagccactcgccgcggccaactaccgccgccgctgttgcagccgcccatctgcttccatcgcgtcgcggaggccgctcgcttcgccgccgcacgctccgctcttccggtgccctcctccgggaccctcggccacgccgcgtcgccttaaaccctagatctgcgctccccgcccccgcgctggccgcggccgcgtactgacgccggcacgctgccgatctccatacgtcgctcgatcccaggtttagctgcttcgaatttagataagtttcttccatgcatcgtgttggaagtgctggtaacacggctggctcgactcgaccgagaaaggagaagcgcttcacatatgtgctcaatgatgctgatgataaaaagcattgtgcaggaatcaattgcatggcttatctaaatggttctacatttagtacaagtgattacctttttagcgggagtcgtgatggtaccttgaaaagatgggaattaaataatggggatgcaagtttctcagcaacttttgagtctcatgttgattgggttaatgatgccattatagttggagaaaagcttgtttcctgttcctcagacaccacaataaaggtctggaattgcttctccgatggtgcttgtaccaggactttccgccagcattctgattatgtgatttgtcttgctgctgctgagaagaatagcaatattgtagcctctggtggtcttggtggtgaggtttttgtttgggaccttgatgctgctcttgctcctgtagccaaatctgtggacgcaaaagaagacgaggttcctaatggaaactcagggcctcctttgacaacattgtgcagtgtaaattctagtagcaatattgcttcctctaatagtcaatcacatgggtacagtccaattgctgccaaaggtcacaaagattcagtttacgcattggctatgaatgatacaggaactcttcttctctctggtggcactgaaaaggttgtccgggtgtgggatccgaggacaggttcaaaaaacatgaaattgagggggcacactgacaatatcagggccttacttgttgattctacagggaggtattgcctatcaggatcatctgattcgatgataagactatgggatctaggacaacagcgttgtgttcattcttatgctgtgcatactgattcagtttgggcgcttgcaaccactcattcgtttggtcatgtctacagtggtggaagagaccaatctgtatacctaacagacttatccacaagagagagtgttttactttgcacaaatgaatgccctattctacagttgtctctgcaagatgacacaatatgggtggcaacaactgattcttctgtatatggatggccagctgaagggctcacaccccaaaaggttttccaaaagggtggctcattcttagctgggaatttgtcattctcaagggcaagagcttctttagaaggatcagcacctgtccctgtatacaaagagccatcttttgtcgtcccaggggttccagcaatagttcaacatgaaataatgaataatagaaggcatgtactgacaaaggataccactggttcagtcaaattgtgggagatcacccggggtgctgttattgaagactttggcaaggtttcatttgaggataagaaaaaggagttgtttgagatggtaagcatacctgcttggttcaccatggatgctcgattaggatgcttgtctgtccacctggatactccacaatgcttttctgcagaaatatatgcagttgatctaaatgtttctggagcacaagaagatctcaaggtgtggcttttatttacatcctgctgaaggttcgcctgcgccaaacataactcaagggaagcttagtgctccacggatattacgaattcacaaggttgctaactatgtggttgagaaactcgttcttgacaaaccattggatggaggctctgatagtacgtttgttatgggattgagttctgctcaatcacagctctcacagctagatagttcttcgcggcttggactaaagccatggcaaaaaacaaagccatgtattgaggtattgtgcaataaccaggttctatcaccagatatgagtttggctacagtgcgaacatatatatggaagaagccggaagatttgattcttcattatagagtggtccaatcgagatgatcacggcttcagatgtacatgctcacatggttctccagatatgtcccagcatgtccgcacctttagatggtgtggttgaagatgcctttggcttagagaggaagcatcatcttcacagaggaaatattttgctcttgctccgccctccccccggtagctgttcccagaatcgacttgttcgcttctctgtaaagttcctgaccttgccctggtagtaagatgtatcatagcacaggtataaggctctctgctggctgccgagcttgtaaatgtagaagattaggtgcttaataaaagatcgaaaggatatgttttttctttcgtttttctttgacagcatttgtaagaaaaaaaaagaggctgacgctcggcccagatcgtggcgctccgacgtcgattattggatttaaccccgccgatccccttggaggtgtttggttgagaccagggtaagaggtggacgggaacccgggaacaataaagctgtttttgggacatgttgatgtcgggagctactttacctctcatccttcaacaattgttctatatactctatagggctattttagttttttttgttttttgctagcgagaaatcagaaataaatgattgctttgttttgataatcaaagctgttggatcatggtctcatggatgtgtcccctccccactgataatctgatatacattttgatctggacggtgtgtgattcggtggcagctaggacagcgtgtcgcattg

SEQ ID NO: 30654 - DNA, 3243 bp, Zea Mays
gccaactacacgacacaacctgccttccttggttcctccaccccgtcctcccctgtcccgtcgcgtcagccactcgccgcggccaactaccgccgccgctgttgcagccgcccatctgcttccatcgcgtcgcggaggccgctcgcttcgccgccgcacgctccgctcttccggtgccctcctccgggaccctcggccacgccgcgtcgccttaaaccctagatctgcgctccccgcccccgcgctggccgcggccgcgtactgacgccggcacgctgccgatctccatacgtcgctcgatcccaggtttagctgcttcgaatttagataagtttcttccatgcatcgtgttggaagtgctggtaacacggctggctcgactcgaccgagaaaggagaagcgcttcacatatgtgctcaatgatgctgatgataaaaagcattgtgcaggaatcaattgcatggcttatctaaatggttctacatttagtacaagtgattacctttttagcgggagtcgtgatggtaccttgaaaagatgggaattaaataatggggatgcaagtttctcagcaacttttgagtctcatgttgattgggttaatgatgccattatagttggagaaaagcttgtttcctgttcctcagacaccacaataaaggtctggaattgcttctccgatggtgcttgtaccaggactttccgccagcattctgattatgtgatttgtcttgctgctgctgagaagaatagcaatattgtagcctctggtggtcttggtggtgaggtttttgtttgggaccttgatgctgctcttgctcctgtagccaaatctgtggacgcaaaagaagacgaggttcctaatggaaactcagggcctcctttgacaacattgtgcagtgtaaattctagtagcaatattgcttcctctaatagtcaatcacatgggtacagtccaattgctgccaaaggtcacaaagattcagtttacgcattggctatgaatgatacaggaactcttcttctctctggtggcactgaaaaggttgtccgggtgtgggatccgaggacaggttcaaaaaacatgaaattgagggggcacactgacaatatcagggccttacttgttgattctacagggaggtattgcctatcaggatcatctgattcgatgataagactatgggatctaggacaacagcgttgtgttcattcttatgctgtgcatactgattcagtttgggcgcttgcaaccactcattcgtttggtcatgtctacagtggtggaagagaccaatctgtatacctaacagacttatccacaagagagagtgttttactttgcacaaatgaatgccctattctacagttgtctctgcaagatgacacaatatgggtggcaacaactgattcttctgtatatggatggccagctgaagggctcacaccccaaaaggttttccaaaagggtggctcattcttagctgggaatttgtcattctcaagggcaagagcttctttagaaggatcagcacctgtccctgtatacaaagagccatcttttgtcgtcccaggggttccagcaatagttcaacatgaaataatgaataatagaaggcatgtactgacaaaggataccactggttcagtcaaattgtgggagatcacccggggtgctgttattgaagactttggcaaggtttcatttgaggataagaaaaaggagttgtttgagatggtattattgaaatgtcatgatttcagagttttatttaaaaaatcgctacccatgtactgtttaatttatcaattgattattaggtaagcatacctgcttggttcaccatggatgctcgattaggatgcttgtctgtccacctggatactccacaatgcttttctgcagaaatatatgcagttgatctaaatgtttctggagcacaagaagatctcaagggaaagatgttccgtcaaaagactcgcaccgatcaagaactgagaaggttctagtggagggccttggagaaagagaattactgatttggatggaaccgaaggtgatctaccttggtggtgtgtggactgtgttactcacaatcgatatccaaaggaaaatacaaagtgtggcttttatttacatcctgctgaaggttcgcctgcgccaaacataactcaagggaagcttagtgctccacggatattacgaattcacaaggttgctaactatgtggttgagaaactcgttcttgacaaaccattggatggaggctctgatagtacgtttgttatgggattgagttctgctcaatcacagctctcacagctagatagttcttcgcggcttggactaaagccatggcaaaaaacaaagccatgtattgaggtattgtgcaataaccaggttctatcaccagatatgagtttggctacagtgcgaacatatatatggaagaagccggaagatttgattcttcattatagagtggtccaatcgagatgatcacggcttcagatgtacatgctcacatggttctccagatatgtcccagcatgtccgcacctttagatggtgtggttgaagatgcctttggcttagagaggaagcatcatcttcacagaggaaatattttgctcttgctccgccctccccccggtagctgttcccagaatcgacttgttcgcttctctgtaaagttcctgaccttgccctggtagtaagatgtatcatagcacaggtataaggctctctgctggctgccgagcttgtaaatgtagaagattaggtgcttaataaaagatcgaaaggatatgttttttctttcgtttttctttgacagcatttgtaagaaaaaaaaagaggctgacgctcggcccagatcgtggcgctccgacgtcgattattggatttaaccccgccgatccccttggaggtgtttggttgagaccagggtaagaggtggacgggaacccgggaacaataaagctgtttttgggacatgttgatgtcgggagctactttacctctcatccttcaacaattgttctatatactctatagggctattttagttttttttgttttttgctagcgagaaatcagaaataaatgattgctttgttttgataatcaaagctgttggatcatggtctcatggatgtgtcccctccccactgataatctgatatacattttgatctggacggtgtgtgattcggtggcagctaggacagcgtgtcgcattg

SEQ ID NO: 30655 - DNA, 3266 bp, Zea Mays
gccaactacacgacacaacctgccttccttggttcctccaccccgtcctcccctgtcccgtcgcgtcagccactcgccgcggccaactaccgccgccgctgttgcagccgcccatctgcttccatcgcgtcgcggaggccgctcgcttcgccgccgcacgctccgctcttccggtgccctcctccgggaccctcggccacgccgcgtcgccttaaaccctagatctgcgctccccgcccccgcgctggccgcggccgcgtactgacgccggcacgctgccgatctccatacgtcgctcgatcccaggtttagctgcttcgaatttagataagtttcttccatgcatcgtgttggaagtgctggtaacacggctggctcgactcgaccgagaaaggagaagcgcttcacatatgtgctcaatgatgctgatgataaaaagcattgtgcaggaatcaattgcatggcttatctaaatggttctacatttagtacaagtgattacctttttagcgggagtcgtgatggtaccttgaaaagatgggaattaaataatggggatgcaagtttctcagcaacttttgagtctcatgttgattgggttaatgatgccattatagttggagaaaagcttgtttcctgttcctcagacaccacaataaaggtctggaattgcttctccgatggtgcttgtaccaggactttccgccagcattctgattatgtgatttgtcttgctgctgctgagaagaatagcaatattgtagcctctggtggtcttggtggtgaggtttttgtttgggaccttgatgctgctcttgctcctgtagccaaatctgtggacgcaaaagaagacgaggttcctaatggaaactcagggcctcctttgacaacattgtgcagtgtaaattctagtagcaatattgcttcctctaatagtcaatcacatgggtacagtccaattgctgccaaaggtcacaaagattcagtttacgcattggctatgaatgatacaggaactcttcttctctctggtggcactgaaaaggttgtccgggtgtgggatccgaggacaggttcaaaaaacatgaaattgagggggcacactgacaatatcagggccttacttgttgattctacagggaggtattgcctatcaggatcatctgattcgatgataagactatgggatctaggacaacagcgttgtgttcattcttatgctgtgcatactgattcagtttgggcgcttgcaaccactcattcgtttggtcatgtctacagtggtggaagagaccaatctgtatacctaacagacttatccacaagagagagtgttttactttgcacaaatgaatgccctattctacagttgtctctgcaagatgacacaatatgggtggcaacaactgattcttctgtatatggatggccagctgaagggctcacaccccaaaaggttttccaaaagggtggctcattcttagctgggaatttgtcattctcaagggcaagagcttctttagaaggatcagcacctgtccctgtatacaaagagccatcttttgtcgtcccaggggttccagcaatagttcaacatgaaataatgaataatagaaggcatgtactgacaaaggataccactggttcagtcaaattgtgggagatcacccggggtgctgttattgaagactttggcaaggtttcatttgaggataagaaaaaggagttgtttgagatggtaagcatacctgcttggttcaccatggatgctcgattaggatgcttgtctgtccacctggatactccacaatgcttttctgcagaaatatatgcagttgatctaaatgtttctggagcacaagaagatctcaagattaatttggctcatgataccctttgtggcttgctagttcattggagtaaaagaaagcagaaatctagttcgcatggcttgcctaatggtgatagttcaatagggaaagatgttccgtcaaaagactcgcaccgatcaagaactgaggtggatgacacaactgaaaaccacacaactcatgtgctcccatcatttgagttttctacagtttcacctccatcaattatcacagaaggttctagtggagggccttggagaaagagaattactgatttggatggaaccgaaggtgtggcttttatttacatcctgctgaaggttcgcctgcgccaaacataactcaagggaagcttagtgctccacggatattacgaattcacaaggttgctaactatgtggttgagaaactcgttcttgacaaaccattggatggaggctctgatagtacgtttgttatgggattgagttctgctcaatcacagctctcacagctagatagttcttcgcggcttggactaaagccatggcaaaaaacaaagccatgtattgaggttctatcaccagatatgagtttggctacagtgcgaacatatatatggaagaagccggaagatttgattcttcattatagagtggtccaatcgagatgatcacggcttcagatgtacatgctcacatggttctccagatatgtcccagcatgtccgcacctttagatggtgtggttgaagatgcctttggcttagagaggaagcatcatcttcacagaggaaatattttgctcttgctccgccctccccccggtagctgttcccagaatcgacttgttcgcttctctgtaaagttcctgaccttgccctggtagtaagatgtatcatagcacaggtataaggctctctgctggctgccgagcttgtaaatgtagaagattaggtgcttaataaaagatcgaaaggatatgttttttctttcgtttttctttgacagcatttgtaagaaaaaaaaagaggctgacgctcggcccagatcgtggcgctccgacgtcgattattggatttaaccccgccgatccccttggaggtgtttggttgagaccagggtaagaggtggacgggaacccgggaacaataaagctgtttttgggacatgttgatgtcgggagctactttacctctcatccttcaacaattgttctatatactctatagggctattttagttttttttgttttttgctagcgagaaatcagaaataaatgattgctttgttttgataatcaaagctgttggatcatggtctcatggatgtgtcccctccccactgataatctgatatacattttgatctggacggtgtgtgattcggtggcagctaggacagcgtgtcgcattg

SEQ ID NO: 30656 - DNA, 3272 bp, Zea Mays
gccaactacacgacacaacctgccttccttggttcctccaccccgtcctcccctgtcccgtcgcgtcagccactcgccgcggccaactaccgccgccgctgttgcagccgcccatctgcttccatcgcgtcgcggaggccgctcgcttcgccgccgcacgctccgctcttccggtgccctcctccgggaccctcggccacgccgcgtcgccttaaaccctagatctgcgctccccgcccccgcgctggccgcggccgcgtactgacgccggcacgctgccgatctccatacgtcgctcgatcccaggtttagctgcttcgaatttagataagtttcttccatgcatcgtgttggaagtgctggtaacacggctggctcgactcgaccgagaaaggagaagcgcttcacatatgtgctcaatgatgctgatgataaaaagcattgtgcaggaatcaattgcatggcttatctaaatggttctacatttagtacaagtgattacctttttagcgggagtcgtgatggtaccttgaaaagatgggaattaaataatggggatgcaagtttctcagcaacttttgagtctcatgttgattgggttaatgatgccattatagttggagaaaagcttgtttcctgttcctcagacaccacaataaaggtctggaattgcttctccgatggtgcttgtaccaggactttccgccagcattctgattatgtgatttgtcttgctgctgctgagaagaatccaaatctgtggacgcaaaagaagacgaggttcctaatggaaactcagggcctcctttgacaacattgtgcagtgtaaattctagtagcaatattgcttcctctaatagtcaatcacatgggtacagtccaattgctgccaaaggtcacaaagattcagtttacgcattggctatgaatgatacaggaactcttcttctctctggtggcactgaaaaggttgtccgggtgtgggatccgaggacaggttcaaaaaacatgaaattgagggggcacactgacaatatcagggccttacttgttgattctacagggaggtattgcctatcaggatcatctgattcgatgataagactatgggatctaggacaacagcgttgtgttcattcttatgctgtgcatactgattcagtttgggcgcttgcaaccactcattcgtttggtcatgtctacagtggtggaagagaccaatctgtatacctaacagacttatccacaagagagagtgttttactttgcacaaatgaatgccctattctacagttgtctctgcaagatgacacaatatgggtggcaacaactgattcttctgtatatggatggccagctgaagggctcacaccccaaaaggttttccaaaagggtggctcattcttagctgggaatttgtcattctcaagggcaagagcttctttagaaggatcagcacctgtccctgtatacaaagagccatcttttgtcgtcccaggggttccagcaatagttcaacatgaaataatgaataatagaaggcatgtactgacaaaggataccactggttcagtcaaattgtgggagatcacccggggtgctgttattgaagactttggcaaggtttcatttgaggataagaaaaaggagttgtttgagatggtaagcatacctgcttggttcaccatggatgctcgattaggatgcttgtctgtccacctggatactccacaatgcttttctgcagaaatatatgcagttgatctaaatgtttctggagcacaagaagatctcaagattaatttggctcatgataccctttgtggcttgctagttcattggagtaaaagaaagcagaaatctagttcgcatggcttgcctaatggtgatagttcaatagggaaagatgttccgtcaaaagactcgcaccgatcaagaactgaggtggatgacacaactgaaaaccacacaactcatgtgctcccatcatttgagttttctacagtttcacctccatcaattatcacagaaggttctagtggagggccttggagaaagagaattactgatttggatggaaccgaaggtgatctaccttggtggtgtgtggactgtgttactcacaatcgatatccaaaggaaaatacaaagtgtggcttttatttacatcctgctgaaggttcgcctgcgccaaacataactcaagggaagcttagtgctccacggatattacgaattcacaaggttgctaactatgtggttgagaaactcgttcttgacaaaccattggatggaggctctgatagtacgtttgttatgggattgagttctgctcaatcacagctctcacagctagatagttcttcgcggcttggactaaagccatggcaaaaaacaaagccatgtattgaggtattgtgcaataaccaggttctatcaccagatatgagtttggctacagtgcgaacatatatatggaagaagccggaagatttgattcttcattatagagtggtccaatcgagatgatcacggcttcagatgtacatgctcacatggttctccagatatgtcccagcatgtccgcacctttagatggtgtggttgaagatgcctttggcttagagaggaagcatcatcttcacagaggaaatattttgctcttgctccgccctccccccggtagctgttcccagaatcgacttgttcgcttctctgtaaagttcctgaccttgccctggtagtaagatgtatcatagcacaggtataaggctctctgctggctgccgagcttgtaaatgtagaagattaggtgcttaataaaagatcgaaaggatatgttttttctttcgtttttctttgacagcatttgtaagaaaaaaaaagaggctgacgctcggcccagatcgtggcgctccgacgtcgattattggatttaaccccgccgatccccttggaggtgtttggttgagaccagggtaagaggtggacgggaacccgggaacaataaagctgtttttgggacatgttgatgtcgggagctactttacctctcatccttcaacaattgttctatatactctatagggctattttagttttttttgttttttgctagcgagaaatcagaaataaatgattgctttgttttgataatcaaagctgttggatcatggtctcatggatgtgtcccctccccactgataatctgatatacattttgatctggacggtgtgtgattcggtggcagctaggacagcgtgtcgcattg

SEQ ID NO: 30657 - DNA, 3231 bp, Zea Mays
gccaactacacgacacaacctgccttccttggttcctccaccccgtcctcccctgtcccgtcgcgtcagccactcgccgcggccaactaccgccgccgctgttgcagccgcccatctgcttccatcgcgtcgcggaggccgctcgcttcgccgccgcacgctccgctcttccggtgccctcctccgggaccctcggccacgccgcgtcgccttaaaccctagatctgcgctccccgcccccgcgctggccgcggccgcgtactgacgccggcacgctgccgatctccatacgtcgctcgatcccaggtttagctgcttcgaatttagataagtttcttccatgcatcgtgttggaagtgctggtaacacggctggctcgactcgaccgagaaaggagaagcgcttcacatatgtgctcaatgatgctgatgataaaaagcattgtgcaggaatcaattgcatggcttatctaaatggttctacatttagtacaagtgattacctttttagcgggagtcgtgatggtaccttgaaaagatgggaattaaataatggggatgcaagtttctcagcaacttttgagtctcatgttgattgggttaatgatgccattatagttggagaaaagcttgtttcctgttcctcagacaccacaataaaggactttccgccagcattctgattatgtgatttgtcttgctgctgctgagaagaatagcaatattgtagcctctggtggtcttggtggtgaggtttttgtttgggaccttgatgctgctcttgctcctgtagccaaatctgtggacgcaaaagaagacgaggttcctaatggaaactcagggcctcctttgacaacattgtgcagtgtaaattctagtagcaatattgcttcctctaatagtcaatcacatgggtacagtccaattgctgccaaaggtcacaaagattcagtttacgcattggctatgaatgatacaggaactcttcttctctctggtggcactgaaaaggttgtccgggtgtgggatccgaggacaggttcaaaaaacatgaaattgagggggcacactgacaatatcagggccttacttgttgattctacagggaggtattgcctatcaggatcatctgattcgatgataagactatgggatctaggacaacagcgttgtgttcattcttatgctgtgcatactgattcagtttgggcgcttgcaaccactcattcgtttggtcatgtctacagtggtggaagagaccaatctgtatacctaacagacttatccacaagagagagtgttttactttgcacaaatgaatgccctattctacagttgtctctgcaagatgacacaatatgggtggcaacaactgattcttctgtatatggatggccagctgaagggctcacaccccaaaaggttttccaaaagggtggctcattcttagctgggaatttgtcattctcaagggcaagagcttctttagaaggatcagcacctgtccctgtatacaaagagccatcttttgtcgtcccaggggttccagcaatagttcaacatgaaataatgaataatagaaggcatgtactgacaaaggataccactggttcagtcaaattgtgggagatcacccggggtgctgttattgaagactttggcaaggtttcatttgaggataagaaaaaggagttgtttgagatggtaagcatacctgcttggttcaccatggatgctcgattaggatgcttgtctgtccacctggatactccacaatgcttttctgcagaaatatatgcagttgatctaaatgtttctggagcacaagaagatctcaagattaatttggctcatgataccctttgtggcttgctagttcattggagtaaaagaaagcagaaatctagttcgcatggcttgcctaatggtgatagttcaatagggaaagatgttccgtcaaaagactcgcaccgatcaagaactgaggtggatgacacaactgaaaaccacacaactcatgtgctcccatcatttgagttttctacagtttcacctccatcaattatcacagaaggttctagtggagggccttggagaaagagaattactgatttggatggaaccgaaggtgtggcttttatttacatcctgctgaaggttcgcctgcgccaaacataactcaagggaagcttagtgctccacggatattacgaattcacaaggttgctaactatgtggttgagaaactcgttcttgacaaaccattggatggaggctctgatagtacgtttgttatgggattgagttctgctcaatcacagctctcacagctagatagttcttcgcggcttggactaaagccatggcaaaaaacaaagccatgtattgaggttctatcaccagatatgagtttggctacagtgcgaacatatatatggaagaagccggaagatttgattcttcattatagagtggtccaatcgagatgatcacggcttcagatgtacatgctcacatggttctccagatatgtcccagcatgtccgcacctttagatggtgtggttgaagatgcctttggcttagagaggaagcatcatcttcacagaggaaatattttgctcttgctccgccctccccccggtagctgttcccagaatcgacttgttcgcttctctgtaaagttcctgaccttgccctggtagtaagatgtatcatagcacaggtataaggctctctgctggctgccgagcttgtaaatgtagaagattaggtgcttaataaaagatcgaaaggatatgttttttctttcgtttttctttgacagcatttgtaagaaaaaaaaagaggctgacgctcggcccagatcgtggcgctccgacgtcgattattggatttaaccccgccgatccccttggaggtgtttggttgagaccagggtaagaggtggacgggaacccgggaacaataaagctgtttttgggacatgttgatgtcgggagctactttacctctcatccttcaacaattgttctatatactctatagggctattttagttttttttgttttttgctagcgagaaatcagaaataaatgattgctttgttttgataatcaaagctgttggatcatggtctcatggatgtgtcccctccccactgataatctgatatacattttgatctggacggtgtgtgattcggtggcagctaggacagcgtgtcgcattg

SEQ ID NO: 30658 - DNA, 3349 bp, Zea Mays
gccaactacacgacacaacctgccttccttggttcctccaccccgtcctcccctgtcccgtcgcgtcagccactcgccgcggccaactaccgccgccgctgttgcagccgcccatctgcttccatcgcgtcgcggaggccgctcgcttcgccgccgcacgctccgctcttccggtgccctcctccgggaccctcggccacgccgcgtcgccttaaaccctagatctgcgctccccgcccccgcgctggccgcggccgcgtactgacgccggcacgctgccgatctccatacgtcgctcgatcccaggtttagctgcttcgaatttagataagtttcttccatgcatcgtgttggaagtgctggtaacacggctggctcgactcgaccgagaaaggagaagcgcttcacatatgtgctcaatgatgctgatgataaaaagcattgtgcaggaatcaattgcatggcttatctaaatggttctacatttagtacaagtgattacctttttagcgggagtcgtgatggtaccttgaaaagatgggaattaaataatggggatgcaagtttctcagcaacttttgagtctcatgttgattgggttaatgatgccattatagttggagaaaagcttgtttcctgttcctcagacaccacaataaaggtctggaattgcttctccgatggtgcttgtaccaggactttccgccagcattctgattatgtgatttgtcttgctgctgctgagaagaatagcaatattgtagcctctggtggtcttggtggtgaggtttttgtttgggaccttgatgctgctcttgctcctgtagccaaatctgtggacgcaaaagaagacgaggttcctaatggaaactcagggcctcctttgacaacattgtgcagtgtaaattctagtagcaatattgcttcctctaatagtcaatcacatgggtacagtccaattgctgccaaaggtcacaaagattcagtttacgcattggctatgaatgatacaggaactcttcttctctctggtggcactgaaaaggttgtccgggtgtgggatccgaggacaggttcaaaaaacatgaaattgagggggcacactgacaatatcagggccttacttgttgattctacagggaggtattgcctatcaggatcatctgattcgatgataagactatgggatctaggacaacagcgttgtgttcattcttatgctgtgcatactgattcagtttgggcgcttgcaaccactcattcgtttggtcatgtctacagtggtggaagagaccaatctgtatacctaacagacttatccacaagagagagtgttttactttgcacaaatgaatgccctattctacagttgtctctgcaagatgacacaatatgggtggcaacaactgattcttctgtatatggatggccagctgaagggctcacaccccaaaaggttttccaaaagggtggctcattcttagctgggaatttgtcattctcaagggcaagagcttctttagaaggatcagcacctgtccctgtatacaaagagccatcttttgtcgtcccaggggttccagcaatagttcaacatgaaataatgaataatagaaggcatgtactgacaaaggataccactggttcagtcaaattgtgggagatcacccggggtgctgttattgaagactttggcaaggtttcatttgaggataagaaaaaggagttgtttgagatgggtaagcatacctgcttggttcaccatggatgctcgattaggatgcttgtctgtccacctggatactccacaatgcttttctgcagaaatatatgcagttgatctaaatgtttctggagcacaagaagatctcaagattaatttggctcatgataccctttgtggcttgctagttcattggagtaaaagaaagcagaaatctagttcgcatggcttgcctaatggtgatagttcaatagggaaagatgttccgtcaaaagactcgcaccgatcaagaactgaggtggatgacacaactgaaaaccacacaactcatgtgctcccatcatttgagttttctacagtttcacctccatcaattatcacagaaggttctagtggagggccttggagaaagagaattactgatttggatggaaccgaaggtgatctaccttggtggtgtgtggactgtgttactcacaatcgatatccaaaggaaaatacaaagtgtggcttttatttacatcctgctgaaggttcgcctgcgccaaacataactcaagggaagcttagtgctccacggatattacgaattcacaaggttgctaactatgtggttgagaaactcgttcttgacaaaccattggatggaggctctgatagtacgtttgttatgggattgagttctgctcaatcacagctctcacagctagatagttcttcgcggcttggactaaagccatggcaaaaaacaaagccatgtattgaggtattgtgcaataaccaggttctatcaccagatatgagtttggctacagtgcgaacatatatatggaagaagccggaagatttgattcttcattatagagtggtccaatcgagatgatcacggcttcagatgtacatgctcacatggttctccagatatgtcccagcatgtccgcacctttagatggtgtggttgaagatgcctttggcttagagaggaagcatcatcttcacagaggaaatattttgctcttgctccgccctccccccggtagctgttcccagaatcgacttgttcgcttctctgtaaagttcctgaccttgccctggtagtaagatgtatcatagcacaggtataaggctctctgctggctgccgagcttgtaaatgtagaagattaggtgcttaataaaagatcgaaaggatatgttttttctttcgtttttctttgacagcatttgtaagaaaaaaaaagaggctgacgctcggcccagatcgtggcgctccgacgtcgattattggatttaaccccgccgatccccttggaggtgtttggttgagaccagggtaagaggtggacgggaacccgggaacaataaagctgtttttgggacatgttgatgtcgggagctactttacctctcatccttcaacaattgttctatatactctatagggctattttagttttttttgttttttgctagcgagaaatcagaaataaatgattgctttgttttgataatcaaagctgttggatcatggtctcatggatgtgtcccctccccactgataatctgatatacattttgatctggacggtgtgtgattcggtggcagctaggacagcgtgtcgcattg

SEQ ID NO: 30659 - DNA, 3483 bp, Zea Mays
gccaactacacgacacaacctgccttccttggttcctccaccccgtcctcccctgtcccgtcgcgtcagccactcgccgcggccaactaccgccgccgctgttgcagccgcccatctgcttccatcgcgtcgcggaggccgctcgcttcgccgccgcacgctccgctcttccggtgccctcctccgggaccctcggccacgccgcgtcgccttaaaccctagatctgcgctccccgcccccgcgctggccgcggccgcgtactgacgccggcacgctgccgatctccatacgtcgctcgatcccaggtttagctgcttcgaatttagataagtttcttccatgcatcgtgttggaagtgctggtaacacggctggctcgactcgaccgagaaaggagaagcgcttcacatatgtgctcaatgatgctgatgataaaaagcattgtgcaggaatcaattgcatggcttatctaaatggttctacatttagtacaagtgattacctttttagcgggagtcgtgatggtaccttgaaaagatgggaattaaataatggggatgcaagtttctcagcaacttttgagtctcatgttgattgggttaatgatgccattatagttggagaaaagcttgtttcctgttcctcagacaccacaataaaggtctggaattgcttctccgatggtgcttgtaccaggactttccgccagcattctgattatgtgatttgtcttgctgctgctgagaagaatagcaatattgtagcctctggtggtcttggtggtgaggtttttgtttgggaccttgatgctgctcttgctcctgtagccaaatctgtggacgcaaaagaagacgaggttcctaatggaaactcagggcctcctttgacaacattgtgcagtgtaaattctagtagcaatattgcttcctctaatagtcaatcacatgggtacagtccaattgctgccaaaggtcacaaagattcagtttacgcattggctatgaatgatacaggaactcttcttctctctggtggcactgaaaaggttgtccgggtgtgggatccgaggacaggttcaaaaaacatgaaattgagggggcacactgacaatatcagggccttacttgttgattctacagggagtgcaaatgagttgatgaggaaatggcttgtacgcttatgtgacacattatataactatgatggttacaacaaagtggcgtacctggaagcagcagttttggatggtcaaattactgattttctggatgataacactgagtattgcctatcaggatcatctgattcgatgataagactatgggatctaggacaacagcgttgtgttcattcttatgctgtgcatactgattcagtttgggcgcttgcaaccactcattcgtttggtcatgtctacagtggtggaagagaccaatctgtatacctaacagacttatccacaagagagagtgttttactttgcacaaatgaatgccctattctacagttgtctctgcaagatgacacaatatgggtggcaacaactgattcttctgtatatggatggccagctgaagggctcacaccccaaaaggttttccaaaagggtggctcattcttagctgggaatttgtcattctcaagggcaagagcttctttagaaggatcagcacctgtccctgtatacaaagagccatcttttgtcgtcccaggggttccagcaatagttcaacatgaaataatgaataatagaaggcatgtactgacaaaggtgagatttcttttacttatcttttattactaaactgcaaggagtggcatattgatgtgtgcactcatatcctttaattcaggataccactggttcagtcaaattgtgggagatcacccggggtgctgttattgaagactttggcaaggtttcatttgaggataagaaaaaggagttgtttgagatggtaagcatacctgcttggttcaccatggatgctcgattaggatgcttgtctgtccacctggatactccacaatgcttttctgcagaaatatatgcagttgatctaaatgtttctggagcacaagaagatctcaagattaatttggctcatgataccctttgtggcttgctagttcattggagtaaaagaaagcagaaatctagttcgcatggcttgcctaatggtgatagttcaatagggaaagatgttccgtcaaaagactcgcaccgatcaagaactgagaaggttctagtggagggccttggagaaagagaattactgatttggatggaaccgaaggtgatctaccttggtggtgtgtggactgtgttactcacaatcgatatccaaaggaaaatacaaagtgtggcttttatttacatcctgctgaaggttcgcctgcgccaaacataactcaagggaagcttagtgctccacggatattacgaattcacaaggttgctaactatgtggttgagaaactcgttcttgacaaaccattggatggaggctctgatagtacgtttgttatgggattgagttctgctcaatcacagctctcacagctagatagttcttcgcggcttggactaaagccatggcaaaaaacaaagccatgtattgaggtattgtgcaataaccaggttctatcaccagatatgagtttggctacagtgcgaacatatatatggaagaagccggaagatttgattcttcattatagagtggtccaatcgagatgatcacggcttcagatgtacatgctcacatggttctccagatatgtcccagcatgtccgcacctttagatggtgtggttgaagatgcctttggcttagagaggaagcatcatcttcacagaggaaatattttgctcttgctccgccctccccccggtagctgttcccagaatcgacttgttcgcttctctgtaaagttcctgaccttgccctggtagtaagatgtatcatagcacaggtataaggctctctgctggctgccgagcttgtaaatgtagaagattaggtgcttaataaaagatcgaaaggatatgttttttctttcgtttttctttgacagcatttgtaagaaaaaaaaagaggctgacgctcggcccagatcgtggcgctccgacgtcgattattggatttaaccccgccgatccccttggaggtgtttggttgagaccagggtaagaggtggacgggaacccgggaacaataaagctgtttttgggacatgttgatgtcgggagctactttacctctcatccttcaacaattgttctatatactctatagggctattttagttttttttgttttttgctagcgagaaatcagaaataaatgattgctttgttttgataatcaaagctgttggatcatggtctcatggatgtgtcccctccccactgataatctgatatacattttgatctggacggtgtgtgattcggtggcagctaggacagcgtgtcgcattg

SEQ ID NO: 30660 - DNA, 3245 bp, Zea Mays
gccaactacacgacacaacctgccttccttggttcctccaccccgtcctcccctgtcccgtcgcgtcagccactcgccgcggccaactaccgccgccgctgttgcagccgcccatctgcttccatcgcgtcgcggaggccgctcgcttcgccgccgcacgctccgctcttccggtgccctcctccgggaccctcggccacgccgcgtcgccttaaaccctagatctgcgctccccgcccccgcgctggccgcggccgcgtactgacgccggcacgctgccgatctccatacgtcgctcgatcccaggtttagctgcttcgaatttagataagtttcttccatgcatcgtgttggaagtgctggtaacacggctggctcgactcgaccgagaaaggagaagcgcttcacatatgtgctcaatgatgctgatgataaaaagcattgtgcaggaatcaattgcatggcttatctaaatggttctacatttagtacaagtgattacctttttagcgggagtcgtgatggtaccttgaaaagatgggaattaaataatggggatgcaagtttctcagcaacttttgagtctcatgttgattgggttaatgatgccattatagttggagaaaagcttgtttcctgttcctcagacaccacaataaaggtctggaattgcttctccgatggtgcttgtaccaggactttccgccagcattctgattatgtgatttgtcttgctgctgctgagaagaatagcaatattgtagcctctggtggtcttggtggtgaggtttttgtttgggaccttgatgctgctcttgctcctgtagccaaatctgtggacgcaaaagaagacgaggttcctaatggaaactcagggcctcctttgacaacattgtgcagtgtaaattctagtagcaatattgcttcctctaatagtcaatcacatgggtacagtccaattgctgccaaaggtcacaaagattcagtttacgcattggctatgaatgatacaggaactcttcttctctctggtggcactgaaaaggttgtccgggtgtgggatccgaggacaggttcaaaaaacatgaaattgagggggcacactgacaatatcagggccttacttgttgattctacagggaggtattgcctatcaggatcatctgattcgatgataagactatgggatctaggacaacagcgttgtgttcattcttatgctgtgcatactgattcagtttgggcgcttgcaaccactcattcgtttggtcatgtctacagtggtggaagagaccaatctgtatacctaacagacttatccacaagagagagtgttttactttgcacaaatgaatgccctattctacagttgtctctgcaagatgacacaatatgggtggcaacaactgattcttctgtatatggatggccagctgaagggctcacaccccaaaaggttttccaaaagggtggctcattcttagctgggaatttgtcattctcaagggcaagagcttctttagaaggatcagcacctgtccctgtatacaaagagccatcttttgtcgtcccaggggttccagcaatagttcaacatgaaataatgaataatagaaggcatgtactgacaaaggataccactggttcagtcaaattgtgggagatcacccggggtgctgttattgaagactttggcaaggtttcatttgaggataagaaaaaggagttgtttgagatggtaagcatacctgcttggttcaccatggatgctcgattaggatgcttgtctgtccacctggatactccacaatgcttttctgcagaaatatatgcagttgatctaaatgtttctggagcacaagaagatctcaagattaatttggctcatgataccctttgtggcttgctagttcattggagtaaaagaaagcagaaatctagttcgcatggcttgcctaatggtgatagttcaatagggaaagatgttccgtcaaaagactcgcaccgatcaagaactgagaaggttctagtggagggccttggagaaagagaattactgatttggatggaaccgaaggtgatctaccttggtggtgtgtggactgtgttactcacaatcgatatccaaaggaaaatacaaagtgtggcttttatttacatcctgctgaaggttcgcctgcgccaaacataactcaagggaagcttagtgctccacggatattacgaattcacaaggttgctaactatgtggttgagaaactcgttcttgacaaaccattggatggaggctctgatagtacgtttgttatgggattgagttctgctcaatcacagctctcacagctagatagttcttcgcggcttggactaaagccatggcaaaaaacaaagccatgtattgaggttctatcaccagatatgagtttggctacagtgcgaacatatatatggaagaagccggaagatttgattcttcattatagagtggtccaatcgagatgatcacggcttcagatgtacatgctcacatggttctccagatatgtcccagcatgtccgcacctttagatggtgtggttgaagatgcctttggcttagagaggaagcatcatcttcacagaggaaatattttgctcttgctccgccctccccccggtagctgttcccagaatcgacttgttcgcttctctgtaaagttcctgaccttgccctggtagtaagatgtatcatagcacaggtataaggctctctgctggctgccgagcttgtaaatgtagaagattaggtgcttaataaaagatcgaaaggatatgttttttctttcgtttttctttgacagcatttgtaagaaaaaaaaagaggctgacgctcggcccagatcgtggcgctccgacgtcgattattggatttaaccccgccgatccccttggaggtgtttggttgagaccagggtaagaggtggacgggaacccgggaacaataaagctgtttttgggacatgttgatgtcgggagctactttacctctcatccttcaacaattgttctatatactctatagggctattttagttttttttgttttttgctagcgagaaatcagaaataaatgattgctttgttttgataatcaaagctgttggatcatggtctcatggatgtgtcccctccccactgataatctgatatacattttgatctggacggtgtgtgattcggtggcagctaggacagcgtgtcgcattg

SEQ ID NO: 30661 - DNA, 2842 bp, Zea Mays
cagccgcacacacgttcttgaggttcggcggcggcgcgtccttcagattcagcggcttcgtgcccttggcggacgctgaggctgccattggcaggcactgaggacccaggtgggtgtgcagcattgggcagacaccggcacaggcagacaccggcatggccgcgtgggcggacatcgaggcggccggttaatgatgccattatagttggagaaaagcttgtttcctgttcctcagacaccacaataaaggtctggaattgcttctccgatggtgcttgtaccaggactttccgccagcattctgattatgtgatttgtcttgctgctgctgagaagaatccaaatctgtggacgcaaaagaagacgaggttcctaatggaaactcagggcctcctttgacaacattgtgcagtgtaaattctagtagcaatattgcttcctctaatagtcaatcacatgggtacagtccaattgctgccaaaggtcacaaagattcagtttacgcattggctatgaatgatacaggaactcttcttctctctggtggcactgaaaaggttgtccgggtgtgggatccgaggacaggttcaaaaaacatgaaattgagggggcacactgacaatatcagggccttacttgttgattctacagggaggtattgcctatcaggatcatctgattcgatgataagactatgggatctaggacaacagcgttgtgttcattcttatgctgtgcatactgattcagtttgggcgcttgcaaccactcattcgtttggtcatgtctacagtggtggaagagaccaatctgtatacctaacagacttatccacaagagagagtgttttactttgcacaaatgaatgccctattctacagttgtctctgcaagatgacacaatatgggtggcaacaactgattcttctgtatatggatggccagctgaagggctcacaccccaaaaggttttccaaaagggtggctcattcttagctgggaatttgtcattctcaagggcaagagcttctttagaaggatcagcacctgtccctgtatacaaagagccatcttttgtcgtcccaggggttccagcaatagttcaacatgaaataatgaataatagaaggcatgtactgacaaaggataccactggttcagtcaaattgtgggagatcacccggggtgctgttattgaagactttggcaaggtttcatttgaggataagaaaaaggagttgtttgagatggtaagcatacctgcttggttcaccatggatgctcgattaggatgcttgtctgtccacctggatactccacaatgcttttctgcagaaatatatgcagttgatctaaatgtttctggagcacaagaagatctcaagattaatttggctcatgataccctttgtggcttgctagttcattggagtaaaagaaagcagaaatctagttcgcatggcttgcctaatggtgatagttcaatagggaaagatgttccgtcaaaagactcgcaccgatcaagaactgaggtggatgacacaactgaaaaccacacaactcatgtgctcccatcatttgagttttctacagtttcacctccatcaattatcacagaaggttctagtggagggccttggagaaagagaattactgatttggatggaaccgaaggtgatctaccttggtggtgtgtggactgtgttactcacaatcgatatccaaaggaaaatacaaagtgtggcttttatttacatcctgctgaaggttcgcctgcgccaaacataactcaagggaagcttagtgctccacggatattacgaattcacaaggttgctaactatgtggttgagaaactcgttcttgacaaaccattggatggaggctctgatagtacgtttgttatgggattgagttctgctcaatcacagctctcacagctagatagttcttcgcggcttggactaaagccatggcaaaaaacaaagccatgtattgaggttctatcaccagatatgagtttggctacagtgcgaacatatatatggaagaagccggaagatttgattcttcattatagagtggtccaatcgagatgatcacggcttcagatgtacatgctcacatggttctccagatatgtcccagcatgtccgcacctttagatggtgtggttgaagatgcctttggcttagagaggaagcatcatcttcacagaggaaatattttgctcttgctccgccctccccccggtagctgttcccagaatcgacttgttcgcttctctgtaaagttcctgaccttgccctggtagtaagatgtatcatagcacaggtataaggctctctgctggctgccgagcttgtaaatgtagaagattaggtgcttaataaaagatcgaaaggatatgttttttctttcgtttttctttgacagcatttgtaagaaaaaaaaagaggctgacgctcggcccagatcgtggcgctccgacgtcgattattggatttaaccccgccgatccccttggaggtgtttggttgagaccagggtaagaggtggacgggaacccgggaacaataaagctgtttttgggacatgttgatgtcgggagctactttacctctcatccttcaacaattgttctatatactctatagggctattttagttttttttgttttttgctagcgagaaatcagaaataaatgattgctttgttttgataatcaaagctgttggatcatggtctcatggatgtgtcccctccccactgataatctgatatacattttgatctggacggtgtgtgattcggtggcagctaggacagcgtgtcgcattg

SEQ ID NO: 30662 - DNA, 2680 bp, Zea Mays
aaaaactccactagatgcctcttgtttctaaaccttggttttgcacatcaatgcatcaatcagtgttattaaaactacgtttaaacgtcaaaactctaatcagagattgaaaccgtgttttggcgttctaaactgtaaaacacagtttcatgcgttttagaccattatctacttttgggcccagtctgttagttaattttgggtccaatctggcccagtctccacacgcttgccctactcccctaccctgaagcccaatgactagtagcacactgctctgctctctatcgtcaccgccgcctgaaggtattgttgccttgttcctgtcgtctgctgcacctgtgcgccctctccctccgcgccgtgccgctcctctccctccgcgctgccctctctctccatgcctctgtttgctagcagccggtagccagcacccagcaatcgactcctctcatcctctctgctctctgttttggtattgcctatcaggatcatctgattcgatgataagactatgggatctaggacaacagcgttgtgttcattcttatgctgtgcatactgattcagtttgggcgcttgcaaccactcattcgtttggtcatgtctacagtggtggaagagaccaatctgtatacctaacagacttatccacaagagagagtgttttactttgcacaaatgaatgccctattctacagttgtctctgcaagatgacacaatatgggtggcaacaactgattcttctgtatatggatggccagctgaagggctcacaccccaaaaggttttccaaaagggtggctcattcttagctgggaatttgtcattctcaagggcaagagcttctttagaaggatcagcacctgtccctgtatacaaagagccatcttttgtcgtcccaggggttccagcaatagttcaacatgaaataatgaataatagaaggcatgtactgacaaaggataccactggttcagtcaaattgtgggagatcacccggggtgctgttattgaagactttggcaaggtttcatttgaggataagaaaaaggagttgtttgagatggtaagcatacctgcttggttcaccatggatgctcgattaggatgcttgtctgtccacctggatactccacaatgcttttctgcagaaatatatgcagttgatctaaatgtttctggagcacaagaagatctcaagattaatttggctcatgataccctttgtggcttgctagttcattggagtaaaagaaagcagaaatctagttcgcatggcttgcctaatggtgatagttcaatagggaaagatgttccgtcaaaagactcgcaccgatcaagaactgaggtggatgacacaactgaaaaccacacaactcatgtgctcccatcatttgagttttctacagtttcacctccatcaattatcacagaaggttctagtggagggccttggagaaagagaattactgatttggatggaaccgaaggtgatctaccttggtggtgtgtggactgtgttactcacaatcgatatccaaaggaaaatacaaagtgtggcttttatttacatcctgctgaaggttcgcctgcgccaaacataactcaagggaagcttagtgctccacggatattacgaattcacaaggttgctaactatgtggttgagaaactcgttcttgacaaaccattggatggaggctctgatagtacgtttgttatgggattgagttctgctcaatcacagctctcacagctagatagttcttcgcggcttggactaaagccatggcaaaaaacaaagccatgtattgaggtattgtgcaataaccaggttctatcaccagatatgagtttggctacagtgcgaacatatatatggaagaagccggaagatttgattcttcattatagagtggtccaatcgagatgatcacggcttcagatgtacatgctcacatggttctccagatatgtcccagcatgtccgcacctttagatggtgtggttgaagatgcctttggcttagagaggaagcatcatcttcacagaggaaatattttgctcttgctccgccctccccccggtagctgttcccagaatcgacttgttcgcttctctgtaaagttcctgaccttgccctggtagtaagatgtatcatagcacaggtataaggctctctgctggctgccgagcttgtaaatgtagaagattaggtgcttaataaaagatcgaaaggatatgttttttctttcgtttttctttgacagcatttgtaagaaaaaaaaagaggctgacgctcggcccagatcgtggcgctccgacgtcgattattggatttaaccccgccgatccccttggaggtgtttggttgagaccagggtaagaggtggacgggaacccgggaacaataaagctgtttttgggacatgttgatgtcgggagctactttacctctcatccttcaacaattgttctatatactctatagggctattttagttttttttgttttttgctagcgagaaatcagaaataaatgattgctttgttttgataatcaaagctgttggatcatggtctcatggatgtgtcccctccccactgataatctgatatacattttgatctggacggtgtgtgattcggtggcagctaggacagcgtgtcgcattg

SEQ ID NO: 30663 - DNA, 3552 bp, Zea Mays
tgctgctcctcgggccccgctgcgccacctggcagtgagggcgagccggacattaaaatccccgcacccacttgacctcttcctcctctctcgcctgctccacccccgccaccacaccgctttgccgctccgatctccgcacgctccggcgagaggggcccactggacagccagctcagtaccctcctacggcgacgctgtcgcacgcgccaccattaggtgtcacccgtccttgcgccgccgcacgcatcccaacgcagccggaccccacggcagccgccgccgctgcggcgaaggcccagcccaggccacgcgcgtcatcctcgcgccgaacgacgcaaggtggagcggcggtccactccccgcgcgcgcttcgcctccgctgcactgaaaccgtgccctgctggtgcgagtgtccggatgctaccaaatcctagggccgggcatcgactgactgactgagtgagtaagggagggagggagggaggagccagggcctcgccgcccgctgaacgagggagtgatgcggcgcggaagctcggccgcatgaggtgcctcgtcggcggcggcgtccaggacagcccgcgtgcagcggccaagagggtgtcgccggcgtcgtggcggctggacaccgccgcggcggaggcggagacgggcgcggggggagcggcggctaaggggccgagggtctgcttcaggccgccggatgtgatggagacggtgcacgaggtggccatttacatccaccgcttccacaacctcgatctgttccagcaaggatggtatcagatgaagattagtgcactgtgggaggaaggtggcaacagaacaccggcttcgcctgccagggtcgtgcaatatgaaggtggattgtgcagcttctgatgttggtggagacgatgcattaggcatttggaaaatagatgatattgataatagcttccacacacagccgttccggatcaagtatgccagacaagatatctatctgtcggttatggtgtctttcaacatattcaacagtgaagaggagggtccagcagcttcagatgtgatgatgaagtttgagctgatatatgccccaacactagacaatgggtctgagcttcatgcttctagtgccacatcttcagcagctgtgcacgaatttaggatcccacacagagcacttctgggtctacactcatactgtcctgttcactttgatgcgttccactctgtgcttgttgatctgacattgcacatagtgtacctgaaagctggtgcagctaaatcatcactgaaggtacacaggtaccagagcaaggtttacgtcctacatcatatcacattgttaaggcattattaacttctagaaaaatgttgcttgaagaactgaacaaaatcagtggtgctattggtaagacagtagaggatttagatgttgctgacttgaatcttggtaaatatgagtcatttaatccatcaaaatcttggctaccgaattctagtaaagtgttccccgaaactggcaaaggtgtgggacagttggctggaattttacatgacttcttggagagacccaacgatatggttaatggtacagatgattctttattgtatactcttccccatgaagagctgtttgaactgtttctaactctgagtggacagctttcacttctatggaatgcattcttgaaatttcataggctaaataaaacaaagatattggactacttgcacgatgcttgggctattggcaggaaggcagaatggtcaatatggactattcactcgaaaattgagatccctcatcgctatctgcagagtatgagtgatgactcaccccaccgttattctcttagagtttctggctcaaggaagttccatgatgaccatgtacagagctctgcttcacgggcggaactacacaggaaaagcatagcacaaatgaagattaatccacattatgttcaagatatgcatatatatggtgatccttcacgtgttcctgttgttcttatagaacaacatgtcatggttgttccacagcatagttccagcaaggatatggcttcaaatgtttctgaacaaaaggatactattgtggtaccgaaactacaaggagagcctctggtacccaaaagtagtgctggtaaaaaaagtggacgcatattgagagctgtcatttttgtgcatggatttcagggtcaccatctggatttacgtcttgttagaaaccaatggcttctattggatcctggagctgactgcctgatgtctgaggctaatgaagataaaacatctggagattttaaagaaatgggtagcaggttggctggggaggtagttgccttcctgaagaagaaaatggataagctttcgagatatggaggctgcaaagagctgaagttaagtttcgtaggtcattccattggaaacgtcatcattagaagtgccctggcagaacctgcattgcaaccatacttgaagaacctttacacttacatgtcaatatcagggcctcacttgggttactggtacagttcaaattctttgttcaattctggactctggctgctgaaaaagctcaagggtgcgcaatgcatccatcaactcactttcagtgatgatcaagacccccagaatacatacttttataagctttgcaagttgaaaacgttggagaacttccaaaatatcatattgctgtcatcaccacaggatggctacgtaccatatcattcagcgagaatcgagctctgcccagctgcatcatcggacacgtcaaagaagggccaagtcttcacagaaatgctgaacaactgcttggaccagatccgcacgccctcgtccgacacccggacattcatgcgctgcgacgtgaatttcgaccagtccaaccaagggcgaagcctgaacaccatgattggcagagcggcccacatcgagttcctggaaaccgacctctacgccaagttcatcatgtggtcctttcccgacctgttccgatgacgacgacgacaccgctcgtctttgtaatactggcacataccaaaccaataacgcacactacccagtactgaccaggcaaggaatactaaagctcgctccaccagaacccaacaccgagacaggcaggaagcactgtgaaggtcctagaagcaatggtttttccagcttgctagatcctattctgtataagtagttgattctttttcatttcattcatagtgctgtagattgcacccttgctgtgaaaatttataatccttgtcgtctgttgtaccttacacttcagtttaggatgtgctgacaatcagtgagcttattatgtccaaataagctctctttttttaacgtttgatttttagtcaccttcgttcttgtggtgctgtaaatcctgcaacatgctttgtacatgcagacgatcaccctgtctgatactagatccggatggtcctgccgtccaggtccagggtgttgtttcagtgtttctgtttgacgaaactgctgtaggaatatataaataatatttttttggttctggcatcctgccgttggtggacc

SEQ ID NO: 30664 - DNA, 3359 bp, Zea Mays
ctcgcctgctccacccccgccaccacaccgctttgccgctccgatctccgcacgctccggcgagaggggcccactggacagccagctcagtaccctcctacggcgacgctgtcgcacgcgccaccattaggtgtcacccgtccttgcgccgccgcacgcatcccaacgcagccggaccccacggcagccgccgccgctgcggcgaaggcccagcccaggccacgcgcgtcatcctcgcgccgaacgacgcaaggtggagcggcggtccactccccgcgcgcgcttcgcctccgctgcactgaaaccgtgccctgctggtgcgagtgtccggatgctaccaaatcctagggccgggcatcgactgactgactgagtgagtaagggagggagggagggaggagccagggcctcgccgcccgctgaacgagggagtgatgcggcgcggaagctcggccgcatgaggtgcctcgtcggcggcggcgtccaggacagcccgcgtgcagcggccaagagggtgtcgccggcgtcgtggcggctggacaccgccgcggcggaggcggagacgggcgcggggggagcggcggctaaggggccgagggtctgcttcaggccgccggatgtgatggagacggtgcacgaggtggccatttacatccaccgcttccacaacctcgatctgttccagcaaggatggtatcagatgaagattagtgcactgtgggaggaaggtggcaacagaacaccggcttcgcctgccagggtcgtgcaatatgaagcttctgatgttggtggagacgatgcattaggcatttggaaaatagatgatattgataatagcttccacacacagccgttccggatcaagtatgccagacaagatatctatctgtcggttatggtgtctttcaacatattcaacagtgaagaggagggtccagcagcttcagatgtgatgatgaagtttgagctgatatatgccccaacactagacaatgggtctgagcttcatgcttctagtgccacatcttcagcagctgtgcacgaatttaggatcccacacagagcacttctgggtctacactcatactgtcctgttcactttgatgcgttccactctgtgcttgttgatctgacattgcacatagtgtacctgaaagctggtgcagctaaatcatcactgaaggtacacaggtaccagagcaaggtttacgtcctacatcatatcacattgttaaggcattattaacttctagaaaaatgttgcttgaagaactgaacaaaatcagtggtgctattgtaaagtgttccccgaaactggcaaaggtgtgggacagttggctggaattttacatgacttcttggagagacccaacgatatggttaatggtacagatgattctttattgtatactcttccccatgaagagctgtttgaactgtttctaactctgagtggacagctttcacttctatggaatgcattcttgaaatttcataggctaaataaaacaaagatattggactacttgcacgatgcttgggctattggcaggaaggcagaatggtcaatatggactattcactcgaaaattgagatccctcatcgctatctgcagagtatgagtgatgactcaccccaccgttattctcttagagtttctggctcaaggaagttccatgatgaccatgtacagagctctgcttcacgggcggaactacacaggaaaagcatagcacaaatgaagattaatccacattatgttcaagatatgcatatatatggtgatccttcacgtgttcctgttgttcttatagaacaacatgtcatggttgttccacagcatagttccagcaaggatatggcttcaaatgtttctgaacaaaaggatactattgtggtaccgaaactacaaggagagcctctggtacccaaaagtagtgctggtaaaaaaagtggacgcatattgagagctgtcatttttgtgcatggatttcagggtcaccatctggatttacgtcttgttagaaaccaatggcttctattggatcctggagctgactgcctgatgtctgaggctaatgaagataaaacatctggagattttaaagaaatgggtagcaggttggctggggaggtagttgccttcctgaagaagaaaatggataagctttcgagatatggaggctgcaaagagctgaagttaagtttcgtaggtcattccattggaaacgtcatcattagaagtgccctggcagaacctgcattgcaaccatacttgaagaacctttacacttacatgtcaatatcagggcctcacttgggttactggtacagttcaaattctttgttcaattctggactctggctgctgaaaaagctcaagggtgcgcaatgcatccatcaactcactttcagtgatgatcaagacccccagaatacatacttttataagctttgcaagttgaaaacgttggagaacttccaaaatatcatattgctgtcatcaccacaggatggctacgtaccatatcattcagcgagaatcgagctctgcccagctgcatcatcggacacgtcaaagaagggccaagtcttcacagaaatgctgaacaactgcttggaccagatccgcacgccctcgtccgacacccggacattcatgcgctgcgacgtgaatttcgaccagtccaaccaagggcgaagcctgaacaccatgattggcagagcggcccacatcgagttcctggaaaccgacctctacgccaagttcatcatgtggtcctttcccgacctgttccgatgacgacgacgacaccgctcgtctttgtaatactggcacataccaaaccaataacgcacactacccagtactgaccaggcaaggaatactaaagctcgctccaccagaacccaacaccgagacaggcaggaagcactgtgaaggtcctagaagcaatggtttttccagcttgctagatcctattctgtataagtagttgattctttttcatttcattcatagtgctgtagattgcacccttgctgtgaaaatttataatccttgtcgtctgttgtaccttacacttcagtttaggatgtgctgacaatcagtgagcttattatgtccaaataagctctctttttttaacgtttgatttttagtcaccttcgttcttgtggtgctgtaaatcctgcaacatgctttgtacatgcagacgatcaccctgtctgatactagatccggatggtcctgccgtccaggtccagggtgttgtttcagtgtttctgtttgacgaaactgctgtaggaatatataaataatatttttttggttctggcatcctgccgttggtggacc

SEQ ID NO: 30665 - DNA, 3243 bp, Zea Mays
ctccacccccgccaccacaccgctttgccgctccgatctccgcacgctccggcgagaggggcccactggacagccagctcagtaccctcctacggcgacgctgtcgcacgcgccaccattaggtgtcacccgtccttgcgccgccgcacgcatcccaacgcagccggaccccacggcagccgccgccgctgcggcgaaggcccagcccaggccacgcgcgtcatcctcgcgccgaacgacgcaaggtggagcggcggtccactccccgcgcgcgcttcgcctccgctgcactgaaaccgtgccctgctggtgcgagtgtccggatgctaccaaatcctagggccgggcatcgactgactgactgagtgagtaagggagggagggagggaggagccagggcctcgccgcccgctgaacgagggagtgatgcggcgcggaagctcggccgcatgaggtgcctcgtcggcggcggcgtccaggacagcccgcgtgcagcggccaagagggtgtcgccggcgtcgtggcggctggacaccgccgcggcggaggcggagacgggcgcggggggagcggcggctaaggggccgagggtctgcttcaggccgccggatgtgatggagacggtgcacgaggtggccatttacatccaccgcttccacaacctcgatctgttccagcaaggatggtatcagatgaagattagtgcactgtgggaggaaggtggcaacagaacaccggcttcgcctgccagggtcgtgcaatatgaagcttctgatgttggtggagacgatgcattaggcatttggaaaatagatgatattgataatagcttccacacacagccgttccggatcaagtatgccagacaagatatctatctgtcggttatggtgtctttcaacatattcaacagtgaagaggagggtccagcagcttcagatgtgatgatgaagtttgagctgatatatgccccaacactagacaatgggtaccagagcaaggtttacgtcctacatcatatcacattgttaaggcattattaacttctagaaaaatgttgcttgaagaactgaacaaaatcagtggtgctattggtaagacagtagaggatttagatgttgctgacttgaatcttggtaaatatgagtcatttaatccatcaaaatcttggctaccgaattctagtaaagtgttccccgaaactggcaaaggtgtgggacagttggctggaattttacatgacttcttggagagacccaacgatatggttaatggtacagatgattctttattgtatactcttccccatgaagagctgtttgaactgtttctaactctgagtggacagctttcacttctatggaatgcattcttgaaatttcataggctaaataaaacaaagatattggactacttgcacgatgcttgggctattggcaggaaggcagaatggtcaatatggactattcactcgaaaattgagatccctcatcgctatctgcagagtatgagtgatgactcaccccaccgttattctcttagagtttctggctcaaggaagttccatgatgaccatgtacagagctctgcttcacgggcggaactacacaggaaaagcatagcacaaatgaagattaatccacattatgttcaagatatgcatatatatggtgatccttcacgtgttcctgttgttcttatagaacaacatgtcatggttgttccacagcatagttccagcaaggatatggcttcaaatgtttctgaacaaaaggatactattgtggtaccgaaactacaaggagagcctctggtacccaaaagtagtgctggtaaaaaaagtggacgcatattgagagctgtcatttttgtgcatggatttcagggtcaccatctggatttacgtcttgttagaaaccaatggcttctattggatcctggagctgactgcctgatgtctgaggctaatgaagataaaacatctggagattttaaagaaatgggtagcaggttggctggggaggtagttgccttcctgaagaagaaaatggataagctttcgagatatggaggctgcaaagagctgaagttaagtttcgtaggtcattccattggaaacgtcatcattagaagtgccctgaacctgcattgcaaccatacttgaagaacctttacacttacatgtcaatatcagggcctcacttgggttactggtacagttcaaattctttgttcaattctggactctggctgctgaaaaagctcaagggtgcgcaatgcatccatcaactcactttcagtgatgatcaagacccccagaatacatacttttataagctttgcaagttgaaaacgttggagaacttccaaaatatcatattgctgtcatcaccacaggatggctacgtaccatatcattcagcgagaatcgagctctgcccagctgcatcatcggacacgtcaaagaagggccaagtcttcacagaaatgctgaacaactgcttggaccagatccgcacgccctcgtccgacacccggacattcatgcgctgcgacgtgaatttcgaccagtccaaccaagggcgaagcctgaacaccatgattggcagagcggcccacatcgagttcctggaaaccgacctctacgccaagttcatcatgtggtcctttcccgacctgttccgatgacgacgacgacaccgctcgtctttgtaatactggcacataccaaaccaataacgcacactacccagtactgaccaggcaaggaatactaaagctcgctccaccagaacccaacaccgagacaggcaggaagcactgtgaaggtcctagaagcaatggtttttccagcttgctagatcctattctgtataagtagttgattctttttcatttcattcatagtgctgtagattgcacccttgctgtgaaaatttataatccttgtcgtctgttgtaccttacacttcagtttaggatgtgctgacaatcagtgagcttattatgtccaaataagctctctttttttaacgtttgatttttagtcaccttcgttcttgtggtgctgtaaatcctgcaacatgctttgtacatgcagacgatcaccctgtctgatactagatccggatggtcctgccgtccaggtccagggtgttgtttcagtgtttctgtttgacgaaactgctgtaggaatatataaataatatttttttggttctggcatcctgccgttggtggacc

SEQ ID NO: 30666 - DNA, 3453 bp, Zea Mays
ctccacccccgccaccacaccgctttgccgctccgatctccgcacgctccggcgagaggggcccactggacagccagctcagtaccctcctacggcgacgctgtcgcacgcgccaccattaggtgtcacccgtccttgcgccgccgcacgcatcccaacgcagccggaccccacggcagccgccgccgctgcggcgaaggcccagcccaggccacgcgcgtcatcctcgcgccgaacgacgcaaggtggagcggcggtccactccccgcgcgcgcttcgcctccgctgcactgaaaccgtgccctgctggtgcgagtgtccggatgctaccaaatcctagggccgggcatcgactgactgactgagtgagtaagggagggagggagggaggagccagggcctcgccgcccgctgaacgagggagtgatgcggcgcggaagctcggccgcatgaggtgcctcgtcggcggcggcgtccaggacagcccgcgtgcagcggccaagagggtgtcgccggcgtcgtggcggctggacaccgccgcggcggaggcggagacgggcgcggggggagcggcggctaaggggccgagggtctgcttcaggccgccggatgtgatggagacggtgcacgaggtggccatttacatccaccgcttccacaacctcgatctgttccagcaaggatggtatcagatgaagattagtgcactgtgggaggaaggtggcaacagaacaccggcttcgcctgccagggtcgtgcaatatgaagcttctgatgttggtggagacgatgcattaggcatttggaaaatagatgatattgataatagcttccacacacagccgttccggatcaagtatgccagacaagatatctatctgtcggttatggtgtctttcaacatattcaacagtgaagaggagtctgttatatttgtttaagggtccagcagcttcagatgtgatgatgaagtttgagctgatatatgccccaacactagacaatgggtctgagcttcatgcttctagtgccacatcttcagcagctgtgcacgaatttaggatcccacacagagcacttctgggtctacactcatactgtcctgttcactttgatgcgttccactctgtgcttgttgatctgacattgcacatagtgtacctgaaagctggtgcagctaaatcatcactgaaggtaccagagcaaggtttacgtcctacatcatatcacattgttaaggcattattaacttctagaaaaatgttgcttgaagaactgaacaaaatcagtggtgctattggtaagacagtagaggatttagatgttgctgacttgaatcttggtaaatatgagtcatttaatccatcaaaatcttggctaccgaattctagtaaagtgttccccgaaactggcaaaggtgtgggacagttggctggaattttacatgacttcttggagagacccaacgatatggttaatggtacagatgattctttattgtatactcttccccatgaagagctgtttgaactgtttctaactctgagtggacagctttcacttctatggaatgcattcttgaaatttcataggctaaataaaacaaagatattggactacttgcacgatgcttgggctattggcaggaaggcagaatggtcaatatggactattcactcgaaaattgagatccctcatcgctatctgcagagtatgagtgatgactcaccccaccgttattctcttagagtttctggctcaaggaagttccatgatgaccatgtacagagctctgcttcacgggcggaactacacaggaaaagcatagcacaaatgaagattaatccacattatgttcaagatatgcatatatatggtgatccttcacgtgttcctgttgttcttatagaacaacatgtcatggttgttccacagcatagttccagcaaggatatggcttcaaatgtttctgaacaaaaggatactattgtggtaccgaaactacaaggagagcctctggtacccaaaagtagtgctggtaaaaaaagtggacgcatattgagagctgtcatttttgtgcatggatttcagggtcaccatctggatttacgtcttgttagaaaccaatggcttctattggatcctggagctgactgcctgatgtctgaggctaatgaagataaaacatctggagattttaaagaaatgggtagcaggttggctggggaggtagttgccttcctgaagaagaaaatggataagctttcgagatatggaggctgcaaagagctgaagttaagtttcgtaggtcattccattggaaacgtcatcattagaagtgccctggcagaacctgcattgcaaccatacttgaagaacctttacacttacatgtcaatatcagggcctcacttgggttactggtacagttcaaattctttgttcaattctggactctggctgctgaaaaagctcaagggtgcgcaatgcatccatcaactcactttcagtgatgatcaagacccccagaatacatacttttataagctttgcaagttgaaaacgttggagaacttccaaaatatcatattgctgtcatcaccacaggatggctacgtaccatatcattcagcgagaatcgagctctgcccagctgcatcatcggacacgtcaaagaagggccaagtcttcacagaaatgctgaacaactgcttggaccagatccgcacgccctcgtccgacacccggacattcatgcgctgcgacgtgaatttcgaccagtccaaccaagggcgaagcctgaacaccatgattggcagagcggcccacatcgagttcctggaaaccgacctctacgccaagttcatcatgtggtcctttcccgacctgttccgatgacgacgacgacaccgctcgtctttgtaatactggcacataccaaaccaataacgcacactacccagtactgaccaggcaaggaatactaaagctcgctccaccagaacccaacaccgagacaggcaggaagcactgtgaaggtcctagaagcaatggtttttccagcttgctagatcctattctgtataagtagttgattctttttcatttcattcatagtgctgtagattgcacccttgctgtgaaaatttataatccttgtcgtctgttgtaccttacacttcagtttaggatgtgctgacaatcagtgagcttattatgtccaaataagctctctttttttaacgtttgatttttagtcaccttcgttcttgtggtgctgtaaatcctgcaacatgctttgtacatgcagacgatcaccctgtctgatactagatccggatggtcctgccgtccaggtccagggtgttgtttcagtgtttctgtttgacgaaactgctgtaggaatatataaataatatttttttggttctggcatcctgccgttggtggacc

SEQ ID NO: 30667 - DNA, 3399 bp, Zea Mays
ctccacccccgccaccacaccgctttgccgctccgatctccgcacgctccggcgagaggggcccactggacagccagctcagtaccctcctacggcgacgctgtcgcacgcgccaccattaggtgtcacccgtccttgcgccgccgcacgcatcccaacgcagccggaccccacggcagccgccgccgctgcggcgaaggcccagcccaggccacgcgcgtcatcctcgcgccgaacgacgcaaggtggagcggcggtccactccccgcgcgcgcttcgcctccgctgcactgaaaccgtgccctgctggtgcgagtgtccggatgctaccaaatcctagggccgggcatcgactgactgactgagtgagtaagggagggagggagggaggagccagggcctcgccgcccgctgaacgagggagtgatgcggcgcggaagctcggccgcatgaggtgcctcgtcggcggcggcgtccaggacagcccgcgtgcagcggccaagagggtgtcgccggcgtcgtggcggctggacaccgccgcggcggaggcggagacgggcgcggggggagcggcggctaaggggccgagggtctgcttcaggccgccggatgtgatggagacggtgcacgaggtggccatttacatccaccgcttccacaacctcgatctgttccagcaaggatggtatcagatgaagattagtgcactgtgggaggaaggtggcaacagaacaccggcttcgcctgccagggtcgtgcaatatgaaggtggattgtgcagcttctgatgttggtggagacgatgcattaggcatttggaaaatagatgatattgataatagcttccacacacagccgttccggatcaagtatgccagacaagatatctatctgtcggttatggtgtctttcaacatattcaacagtgaagaggagggtccagcagcttcagatgtgatgatgaagtttgagctgatatatgccccaacactagacaatgggtctgagcttcatgcttctagtgccacatcttcagcagctgtgcacgaatttaggatcccacacagagcacttctgggtctacactcatactgtcctgttcactttgatgcgttccactctgtgcttgttgatctgacattgcacatagtgtacctgaaagctggtgcagctaaatcatcactgaaggtacacaggtaccagagcaaggtttacgtcctacatcatatcacattgttaaggcattattaacttctagaaaaatgttgcttgaagaactgaacaaaatcagtggtgctattggtaagacagtagaggatttagatgttgctgacttgaatcttggtaaatatgagtcatttaatccatcaaaatcttggctaccgaattctagtaaagtgttccccgaaactggcaaaggtgtgggacagttggctggaattttacatgacttcttggagagacccaacgatatggttaatggtacagatgattctttattgtatactcttccccatgaagagctgtttgaactgtttctaactctgagtggacagctttcacttctatggaatgcattcttgaaatttcataggctaaataaaacaaagatattggactacttgcacgatgcttgggctattggcaggaaggcagaatggtcaatatggactattcactcgaaaattgagatccctcatcgctatctgcagagtatgagtgatgactcaccccaccgttattctcttagagtttctggctcaaggaagttccatgatgaccatgtacagagctctgcttcacgggcggaactacacaggaaaagcatagcacaaatgaagattaatccacattatgttcaagatatgcatatatatggtgatccttcacgtgttcctgttgttcttatagaacaacatgtcatggttgttccacagcatagttccagcaaggatatggcttcaaatgtttctgaacaaaaggatactattgtggtaccgaaactacaaggagagcctctggtacccaaaagtagtgctggtaaaaaaagtggacgcatattgagagctgtcatttttgtgcatggatttcagggtcaccatctggatttacgtcttgttagaaaccaatggcttctattggatcctggagctgactgcctgatgtctgaggctaatgaagataaaacatctggagattttaaagaaatgggtagcaggttggctggggaggtagttgccttcctgaagaagaaaatggataagctttcgagatatggaggctgcaaagagctgaaaacctgcattgcaaccatacttgaagaacctttacacttacatgtcaatatcagggcctcacttgggttactggtacagttcaaattctttgttcaattctggactctggctgctgaaaaagctcaagggtgcgcaatgcatccatcaactcactttcagtgatgatcaagacccccagaatacatacttttataagctttgcaagttgaaaacgttggagaacttccaaaatatcatattgctgtcatcaccacaggatggctacgtaccatatcattcagcgagaatcgagctctgcccagctgcatcatcggacacgtcaaagaagggccaagtcttcacagaaatgctgaacaactgcttggaccagatccgcacgccctcgtccgacacccggacattcatgcgctgcgacgtgaatttcgaccagtccaaccaagggcgaagcctgaacaccatgattggcagagcggcccacatcgagttcctggaaaccgacctctacgccaagttcatcatgtggtcctttcccgacctgttccgatgacgacgacgacaccgctcgtctttgtaatactggcacataccaaaccaataacgcacactacccagtactgaccaggcaaggaatactaaagctcgctccaccagaacccaacaccgagacaggcaggaagcactgtgaaggtcctagaagcaatggtttttccagcttgctagatcctattctgtataagtagttgattctttttcatttcattcatagtgctgtagattgcacccttgctgtgaaaatttataatccttgtcgtctgttgtaccttacacttcagtttaggatgtgctgacaatcagtgagcttattatgtccaaataagctctctttttttaacgtttgatttttagtcaccttcgttcttgtggtgctgtaaatcctgcaacatgctttgtacatgcagacgatcaccctgtctgatactagatccggatggtcctgccgtccaggtccagggtgttgtttcagtgtttctgtttgacgaaactgctgtaggaatatataaataatatttttttggttctggcatcctgccgttggtggacc

SEQ ID NO: 30668 - DNA, 3340 bp, Zea Mays
ctccacccccgccaccacaccgctttgccgctccgatctccgcacgctccggcgagaggggcccactggacagccagctcagtaccctcctacggcgacgctgtcgcacgcgccaccattaggtgtcacccgtccttgcgccgccgcacgcatcccaacgcagccggaccccacggcagccgccgccgctgcggcgaaggcccagcccaggccacgcgcgtcatcctcgcgccgaacgacgcaaggtggagcggcggtccactccccgcgcgcgcttcgcctccgctgcactgaaaccgtgccctgctggtgcgagtgtccggatgctaccaaatcctagggccgggcatcgactgactgactgagtgagtaagggagggagggagggaggagccagggcctcgccgcccgctgaacgagggagtgatgcggcgcggaagctcggccgcatgaggtgcctcgtcggcggcggcgtccaggacagcccgcgtgcagcggccaagagggtgtcgccggcgtcgtggcggctggacaccgccgcggcggaggcggagacgggcgcggggggagcggcggctaaggggccgagggtctgcttcaggccgccggatgtgatggagacggtgcacgaggtggccatttacatccaccgcttccacaacctcgatctgttccagcaaggatggtatcagatgaagattagtgcactgtgggaggaaggtggcaacagaacaccggcttcgcctgccagggtcgtgcaatatgaagcttctgatgttggtggagacgatgcattaggcatttggaaaatagatgatattgataatagcttccacacacagccgttccggatcaagtatgccagacaagatatctatctgtcggttatggtgtctttcaacatattcaacagtgaagaggagcagcttcagatgtgatgatgaagtttgagctgatatatgccccaacactagacaatgggtctgagcttcatgcttctagtgccacatcttcagcagctgtgcacgaatttaggatcccacacagagcacttctgggtctacactcatactgtcctgttcactttgatgcgttccactctgtgcttgttgatctgacattgcacatagtgtacctgaaagctggtgcagctaaatcatcactgaaggtaccagagcaaggtttacgtcctacatcatatcacattgttaaggcattattaacttctagaaaaatgttgcttgaagaactgaacaaaatcagtggtgctattggtaagacagtagaggatttagatgttgctgacttgaatcttggtaaatatgagtcatttaatccatcaaaatcttggctaccgaattctagtaaagtgttccccgaaactggcaaaggtgtgggacagttggctggaattttacatgacttcttggagagacccaacgatatggttaatggtacagatgattctttattgtatactcttccccatgaagagctgtttgaactgtttctaactctgagtggacagctttcacttctatggaatgcattcttgaaatttcataggctaaataaaacaaagatattggactacttgcacgatgcttgggctattggcaggaaggcagaatggtcaatatggactattcactcgaaaattgagatccctcatcgctatctgcagagtatgagtgatgactcaccccaccgttattctcttagagtttctggctcaaggaagttccatgatgaccatgtacagagctctgcttcacgggcggaactacacaggaaaagcatagcacaaatgaagattaatccacattatgttcaagatatgcatatatatggtgatccttcacgtgttcctgttgttcttatagaacaacatgtcatggttgttccacagcatagttccagcaaggatatggcttcaaatgtttctgaacaaaaggatactattgtggtaccgaaactacaaggagagcctctggtacccaaaagtagtgctggtaaaaaaagtggacgcatattgagagctgtcatttttgtgcatggatttcagggtcaccatctggatttacgtcttgttagaaaccaatggcttctattggatcctggagctgactgcctgatgtctgaggctaatgaagataaaacatctggagattttaaagaaatgggtagcaggttggctggggaggtagttgccttcctgaagaagaaaatggataagctttcgagatatggaggctgcaaagagctgaagttaagtttcgtaggtcattccattggaaacgtcatcattagaagtgccctggcagaacctgcattgcaaccatacttgaagaacctttacacttacatgtcaatatcagggcctcacttgggttactgtgatgatcaagacccccagaatacatacttttataagctttgcaagttgaaaacgttggagaacttccaaaatatcatattgctgtcatcaccacaggatggctacgtaccatatcattcagcgagaatcgagctctgcccagctgcatcatcggacacgtcaaagaagggccaagtcttcacagaaatgctgaacaactgcttggaccagatccgcacgccctcgtccgacacccggacattcatgcgctgcgacgtgaatttcgaccagtccaaccaagggcgaagcctgaacaccatgattggcagagcggcccacatcgagttcctggaaaccgacctctacgccaagttcatcatgtggtcctttcccgacctgttccgatgacgacgacgacaccgctcgtctttgtaatactggcacataccaaaccaataacgcacactacccagtactgaccaggcaaggaatactaaagctcgctccaccagaacccaacaccgagacaggcaggaagcactgtgaaggtcctagaagcaatggtttttccagcttgctagatcctattctgtataagtagttgattctttttcatttcattcatagtgctgtagattgcacccttgctgtgaaaatttataatccttgtcgtctgttgtaccttacacttcagtttaggatgtgctgacaatcagtgagcttattatgtccaaataagctctctttttttaacgtttgatttttagtcaccttcgttcttgtggtgctgtaaatcctgcaacatgctttgtacatgcagacgatcaccctgtctgatactagatccggatggtcctgccgtccaggtccagggtgttgtttcagtgtttctgtttgacgaaactgctgtaggaatatataaataatatttttttggttctggcatcctgccgttggtggacc

SEQ ID NO: 30669 - DNA, 3361 bp, Zea Mays
ctccacccccgccaccacaccgctttgccgctccgatctccgcacgctccggcgagaggggcccactggacagccagctcagtaccctcctacggcgacgctgtcgcacgcgccaccattaggtgtcacccgtccttgcgccgccgcacgcatcccaacgcagccggaccccacggcagccgccgccgctgcggcgaaggcccagcccaggccacgcgcgtcatcctcgcgccgaacgacgcaaggtggagcggcggtccactccccgcgcgcgcttcgcctccgctgcactgaaaccgtgccctgctggtgcgagtgtccggatgctaccaaatcctagggccgggcatcgactgactgactgagtgagtaagggagggagggagggaggagccagggcctcgccgcccgctgaacgagggagtgatgcggcgcggaagctcggccgcatgaggtgcctcgtcggcggcggcgtccaggacagcccgcgtgcagcggccaagagggtgtcgccggcgtcgtggcggctggacaccgccgcggcggaggcggagacgggcgcggggggagcggcggctaaggggccgagggtctgcttcaggccgccggatgtgatggagacggtgcacgaggtggccatttacatccaccgcttccacaacctcgatctgttccagcaaggatggtatcagatgaagattagtgcactgtgggaggaaggtggcaacagaacaccggcttcgcctgccagggtcgtgcaatatgaaggtggattgtgcagcttctgatgttggtggagacgatgcattaggcatttggaaaatagatgatattgataatagcttccacacacagccgttccggatcaagtatgccagacaagatatctatctgtcggttatggtgtctttcaacatattcaacagtgaagaggagcagcttcagatgtgatgatgaagtttgagctgatatatgccccaacactagacaatgggtctgagcttcatgcttctagtgccacatcttcagcagctgtgcacgaatttaggatcccacacagagcacttctgggtctacactcatactgtcctgttcactttgatgcgttccactctgtgcttgttgatctgacattgcacatagtgtacctgaaagctggtgcagctaaatcatcactgaaggtacacaggtaccagagcaaggtttacgtcctacatcatatcacattgttaaggcattattaacttctagaaaaatgttgcttgaagaactgaacaaaatcagtggtgctattggtaataaagtgttccccgaaactggcaaaggtgtgggacagttggctggaattttacatgacttcttggagagacccaacgatatggttaatggtacagatgattctttattgtatactcttccccatgaagagctgtttgaactgtttctaactctgagtggacagctttcacttctatggaatgcattcttgaaatttcataggctaaataaaacaaagatattggactacttgcacgatgcttgggctattggcaggaaggcagaatggtcaatatggactattcactcgaaaattgagatccctcatcgctatctgcagagtatgagtgatgactcaccccaccgttattctcttagagtttctggctcaaggaagttccatgatgaccatgtacagagctctgcttcacgggcggaactacacaggaaaagcatagcacaaatgaagattaatccacattatgttcaagatatgcatatatatggtgatccttcacgtgttcctgttgttcttatagaacaacatgtcatggttgttccacagcatagttccagcaaggatatggcttcaaatgtttctgaacaaaaggatactattgtggtaccgaaactacaaggagagcctctggtacccaaaagtagtgctggtaaaaaaagtggacgcatattgagagctgtcatttttgtgcatggatttcagggtcaccatctggatttacgtcttgttagaaaccaatggcttctattggatcctggagctgactgcctgatgtctgaggctaatgaagataaaacatctggagattttaaagaaatgggtagcaggttggctggggaggtagttgccttcctgaagaagaaaatggataagctttcgagatatggaggctgcaaagagctgaagttaagtttcgtaggtcattccattggaaacgtcatcattagaagtgccctggcagaacctgcattgcaaccatacttgaagaacctttacacttacatgtcaatatcagggcctcacttgggttactggtacagttcaaattctttgttcaattctggactctggctgctgaaaaagctcaagggtgcgcaatgcatccatcaactcactttcagtgatgatcaagacccccagaatacatacttttataagctttgcaagttgaaaacgttggagaacttccaaaatatcatattgctgtcatcaccacaggatggctacgtaccatatcattcagcgagaatcgagctctgcccagctgcatcatcggacacgtcaaagaagggccaagtcttcacagaaatgctgaacaactgcttggaccagatccgcacgccctcgtccgacacccggacattcatgcgctgcgacgtgaatttcgaccagtccaaccaagggcgaagcctgaacaccatgattggcagagcggcccacatcgagttcctggaaaccgacctctacgccaagttcatcatgtggtcctttcccgacctgttccgatgacgacgacgacaccgctcgtctttgtaatactggcacataccaaaccaataacgcacactacccagtactgaccaggcaaggaatactaaagctcgctccaccagaacccaacaccgagacaggcaggaagcactgtgaaggtcctagaagcaatggtttttccagcttgctagatcctattctgtataagtagttgattctttttcatttcattcatagtgctgtagattgcacccttgctgtgaaaatttataatccttgtcgtctgttgtaccttacacttcagtttaggatgtgctgacaatcagtgagcttattatgtccaaataagctctctttttttaacgtttgatttttagtcaccttcgttcttgtggtgctgtaaatcctgcaacatgctttgtacatgcagacgatcaccctgtctgatactagatccggatggtcctgccgtccaggtccagggtgttgtttcagtgtttctgtttgacgaaactgctgtaggaatatataaataatatttttttggttctggcatcctgccgttggtggacc

SEQ ID NO: 30670 - DNA, 3532 bp, Zea Mays
ctccacccccgccaccacaccgctttgccgctccgatctccgcacgctccggcgagaggggcccactggacagccagctcagtaccctcctacggcgacgctgtcgcacgcgccaccattaggtgtcacccgtccttgcgccgccgcacgcatcccaacgcagccggaccccacggcagccgccgccgctgcggcgaaggcccagcccaggccacgcgcgtcatcctcgcgccgaacgacgcaaggtggagcggcggtccactccccgcgcgcgcttcgcctccgctgcactgaaaccgtgccctgctggtgcgagtgtccggatgctaccaaatcctagggccgggcatcgactgactgactgagtgagtaagggagggagggagggaggagccagggcctcgccgcccgctgaacgagggagtgatgcggcgcggaagctcggccgcatgaggtgcctcgtcggcggcggcgtccaggacagcccgcgtgcagcggccaagagggtgtcgccggcgtcgtggcggctggacaccgccgcggcggaggcggagacgggcgcggggggagcggcggctaaggggccgagggtctgcttcaggccgccggatgtgatggagacggtgcacgaggtggccatttacatccaccgcttccacaacctcgatctgttccagcaaggatggtatcagatgaagattagtgcactgtgggaggaaggtggcaacagaacaccggcttcgcctgccagggtcgtgcaatatgaagcttctgatgttggtggagacgatgcattaggcatttggaaaatagatgatattgataatagcttccacacacagccgttccggatcaagtatgccagacaagatatctatctgtcggttatggtgtctttcaacatattcaacagtgaagaggagggtccagcagcttcagatgtgatgatgaagtttgagctgatatatgccccaacactagacaatgggtctgagcttcatgcttctagtgccacatcttcagcagctgtgcacgaatttaggatcccacacagagcacttctgggtctacactcatactgtcctgttcactttgatgcgttccactctgtgcttgttgatctgacattgcacatagtgtacctgaaagctggtgcagctaaatcatcactgaaggtacacaggtaccagagcaaggtttacgtcctacatcatatcacattgttaaggcattattaacttctagaaaaatgttgcttgaagaactgaacaaaatcagtggtgctattggtaagacagtagaggatttagatgttgctgacttgaatcttggtaaatatgagtcatttaatccatcaaaatcttggctaccgaattctagtaaagtgttccccgaaactggcaaaggtgtgggacagttggctggaattttacatgacttcttggagagacccaacgatatggttaatggtacagatgattctttattgtatactcttccccatgaagagctgtttgaactgtttctaactctgagtggacagctttcacttctatggaatgcattcttgaaatttcataggctaaataaaacaaagatattggactacttgcacgatgcttgggctattggcaggaaggcagaatggtcaatatggactattcactcgaaaattgagatccctcatcgctatctgcagagtatgagtgatgactcaccccaccgttattctcttagagtttctggctcaaggaagttccatgatgaccatgtacagagctctgcttcacgggcggaactacacaggaaaagcatagcacaaatgaagattaatccacattatgttcaagatatgcatatatatggtgatccttcacgtgttcctgttgttcttatagaacaacatgtcatggttgttccacagcatagttccagcaaggatatggcttcaaatgtttctgaacaaaaggatactattgtggtaccgaaactacaaggagagcctctggtacccaaaagtagtgctggtaaaaaaagtggacgcatattgagagctgtcatttttgtgcatggatttcagggtcaccatctggatttacgtcttgttagaaaccaatggcttctattggatcctggagctgactgcctgatgtctgaggctaatgaagataaaacatctggagattttaaagaaatgggtagcaggttggctggggaggtagttgccttcctgaagaagaaaatggataagctttcgagatatggaggctgcaaagagctgaaaacctgcattgcaaccatacttgaagaacctttacacttacatgtcaatatcagggcctcacttgggttactggtacagttcaaattctttgttcaattctggactctggctgctgaaaaagctcaagggtgcgcaatgcatccatcaactcactttcagtgatgatcaagacccccagaatacatacttttataagctttgcaagttgaaaacgttggagaacttccaaaatatcatattgctgtcatcaccacaggttattccctttcctcatctctaatagcaatttacttgcgtgtggaatttgttttgctgcaataaataactgggactctatagtccttatagcagcatgtcatgacttgtgagctatgccctatgcacacctttgtgttcttccaggatggctacgtaccatatcattcagcgagaatcgagctctgcccagctgcatcatcggacacgtcaaagaagggccaagtcttcacagaaatgctgaacaactgcttggaccagatccgcacgccctcgtccgacacccggacattcatgcgctgcgacgtgaatttcgaccagtccaaccaagggcgaagcctgaacaccatgattggcagagcggcccacatcgagttcctggaaaccgacctctacgccaagttcatcatgtggtcctttcccgacctgttccgatgacgacgacgacaccgctcgtctttgtaatactggcacataccaaaccaataacgcacactacccagtactgaccaggcaaggaatactaaagctcgctccaccagaacccaacaccgagacaggcaggaagcactgtgaaggtcctagaagcaatggtttttccagcttgctagatcctattctgtataagtagttgattctttttcatttcattcatagtgctgtagattgcacccttgctgtgaaaatttataatccttgtcgtctgttgtaccttacacttcagtttaggatgtgctgacaatcagtgagcttattatgtccaaataagctctctttttttaacgtttgatttttagtcaccttcgttcttgtggtgctgtaaatcctgcaacatgctttgtacatgcagacgatcaccctgtctgatactagatccggatggtcctgccgtccaggtccagggtgttgtttcagtgtttctgtttgacgaaactgctgtaggaatatataaataatatttttttggttctggcatcctgccgttggtggacc

SEQ ID NO: 30671 - DNA, 3356 bp, Zea Mays
ctccacccccgccaccacaccgctttgccgctccgatctccgcacgctccggcgagaggggcccactggacagccagctcagtaccctcctacggcgacgctgtcgcacgcgccaccattaggtgtcacccgtccttgcgccgccgcacgcatcccaacgcagccggaccccacggcagccgccgccgctgcggcgaaggcccagcccaggccacgcgcgtcatcctcgcgccgaacgacgcaaggtggagcggcggtccactccccgcgcgcgcttcgcctccgctgcactgaaaccgtgccctgctggtgcgagtgtccggatgctaccaaatcctagggccgggcatcgactgactgactgagtgagtaagggagggagggagggaggagccagggcctcgccgcccgctgaacgagggagtgatgcggcgcggaagctcggccgcatgaggtgcctcgtcggcggcggcgtccaggacagcccgcgtgcagcggccaagagggtgtcgccggcgtcgtggcggctggacaccgccgcggcggaggcggagacgggcgcggggggagcggcggctaaggggccgagggtctgcttcaggccgccggatgtgatggagacggtgcacgaggtggccatttacatccaccgcttccacaacctcgatctgttccagcaaggatggtatcagatgaagattagtgcactgtgggaggaaggtggcaacagaacaccggcttcgcctgccagggtcgtgcaatatgaaggtggattgtgcagcttctgatgttggtggagacgatgcattaggcatttggaaaatagatgatattgataatagcttccacacacagccgttccggatcaagtatgccagacaagatatctatctgtcggttatggtgtctttcaacatattcaacagtgaagaggagggtccagcagcttcagatgtgatgatgaagtttgagctgatatatgccccaacactagacaatgggtctgagcttcatgcttctagtgccacatcttcagcagctgtgcacgaatttaggatcccacacagagcacttctgggtctacactcatactgtcctgttcactttgatgcgttccactctgtgcttgttgatctgacattgcacatagtgtacctgaaagctggtgcagctaaatcatcactgaaggtaccagagcaaggtttacgtcctacatcatatcacattgttaaggcattattaacttctagaaaaatgttgcttgaagaactgaacaaaatcagtggtgctattgtaaagtgttccccgaaactggcaaaggtgtgggacagttggctggaattttacatgacttcttggagagacccaacgatatggttaatggtacagatgattctttattgtatactcttccccatgaagagctgtttgaactgtttctaactctgagtggacagctttcacttctatggaatgcattcttgaaatttcataggctaaataaaacaaagatattggactacttgcacgatgcttgggctattggcaggaaggcagaatggtcaatatggactattcactcgaaaattgagatccctcatcgctatctgcagagtatgagtgatgactcaccccaccgttattctcttagagtttctggctcaaggaagttccatgatgaccatgtacagagctctgcttcacgggcggaactacacaggaaaagcatagcacaaatgaagattaatccacattatgttcaagatatgcatatatatggtgatccttcacgtgttcctgttgttcttatagaacaacatgtcatggttgttccacagcatagttccagcaaggatatggcttcaaatgtttctgaacaaaaggatactattgtggtaccgaaactacaaggagagcctctggtacccaaaagtagtgctggtaaaaaaagtggacgcatattgagagctgtcatttttgtgcatggatttcagggtcaccatctggatttacgtcttgttagaaaccaatggcttctattggatcctggagctgactgcctgatgtctgaggctaatgaagataaaacatctggagattttaaagaaatgggtagcaggttggctggggaggtagttgccttcctgaagaagaaaatggataagctttcgagatatggaggctgcaaagagctgaagttaagtttcgtaggtcattccattggaaacgtcatcattagaagtgccctggcagaacctgcattgcaaccatacttgaagaacctttacacttacatgtcaatatcagggcctcacttgggttactggtacagttcaaattctttgttcaattctggactctggctgctgaaaaagctcaagggtgcgcaatgcatccatcaactcactttcagtgatgatcaagacccccagaatacatacttttataagctttgcaagttgaaaacgttggagaacttccaaaatatcatattgctgtcatcaccacaggatggctacgtaccatatcattcagcgagaatcgagctctgcccagctgcatcatcggacacgtcaaagaagggccaagtcttcacagaaatgctgaacaactgcttggaccagatccgcacgccctcgtccgacacccggacattcatgcgctgcgacgtgaatttcgaccagtccaaccaagggcgaagcctgaacaccatgattggcagagcggcccacatcgagttcctggaaaccgacctctacgccaagttcatcatgtggtcctttcccgacctgttccgatgacgacgacgacaccgctcgtctttgtaatactggcacataccaaaccaataacgcacactacccagtactgaccaggcaaggaatactaaagctcgctccaccagaacccaacaccgagacaggcaggaagcactgtgaaggtcctagaagcaatggtttttccagcttgctagatcctattctgtataagtagttgattctttttcatttcattcatagtgctgtagattgcacccttgctgtgaaaatttataatccttgtcgtctgttgtaccttacacttcagtttaggatgtgctgacaatcagtgagcttattatgtccaaataagctctctttttttaacgtttgatttttagtcaccttcgttcttgtggtgctgtaaatcctgcaacatgctttgtacatgcagacgatcaccctgtctgatactagatccggatggtcctgccgtccaggtccagggtgttgtttcagtgtttctgtttgacgaaactgctgtaggaatatataaataatatttttttggttctggcatcctgccgttggtggacc

SEQ ID NO: 30672 - DNA, 3537 bp, Zea Mays
ctccacccccgccaccacaccgctttgccgctccgatctccgcacgctccggcgagaggggcccactggacagccagctcagtaccctcctacggcgacgctgtcgcacgcgccaccattaggtgtcacccgtccttgcgccgccgcacgcatcccaacgcagccggaccccacggcagccgccgccgctgcggcgaaggcccagcccaggccacgcgcgtcatcctcgcgccgaacgacgcaaggtggagcggcggtccactccccgcgcgcgcttcgcctccgctgcactgaaaccgtgccctgctggtgcgagtgtccggatgctaccaaatcctagggccgggcatcgactgactgactgagtgagtaagggagggagggagggaggagccagggcctcgccgcccgctgaacgagggagtgatgcggcgcggaagctcggccgcatgaggtgcctcgtcggcggcggcgtccaggacagcccgcgtgcagcggccaagagggtgtcgccggcgtcgtggcggctggacaccgccgcggcggaggcggagacgggcgcggggggagcggcggctaaggggccgagggtctgcttcaggccgccggatgtgatggagacggtgcacgaggtggccatttacatccaccgcttccacaacctcgatctgttccagcaaggatggtatcagatgaagattagtgcactgtgggaggaaggtggcaacagaacaccggcttcgcctgccagggtcgtgcaatatgaaggtggattgtgcagcttctgatgttggtggagacgatgcattaggcatttggaaaatagatgatattgataatagcttccacacacagccgttccggatcaagtatgccagacaagatatctatctgtcggttatggtgtctttcaacatattcaacagtgaagaggagggtccagcagcttcagatgtgatgatgaagtttgagctgatatatgccccaacactagacaatgggtctgagcttcatgcttctagtgccacatcttcagcagctgtgcacgaatttaggatcccacacagagcacttctgggtctacactcatactgtcctgttcactttgatgcgttccactctgtgcttgttgatctgacattgcacatagtgtacctgaaagctggtgcagctaaatcatcactgaaggtaccagagcaaggtttacgtcctacatcatatcacattgttaaggcattattaacttctagaaaaatgttgcttgaagaactgaacaaaatcagtggtgctattggtaagacagtagaggatttagatgttgctgacttgaatcttggtaaatatgagtcatttaatccatcaaaatcttggctaccgaattctagtaaagtgttccccgaaactggcaaaggtgtgggacagttggctggaattttacatgacttcttggagagacccaacgatatggttaatggtacagatgattctttattgtatactcttccccatgaagagctgtttgaactgtttctaactctgagtggacagctttcacttctatggaatgcattcttgaaatttcataggctaaataaaacaaagatattggactacttgcacgatgcttgggctattggcaggaaggcagaatggtcaatatggactattcactcgaaaattgagatccctcatcgctatctgcagagtatgagtgatgactcaccccaccgttattctcttagagtttctggctcaaggaagttccatgatgaccatgtacagagctctgcttcacgggcggaactacacaggaaaagcatagcacaaatgaagattaatccacattatgttcaagatatgcatatatatggtgatccttcacgtgttcctgttgttcttatagaacaacatgtcatggttgttccacagcatagttccagcaaggatatggcttcaaatgtttctgaacaaaaggatactattgtggtaccgaaactacaaggagagcctctggtacccaaaagtagtgctggtaaaaaaagtggacgcatattgagagctgtcatttttgtgcatggatttcagggtcaccatctggatttacgtcttgttagaaaccaatggcttctattggatcctggagctgactgcctgatgtctgaggctaatgaagataaaacatctggagattttaaagaaatgggtagcaggttggctggggaggtagttgccttcctgaagaagaaaatggataagctttcgagatatggaggctgcaaagagctgaaaacctgcattgcaaccatacttgaagaacctttacacttacatgtcaatatcagggcctcacttgggttactggtacagttcaaattctttgttcaattctggactctggctgctgaaaaagctcaagggtgcgcaatgcatccatcaactcactttcagtgatgatcaagacccccagaatacatacttttataagctttgcaagttgaaaacgttggagaacttccaaaatatcatattgctgtcatcaccacaggttattccctttcctcatctctaatagcaatttacttgcgtgtggaatttgttttgctgcaataaataactgggactctatagtccttatagcagcatgtcatgacttgtgagctatgccctatgcacacctttgtgttcttccaggatggctacgtaccatatcattcagcgagaatcgagctctgcccagctgcatcatcggacacgtcaaagaagggccaagtcttcacagaaatgctgaacaactgcttggaccagatccgcacgccctcgtccgacacccggacattcatgcgctgcgacgtgaatttcgaccagtccaaccaagggcgaagcctgaacaccatgattggcagagcggcccacatcgagttcctggaaaccgacctctacgccaagttcatcatgtggtcctttcccgacctgttccgatgacgacgacgacaccgctcgtctttgtaatactggcacataccaaaccaataacgcacactacccagtactgaccaggcaaggaatactaaagctcgctccaccagaacccaacaccgagacaggcaggaagcactgtgaaggtcctagaagcaatggtttttccagcttgctagatcctattctgtataagtagttgattctttttcatttcattcatagtgctgtagattgcacccttgctgtgaaaatttataatccttgtcgtctgttgtaccttacacttcagtttaggatgtgctgacaatcagtgagcttattatgtccaaataagctctctttttttaacgtttgatttttagtcaccttcgttcttgtggtgctgtaaatcctgcaacatgctttgtacatgcagacgatcaccctgtctgatactagatccggatggtcctgccgtccaggtccagggtgttgtttcagtgtttctgtttgacgaaactgctgtaggaatatataaataatatttttttggttctggcatcctgccgttggtggacc

SEQ ID NO: 30673 - DNA, 3339 bp, Zea Mays
ctccacccccgccaccacaccgctttgccgctccgatctccgcacgctccggcgagaggggcccactggacagccagctcagtaccctcctacggcgacgctgtcgcacgcgccaccattaggtgtcacccgtccttgcgccgccgcacgcatcccaacgcagccggaccccacggcagccgccgccgctgcggcgaaggcccagcccaggccacgcgcgtcatcctcgcgccgaacgacgcaaggtggagcggcggtccactccccgcgcgcgcttcgcctccgctgcactgaaaccgtgccctgctggtgcgagtgtccggatgctaccaaatcctagggccgggcatcgactgactgactgagtgagtaagggagggagggagggaggagccagggcctcgccgcccgctgaacgagggagtgatgcggcgcggaagctcggccgcatgaggtgcctcgtcggcggcggcgtccaggacagcccgcgtgcagcggccaagagggtgtcgccggcgtcgtggcggctggacaccgccgcggcggaggcggagacgggcgcggggggagcggcggctaaggggccgagggtctgcttcaggccgccggatgtgatggagacggtgcacgaggtggccatttacatccaccgcttccacaacctcgatctgttccagcaaggatggtatcagatgaagattagtgcactgtgggaggaaggtggcaacagaacaccggcttcgcctgccagggtcgtgcaatatgaagcttctgatgttggtggagacgatgcattaggcatttggaaaatagatgatattgataatagcttccacacacagccgttccggatcaagtatgccagacaagatatctatctgtcggttatggtgtctttcaacatattcaacagtgaagaggagggtccagcagcttcagatgtgatgatgaagtttgagctgatatatgccccaacactagacaatgggtctgagcttcatgcttctagtgccacatcttcagcagctgtgcacgaatttaggatcccacacagagcacttctgggtctacactcatactgtcctgttcactttgatgcgttccactctgtgcttgttgatctgacattgcacatagtgtacctgaaagctggtgcagctaaatcatcactgaaggtaccagagcaaggtttacgtcctacatcatatcacattgttaaggcattattaacttctagaaaaatgttgcttgaagaactgaacaaaatcagtggtgctattgtaaagtgttccccgaaactggcaaaggtgtgggacagttggctggaattttacatgacttcttggagagacccaacgatatggttaatggtacagatgattctttattgtatactcttccccatgaagagctgtttgaactgtttctaactctgagtggacagctttcacttctatggaatgcattcttgaaatttcataggctaaataaaacaaagatattggactacttgcacgatgcttgggctattggcaggaaggcagaatggtcaatatggactattcactcgaaaattgagatccctcatcgctatctgcagagtatgagtgatgactcaccccaccgttattctcttagagtttctggctcaaggaagttccatgatgaccatgtacagagctctgcttcacgggcggaactacacaggaaaagcatagcacaaatgaagattaatccacattatgttcaagatatgcatatatatggtgatccttcacgtgttcctgttgttcttatagaacaacatgtcatggttgttccacagcatagttccagcaaggatatggcttcaaatgtttctgaacaaaaggatactattgtggtaccgaaactacaaggagagcctctggtacccaaaagtagtgctggtaaaaaaagtggacgcatattgagagctgtcatttttgtgcatggatttcagggtcaccatctggatttacgtcttgttagaaaccaatggcttctattggatcctggagctgactgcctgatgtctgaggctaatgaagataaaacatctggagattttaaagaaatgggtagcaggttggctggggaggtagttgccttcctgaagaagaaaatggataagctttcgagatatggaggctgcaaagagctgaagttaagtttcgtaggtcattccattggaaacgtcatcattagaagtgccctgaacctgcattgcaaccatacttgaagaacctttacacttacatgtcaatatcagggcctcacttgggttactggtacagttcaaattctttgttcaattctggactctggctgctgaaaaagctcaagggtgcgcaatgcatccatcaactcactttcagtgatgatcaagacccccagaatacatacttttataagctttgcaagttgaaaacgttggagaacttccaaaatatcatattgctgtcatcaccacaggatggctacgtaccatatcattcagcgagaatcgagctctgcccagctgcatcatcggacacgtcaaagaagggccaagtcttcacagaaatgctgaacaactgcttggaccagatccgcacgccctcgtccgacacccggacattcatgcgctgcgacgtgaatttcgaccagtccaaccaagggcgaagcctgaacaccatgattggcagagcggcccacatcgagttcctggaaaccgacctctacgccaagttcatcatgtggtcctttcccgacctgttccgatgacgacgacgacaccgctcgtctttgtaatactggcacataccaaaccaataacgcacactacccagtactgaccaggcaaggaatactaaagctcgctccaccagaacccaacaccgagacaggcaggaagcactgtgaaggtcctagaagcaatggtttttccagcttgctagatcctattctgtataagtagttgattctttttcatttcattcatagtgctgtagattgcacccttgctgtgaaaatttataatccttgtcgtctgttgtaccttacacttcagtttaggatgtgctgacaatcagtgagcttattatgtccaaataagctctctttttttaacgtttgatttttagtcaccttcgttcttgtggtgctgtaaatcctgcaacatgctttgtacatgcagacgatcaccctgtctgatactagatccggatggtcctgccgtccaggtccagggtgttgtttcagtgtttctgtttgacgaaactgctgtaggaatatataaataatatttttttggttctggcatcctgccgttggtggacc

SEQ ID NO: 30674 - DNA, 3191 bp, Zea Mays
ctccacccccgccaccacaccgctttgccgctccgatctccgcacgctccggcgagaggggcccactggacagccagctcagtaccctcctacggcgacgctgtcgcacgcgccaccattaggtgtcacccgtccttgcgccgccgcacgcatcccaacgcagccggaccccacggcagccgccgccgctgcggcgaaggcccagcccaggccacgcgcgtcatcctcgcgccgaacgacgcaaggtggagcggcggtccactccccgcgcgcgcttcgcctccgctgcactgaaaccgtgccctgctggtgcgagtgtccggatgctaccaaatcctagggccgggcatcgactgactgactgagtgagtaagggagggagggagggaggagccagggcctcgccgcccgctgaacgagggagtgatgcggcgcggaagctcggccgcatgaggtgcctcgtcggcggcggcgtccaggacagcccgcgtgcagcggccaagagggtgtcgccggcgtcgtggcggctggacaccgccgcggcggaggcggagacgggcgcggggggagcggcggctaaggggccgagggtctgcttcaggccgccggatgtgatggagacggtgcacgaggtggccatttacatccaccgcttccacaacctcgatctgttccagcaaggatggtatcagatgaagattagtgcactgtgggaggaaggtggcaacagaacaccggcttcgcctgccagggtcgtgcaatatgaagcttctgatgttggtggagacgatgcattaggcatttggaaaatagatgatattgataatagcttccacacacagccgttccggatcaagtatgccagacaagatatctatctgtcggttatggtgtctttcaacatattcaacagtgaagaggagggtccagcagcttcagatgtgatgatgaagtttgagctgatatatgccccaacactagacaatgggtaccagagcaaggtttacgtcctacatcatatcacattgttaaggcattattaacttctagaaaaatgttgcttgaagaactgaacaaaatcagtggtgctattggtaagacagtagaggatttagatgttgctgacttgaatcttggtaaatatgagtcatttaatccatcaaaatcttggctaccgaattctagtaaagtgttccccgaaactggcaaaggtgtgggacagttggctggaattttacatgacttcttggagagacccaacgatatggttaatggtacagatgattctttattgtatactcttccccatgaagagctgtttgaactgtttctaactctgagtggacagctttcacttctatggaatgcattcttgaaatttcataggctaaataaaacaaagatattggactacttgcacgatgcttgggctattggcaggaaggcagaatggtcaatatggactattcactcgaaaattgagatccctcatcgctatctgcagagtatgagtgatgactcaccccaccgttattctcttagagtttctggctcaaggaagttccatgatgaccatgtacagagctctgcttcacgggcggaactacacaggaaaagcatagcacaaatgaagattaatccacattatgttcaagatatgcatatatatggtgatccttcacgtgttcctgttgttcttatagaacaacatgtcatggttgttccacagcatagttccagcaaggatatggcttcaaatgtttctgaacaaaaggatactattgtggtaccgaaactacaaggagagcctctggtacccaaaagtagtgctggtaaaaaaagtggacgcatattgagagctgtcatttttgtgcatggatttcagggtcaccatctggatttacgtcttgttagaaaccaatggcttctattggatcctggagctgactgcctgatgtctgaggctaatgaagataaaacatctggagattttaaagaaatgggtagcaggttggctggggaggtagttgccttcctgaagaagaaaatggataagctttcgagatatggaggctgcaaagagctgaaaacctgcattgcaaccatacttgaagaacctttacacttacatgtcaatatcagggcctcacttgggttactggtacagttcaaattctttgttcaattctggactctggctgctgaaaaagctcaagggtgcgcaatgcatccatcaactcactttcagtgatgatcaagacccccagaatacatacttttataagctttgcaagttgaaaacgttggagaacttccaaaatatcatattgctgtcatcaccacaggatggctacgtaccatatcattcagcgagaatcgagctctgcccagctgcatcatcggacacgtcaaagaagggccaagtcttcacagaaatgctgaacaactgcttggaccagatccgcacgccctcgtccgacacccggacattcatgcgctgcgacgtgaatttcgaccagtccaaccaagggcgaagcctgaacaccatgattggcagagcggcccacatcgagttcctggaaaccgacctctacgccaagttcatcatgtggtcctttcccgacctgttccgatgacgacgacgacaccgctcgtctttgtaatactggcacataccaaaccaataacgcacactacccagtactgaccaggcaaggaatactaaagctcgctccaccagaacccaacaccgagacaggcaggaagcactgtgaaggtcctagaagcaatggtttttccagcttgctagatcctattctgtataagtagttgattctttttcatttcattcatagtgctgtagattgcacccttgctgtgaaaatttataatccttgtcgtctgttgtaccttacacttcagtttaggatgtgctgacaatcagtgagcttattatgtccaaataagctctctttttttaacgtttgatttttagtcaccttcgttcttgtggtgctgtaaatcctgcaacatgctttgtacatgcagacgatcaccctgtctgatactagatccggatggtcctgccgtccaggtccagggtgttgtttcagtgtttctgtttgacgaaactgctgtaggaatatataaataatatttttttggttctggcatcctgccgttggtggacc

SEQ ID NO: 30675 - DNA, 601 bp, Zea Mays
tatgtaattcagtattgcttcacctgtatgtctggattagtggattaattcagcacccttggctttatcatattattgtttatggtagatggaacaacaattgactggaaagtgttcatgcaggtcctaaattcaccatgggatgtatgctacgatcccgcagaggaggccgtgtatattgcaatggctgggcaacaccagatctggaagcacaatttacatgatggagtaaccaaagttattagcggtgatggctatgagaggaatctgaatggctcaagcgccaccagcacatcgtttgcacagccttctgggattccattagcttttgaaatgcatgagttacttgttgctgatagtgaaagtagttccattcgagttgttaatctgaagacaggaggctcaagattgctggctggaggagatccagtatttccagaaaatttgtttaggtttggagattatgacgggactggctcagatgtgctacttcaacatcccttgggtgttgtttatgccaatgacaatcaagtatatatagctgattcctacaaccataaggtagtaaccttattttgacacccatcaagtgtaagatgtg

SEQ ID NO: 30676 - DNA, 551 bp, Zea Mays
tatgtaattcagtattgcttcacctgtatgtctggattagtggattaattcagcacccttggctttatcatattattgtttatggtagatggaacaacaattgactggaaagtgttcatgcaggtcctaaattcaccatgggatgtatgctacgatcccgcagaggaggccgtgtatattgcaatggctgggcaacaccagatctggaagcacaatttacatgatggagtaaccaaagttattagcggtgatggctatgagaggaatctgaatggctcaagaaatgcatgagttacttgttgctgatagtgaaagtagttccattcgagttgttaatctgaagacaggaggctcaagattgctggctggaggagatccagtatttccagaaaatttgtttaggtttggagattatgacgggactggctcagatgtgctacttcaacatcccttgggtgttgtttatgccaatgacaatcaagtatatatagctgattcctacaaccataaggtagtaaccttattttgacacccatcaagtgtaagatgtg

SEQ ID NO: 30677 - DNA, 926 bp, Zea Mays
ggaactcgtacctaatggggcaaagtattgatgcattactggagaagaccattaagcacatgcttttcttgcaaagtgtgacaaagcatgcagataacctcaaggactcaaacaaatctgatattcttggtggtgagaatggtccactcaaagactacttcgaaggtggtgcaacttgggccttggatgttggtagtcgatctatgacgtgcccaatcattgtcgaggatctcgagcggcctcgtcagatgcttgtggagatgctttgtgaggatagaggtatcttcttggagatagctgacttcattaaaggactaggattaaccatcttaaggggcgttatggaagcacgcaaaaataaaatctgggcacggttcactgttgaggccaacagaaatgtgactagaatggaaatcttcctttccctaatgcgcatgctggaaccgagttgtggagcaggagagaattctaataacaacataaaaatgcctcttgggattgtgcagtatcccataatccctgcgacaggtcatcttaggtgagccagccagcacaaagataacaggatgcatctttgaaatgctaagagcggggggaggtccacccacttctgccatgactagcattgccaacccaggacgagctggaatctcgtgacatgcggtgcatcgtccctgcagtgtgcattcggaaagcctaacagtagacgggaacatcgacatggatagttggttcgccggatgatcgacgttttgactgtaatcttagtttatgtttgttgctgatgctttagccttttgttagtctgcatattagtgagtgaattttgttatgttctgctgctgaatggaaattctgagttgaattgtaggccttgttttggtactgactcgaactcggagttctctgttttgaatggtcggggt

SEQ ID NO: 30678 - DNA, 3576 bp, Zea Mays
gccaaaacagactagtagacacccaaacccgagaagagaagtgagaaccctcccaaacaagccaaagccagcaaagccaaaaggaggaagacgcaccaggacattgacgagccgcagtccgcggcagcaggtccagcttcatcccccggagccccagcactggggttggcaggcaggctcgctcgccaccgccgcgtgaagcgaagcgcgcgcccccgcggacgctgacgctgggacccgcctgctgggggctgggagtgggcccgcccccctgatgggcgcctgcgcgccggcggcgaggggaagcgtgaggacgaggagcgccggcgggctccgcgcgaagcaggccgggcaagcgagccaccgcgccgcctagtgagggcgctcgccgcccgtctttgcttgttgccttgttgggttgctcgcacgtcctgttccagttccaggccagagagagcggggcccggggctgcaggcggcggcccgcggaggagctagggttctctctcccactcccccctgcgtcgccaggatggcggttggggacgcgctgcgccggctctgcgaggaggtcggctggtcctacgccgtcttctggaaggccatcggcgccgccgaccctgtgcatttggtgtgggaggacggttcctgcggccacgcctcatgctataccggatctgatgctcctgaagctgggtgtgagccgggcaccagtgtgtgcacgcttgttgggaaggttatggcctcacaaattcatgttattggtgaaggtaccattggccgtgctgctttcactggaaatcatcaatggattgtccatgatcctgccactgccagtgatcacaatctcagaccggaggttgttgctgagatgaatcatcagtttgcagctggcattcagactattgcaattattcccgtgttaccacgaggtgtactgcagctaggcgctacaagtgtggtagtggaaaataccaaccttgtgctccagtataagaagctgtgttctcagctgaacaatcggtcgagtatggcttcatcgtcatctgttaaaaacgatttgaaccctaaagttcagtcacaccctttgaatggtcccacaagtatataccctgcagatacgcgctcaaagttttttagtggatccccaatgtcatatcaacagtgttatggtcctgatggcacaactgtgtctagtagtatattgacaaacatgggcagtaatgcttcaatgctcatggttgcacagagaaatgctcaagtgggtaaagaacacattctatatgcccctgacatgaggttcagactgcaaaacccttactgtgacaggagagttgagagtaacacccaaagtagtgttgtgagctctggttttatctcgtcgatctcagcatcaatggaaagacatccatggatgaccaacagtcaacagttagaacaaggaaacactggagaaccatcagatctcagaaatgttctcttgaaatctcttgcataccgtcaccctttgttcaatgacaacacaaacatggttttagtgcatggcaaaggccaggtgccaggttttgttaatggtcatgggggttttgattttctcccagaaggtactatggtattcaagggtaacctgtatggcagcacagcaaatcaaattttagaccaaagatgcagttctacttctgagatgtcagggcacagaccaactatttcatacaaaatgccccaatctacccaatgtgttaggaaaacagagtctccaaagagagagacatgcgaaacttctgctgctctgtcatctggctctgatattcaggtttctggtggcctgaaaacagtcatttctcaagagaataatatgagtagctcagatcttattagcccaaaaaaacccaatgaagtgcatgcccctactggtgcaattgttaaagctgtcaagaatatggatagccgcaggctcccagacatatctaatgagagatcacctccgcttcgtatggatgctgctgcagaaagtgatttgtttgacatgtttgattctgaagttcatcatttgtgccgcaatgtggataatgatcttacctgtaaagctgcaaaacccgagaattcaaatagagatgtacctgaatcctctgttcgtcttggttcctcttcatctttcaattcagtggatgacaagttcccttattctgggatcttctcactaaccgataccgaccaacttttggatgcggttgtctccaatgtcaatcctggtggcaagcagatctctggtgacagtacttcttgcaagacttcagcggcagatattcctaccacttcgtattgtcgcttaaaagaaccaaagcagtccgaatcatcttcacctttgctaatcaagaatgagttagccgtttcaaattttgtcaaacagtcatctttccaagaaaaggcagaggatggctgtctttctcaaaataatgcaatacagaagtctcagatacgcctctggatagagaacggacagaacatgaaatgtgaaagtgcctcagcctcaaacagtaagggcgttgatatgtcaagcaaggcaagtcgaaagaggtctcgaccaggagagaatcctaagccacgaccaaaggaccgccagcttattcaggatcgtataaaggagctccgggaactcgtacctaatggggcaaagtattgatgcattactggagaagaccattaagcacatgcttttcttgcaaagtgtgacaaagcatgcagataacctcaaggactcaaacaaatctgatattcttggtggtgagaatggtccactcaaagactacttcgaaggtggtgcaacttgggccttggatgttggtagtcgatctatgacgtgcccaatcattgtcgaggatctcgagcggcctcgtcagatgcttgtggagatgctttgtgaggatagaggtatcttcttggagatagctgacttcattaaaggactaggattaaccatcttaaggggcgttatggaagcacgcaaaaataaaatctgggcacggttcactgttgaggccaacagaaatgtgactagaatggaaatcttcctttccctaatgcgcatgctggaaccgagttgtggagcaggagagaattctaataacaacataaaaatgcctcttgggattgtgcagtatcccataatccctgcgacaggtcatcttaggtgagccagccagcacaaagataacaggatgcatctttgaaatgctaagagcggggggaggtccacccacttctgccatgactagcattgccaacccaggacgagctggaatctcgtgacatgcggtgcatcgtccctgcagtgtgcattcggaaagcctaacagtagacgggaacatcgacatggatagttggttcgccggatgatcgacgttttgactgtaatcttagtttatgtttgttgctgatgctttagccttttgttagtctgcatattagtgagtgaattttgttatgttctgctgctgaatggaaattctgagttgaattgtaggccttgttttgaagaaaagcagaaattttttaccatcctttacatccgcatca

SEQ ID NO: 30679 - DNA, 3566 bp, Zea Mays
agtagacacccaaacccgagaagagaagtgagaaccctcccaaacaagccaaagccagcaaagccaaaaggaggaagacgcaccaggacattgacgagccgcagtccgcggcagcaggtccagcttcatcccccggagccccagcactggggttggcaggcaggctcgctcgccaccgccgcgtgaagcgaagcgcgcgcccccgcggacgctgacgctgggacccgcctgctgggggctgggagtgggcccgcccccctgatgggcgcctgcgcgccggcggcgaggggaagcgtgaggacgaggagcgccggcgggctccgcgcgaagcaggccgggcaagcgagccaccgcgccgcctagtgagggcgctcgccgcccgtctttgcttgttgccttgttgggttgctcgcacgtcctgttccagttccaggccagagagagcggggcccggggctgcaggcggcggcccgcggaggagctagggttctctctcccactcccccctgcgtcgccaggatggcggttggggacgcgctgcgccggctctgcgaggaggtcggctggtcctacgccgtcttctggaaggccatcggcgccgccgaccctgtgcatttggtgtgggaggacggttcctgcggccacgcctcatgctataccggatctgatgctcctgaagctgggtgtgagccgggcaccagtgtgtgcacgcttgttgggaaggttatggcctcacaaattcatgttattggtgaaggtaccattggccgtgctgctttcactggaaatcatcaatggattgtccatgatcctgccactgccagtgatcacaatctcagaccggaggttgttgctgagatgaatcatcagtttgcagctggcattcagactattgcaattattcccgtgttaccacgaggtgtactgcagctaggcgctacaagtgtgtggaaaataccaaccttgtgctccagtataagaagctgtgttctcagctgaacaatcggtcgagtatggcttcatcgtcatctgttaaaaacgatttgaaccctaaagttcagtcacaccctttgaatggtcccacaagtatataccctgcagatacgcgctcaaagttttttagtggatccccaatgtcatatcaacagtgttatggtcctgatggcacaactgtgtctagtagtatattgacaaacatgggcagtaatgcttcaatgctcatggttgcacagagaaatgctcaagtgggtaaagaacacattctatatgcccctgacatgaggttcagactgcaaaacccttactgtgacaggagagttgagagtaacacccaaagtagtgttgtgagctctggttttatctcgtcgatctcagcatcaatggaaagacatccatggatgaccaacagtcaacagttagaacaaggaaacactggagaaccatcagatctcagaaatgttctcttgaaatctcttgcataccgtcaccctttgttcaatgacaacacaaacatggttttagtgcatggcaaaggccaggtgccaggttttgttaatggtcatgggggttttgattttctcccagaaggtactatggtattcaagggtaacctgtatggcagcacagcaaatcaaattttagaccaaagatgcagttctacttctgagatgtcagggcacagaccaactatttcatacaaaatgccccaatctacccaatgtgttaggaaaacagagtctccaaagagagagacatgcgaaacttctgctgctctgtcatctggctctgatattcaggtttctggtggcctgaaaacagtcatttctcaagagaataatatgagtagctcagatcttattagcccaaaaaaacccaatgaagtgcatgcccctactggtgcaattgttaaagctgtcaagaatatggatagccgcaggctcccagacatatctaatgagagatcacctccgcttcgtatggatgctgctgcagaaagtgatttgtttgacatgtttgattctgaagttcatcatttgtgccgcaatgtggataatgatcttacctgtaaagctgcaaaacccgagaattcaaatagagatgtacctgaatcctctgttcgtcttggttcctcttcatctttcaattcagtggatgacaagttcccttattctgggatcttctcactaaccgataccgaccaacttttggatgcggttgtctccaatgtcaatcctggtggcaagcagatctctggtgacagtacttcttgcaagacttcagcggcagatattcctaccacttcgtattgtcgcttaaaagaaccaaagcagtccgaatcatcttcacctttgctaatcaagaatgagttagccgtttcaaattttgtcaaacagtcatctttccaagaaaaggcagaggatggctgtctttctcaaaataatgcaatacagaagtctcagatacgcctctggatagagaacggacagaacatgaaatgtgaaagtgcctcagcctcaaacagtaagggcgttgatatgtcaagcaaggcaagtcgaaagaggtctcgaccaggagagaatcctaagccacgaccaaaggaccgccagcttattcaggatcgtataaaggagctccgggaactcgtacctaatggggcaaagtgtagtattgatgcattactggagaagaccattaagcacatgcttttcttgcaaagtgtgacaaagcatgcagataacctcaaggactcaaacaaatctgatattcttggtggtgagaatggtccactcaaagactacttcgaaggtggtgcaacttgggccttggatgttggtagtcgatctatgacgtgcccaatcattgtcgaggatctcgagcggcctcgtcagatgcttgtggagatgctttgtgaggatagaggtatcttcttggagatagctgacttcattaaaggactaggattaaccatcttaaggggcgttatggaagcacgcaaaaataaaatctgggcacggttcactgttgaggccaacagaaatgtgactagaatggaaatcttcctttccctaatgcgcatgctggaaccgagttgtggagcaggagagaattctaataacaacataaaaatgcctcttgggattgtgcagtatcccataatccctgcgacaggtcatcttaggtgagccagccagcacaaagataacaggatgcatctttgaaatgctaagagcggggggaggtccacccacttctgccatgactagcattgccaacccaggacgagctggaatctcgtgacatgcggtgcatcgtccctgcagtgtgcattcggaaagcctaacagtagacgggaacatcgacatggatagttggttcgccggatgatcgacgttttgactgtaatcttagtttatgtttgttgctgatgctttagccttttgttagtctgcatattagtgagtgaattttgttatgttctgctgctgaatggaaattctgagttgaattgtaggccttgttttggtactgactcgaactcggagttctctgttttgaatggtcggggt

SEQ ID NO: 30680 - DNA, 3468 bp, Zea Mays
agtagacacccaaacccgagaagagaagtgagaaccctcccaaacaagccaaagccagcaaagccaaaaggaggaagacgcaccaggacattgacgagccgcagtccgcggcagcaggtccagcttcatcccccggagccccagcactggggttggcaggcaggctcgctcgccaccgccgcgtgaagcgaagcgcgcgcccccgcggacgctgacgctgggacccgcctgctgggggctgggagtgggcccgcccccctgatgggcgcctgcgcgccggcggcgaggggaagcgtgaggacgaggagcgccggcgggctccgcgcgaagcaggccgggcaagcgagccaccgcgccgcctagtgagggcgctcgccgcccgtctttgcttgttgccttgttgggttgctcgcacgtcctgttccagttccaggccagagagagcggggcccggggctgcaggcggcggcccgcggaggagctagggttctctctcccactcccccctgcgtcgccaggatggcggttggggacgcgctgcgccggctctgcgaggaggtcggctggtcctacgccgtcttctggaaggccatcggcgccgccgaccctgtgcatttggtgtgggaggacggttcctgcggccacgcctcatgctataccggatctgatgctcctgaagctgggtgtgagccgggcaccagtgtgtgcacgcttgttgggaaggttatggcctcacaaattcatgttattggtgaaggtaccattggccgtgctgctttcactggaaatcatcaatggattgtccatgatcctgccactgccagtgatcacaatctcagaccggaggttgttgctgagatgaatcatcagtttgcagctggcattcagactattgcaattattcccgtgttaccacgaggtgtactgcagctaggcgctacaagtgtggtagtggaaaataccaaccttgtgctccagtataagaagctgtgttctcagctgaacaatcggtcgagtatggcttcatcgtcatctgttaaaaacgatttgaaccctaaagttcagtcacaccctttgaatggtcccacaagtatataccctgcagatacgcgctcaaagttttttagtggatccccaatgtcatatcaacagtgttatggtcctgatggcacaactgtgtctagtagtatattgacaaacatgggcagtaatgcttcaatgctcatggttgcacagagaaatgctcaagtgggtaaagaacacattctatatgcccctgacatgaggttcagactgcaaaacccttactgtgacaggagagttgagagtaacacccaaagtagtgttgtgagctctggttttatctcgtcgatctcagcatcaatggaaagacatccatggatgaccaacagtcaacagttagaacaaggaaacactggagaaccatcagatctcagaaatgttctcttgaaatctcttgcataccgtcaccctttgttcaatgacaacacaaacatggttttagtgcatggcaaaggccaggtgccaggttttgttaatggtcatgggggttttgattttctcccagaaggtactatggtattcaagggtaacctgtatggcagcacagcaaatcaaattttagaccaaagatgcagttctacttctgagatgtcagggcacagaccaactatttcatacaaaatgccccaatctacccaatgtgttaggaaaacagagtctccaaagagagagacatgcgaaacttctgctgctctgtcatctggctctgatattcaggtttctggtggcctgaaaacagtcatttctcaagagaataatatgagtagctcagatcttattagcccaaaaaaacccaatgaagtgcatgcccctactggtgcaattgttaaagctgtcaagaatatggatagccgcaggctcccagacatatctaatgagagatcacctccgcttcgtatggatgctgctgcagaaagtgatttgtttgacatgtttgattctgaagttcatcatttgtgccgcaatgtggataatgatcttacctgtaaagctgcaaaacccgagaattcaaatagagatgtacctgaatcctctgttcgtcttggttcctcttcatctttcaattcagtggatgacaagttcccttattctgggatcttctcactaaccgataccgaccaacttttggatgcggttgtctccaatgtcaatcctggtggcaagcagatctctggtgacagtacttcttgcaagacttcagcggcagatattcctaccacttcgtattgtcgcttaaaagaaccaaagcagtccgaatcatcttcacctttgctaatcaagaatgagttagccgtttcaaattttgtcaaacagtcatctttccaagaaaaggcagaggatggctgtctttctcaaaataatgcaatacagaagtctcagatacgcctctggatagagaacggacagaacatgaaatgtgaaagtgcctcagcctcaaacagtaagggcgttgatatgtcaagcaaggcaagtcgaaagaggtctcgaccaggagagaatcctaagccacgaccaaaggaccgccagcttattcaggatcgtataaaggagctccgggaactcgtacctaatggggcaaagattcttggtggtgagaatggtccactcaaagactacttcgaaggtggtgcaacttgggccttggatgttggtagtcgatctatgacgtgcccaatcattgtcgaggatctcgagcggcctcgtcagatgcttgtggagatgctttgtgaggatagaggtatcttcttggagatagctgacttcattaaaggactaggattaaccatcttaaggggcgttatggaagcacgcaaaaataaaatctgggcacggttcactgttgaggccaacagaaatgtgactagaatggaaatcttcctttccctaatgcgcatgctggaaccgagttgtggagcaggagagaattctaataacaacataaaaatgcctcttgggattgtgcagtatcccataatccctgcgacaggtcatcttaggtgagccagccagcacaaagataacaggatgcatctttgaaatgctaagagcggggggaggtccacccacttctgccatgactagcattgccaacccaggacgagctggaatctcgtgacatgcggtgcatcgtccctgcagtgtgcattcggaaagcctaacagtagacgggaacatcgacatggatagttggttcgccggatgatcgacgttttgactgtaatcttagtttatgtttgttgctgatgctttagccttttgttagtctgcatattagtgagtgaattttgttatgttctgctgctgaatggaaattctgagttgaattgtaggccttgttttggtactgactcgaactcggagttctctgttttgaatggtcggggt

SEQ ID NO: 30681 - DNA, 405 bp, Zea Mays
cttaggagaaggcacgacctgttgaacgcggaggaaaatatccaggggagagcggtggttggatgagaacaaagtccaggaaatgataattagcaagagacgtatgcacaccagctttcccaaggagctagatattttcttttctgttgttttttttttgatttttcccccctgtgcgcggatgagaacgatgactgcagatgagaaaaaaaaaagaatctggacaggggacggcgtgataggataggatctctgggatattttccattttccattttccatttttttataacggaaatagtaaatatttcggattcggataaattcatctgtttttgtcccgaatatttgatgtggtgaatattttgtagtagatgaacttttgccaggtatttatatccaaag

SEQ ID NO: 30682 - DNA, 1925 bp, Zea Mays
ttccacttaattccagacatcacgacactaccagctctctgccatatctttctgtttctctatatatttctcttctcttatacatcttccctagtaatctgttaaccctctcctgatgcccatcatcggcctcgccctcaccggagcaccgaactggtactccttgctcgcgggggaaaagttctcatctttctccccgagctcacctcggcatccccgacggtctgggtcgccacagccaacttctccactagctggccgacctccaccccttccttcgccttggccagcgtgaggcgcacgaagctgccaagggtcgtaggggatgtgagcggcacggcgttgacccagttgacagcggtgatgtcgagcgcgttggggaggacgtgcccctgcacggcggccacgtgcgtcgggtgcgctgcgtaggacgccaggctctccctggtggcatggcgggtgtggaggaggtgcgtggggctggtgaggtggtgcgaggccattgcggcaacgcacgcacggtgttcggtggattgccaccacggatggcggcgctacggagcagaggaggtgacggggacgggggctggacccctaagcggagccccactacagccgtcccaccgacccgggagtccgggacccaatggcgtcgtcatcgatggcatcgttgtcgcgtcgttccgtcttgcacgcctcctacacccgctcgcagttttccgcgaccgacatctgcagccacttcattcctctcgtctcgaagtacgtactttagaaccctagatgcagcgacctggatggtgtcccatcgctgccgacggcctcgtgcgcgctcctccggtcgaagtcctggccgacaacgatcttgtttctaatgttttaaaactttttacaagaacttgcatatttctatattggatgtcaggtgctcaagtatggaagaacttgtttcgaattaatgttttaaaaccttttacaagaagacctgttcataacttaattgtcaccggtgtgttatgagttatgactcttggtaaacttgttgttttcatggtaattttcccttcaatccttctacaataataaacaggttgggtgcaagatgggctatggattctgtgctactggaacaatgatcttcaaaagtaatctgtcttctcgagaaattgtagagcagctggtccatgcatcctactattctcagatccaaaatgttgttttcatggatgcaggctttcttctataggatatcgttgtgttttttgccgaggtgctcatcctgaaggcaacaacaactatgcaggagcttaccaacgaagattctgaaatatgcagttcaagttacggatgtcaggctgaaactttaccaacgcggccatcattcacatggaaactggaaaatttcttgtcttttaaagagattatggagtccaaaagatttttagtaaaatttttcaggctggaggtgtatatgagtcgtttgatacgatctgcatatgcttggagagtgatcaatcatctgggaatcggggcggcggattcccggattgatcgcaggttgtagtggtgggtgattggtggccagggtttgaggcgcgatgcacagcggcggggcgccgtgttcaccgcgcgtgagagaagagaggcgcgaggaaaggggcagctaggtcacagtaatctcccggctccctctgggaagccggaacaatcttgtttctgcttgatctatagagtggtgcttacaattatttatactcccttctagtccttatgtaatgagatagatctcatcttttctctctaacaaagcttatcttctaatccctatcttctctctagcaaatcttatcttttaatccttatctgcatgctttatgctgttgcccggcgcctatagtggcggccggtcataacatctctccccg

SEQ ID NO: 30683 - DNA, 1944 bp, Zea Mays
agtaatctgttaaccctctcctgatgcccatcatcggcctcgccctcaccggagcaccgaactggtactccttgctcgcgggggaaaagttctcatctttctccccgagctcacctcggcatccccgacggtctgggtcgccacagccaacttctccactagctggccgacctccaccccttccttcgccttggccagcgtgaggcgcacgaagctgccaagggtcgtaggggatgtgagcggcacggcgttgacccagttgacagcggtgatgtcgagcgcgttggggaggacgtgcccctgcacggcggccacgtgcgtcgggtgcgctgcgtaggacgccaggctctccctggtggcatggcgggtgtggaggaggtgcgtggggctggtgaggtggtgcgaggccattgcggcaacgcacgcacggtgttcggtggattgccaccacggatggcggcgctacggagcagaggaggtgacggggacgggggctggacccctaagcggagccccactacagccgtcccaccgacccgggagtccgggacccaatggcgtcgtcatcgatggcatcgttgtcgcgtcgttccgtcttgcacgcctcctacacccgctcgcagttttccgcgaccgacatctgcagccacttcattcctctcgtctcgaatgattctctctgcgtgcgcaggtacgtactttagaaccctagatgcagcgacctggatggtgtcccatcgctgccgacggcctcgtgcgcgctcctccggtcgaagtcctggccgacaacgatcttgtttctaatgttttaaaactttttacaagaacttgcatatttctatattggatgtcaggtgctcaagtatggaagaacttgtttcgaattaatgttttaaaaccttttacaagaagacctgttcataacttaattgtcaccggtgtgttatgagttatgactcttggtaaacttgttgttttcatggtaattttcccttcaatccttctacaataataaacaggttgggtgcaagatgggctatggattctgtgctactggaacaatgatcttcaaaagtaatctgtcttctcgagaaattgtagagcagctggtccatgcatcctactattctcagatccaaaatgttgttttcatggctttcttctataggatatcgttgtgttttttgccgaggtgctcatcctgaaggcaacaacaactatgcaggagcttaccaacgaagattctgaaatatgcagttcaagttacggatgtcaggctgaaactttaccaacgcggccatcattcacatggaaactggaaaatttcttgtcttttaaagagattatggagtccaaaagatttttagtaaaatttttcaggctggaggttgagttgcggataggaaaagtaaatttattcactttcttgtcttatacagcttcaccaaacccttactttgtctttacctcatcgtaagttgcaggtgtatatgagtcgtttgatacgatctgcatatgcttggagagtgatcaatcatctgggaatcggggcggcggattcccggattgatcgcaggttgtagtggtgggtgattggtggccagggtttgaggcgcgatgcacagcggcggggcgccgtgttcaccgcgcgtgagagaagagaggcgcgaggaaaggggcagctaggtcacagtaatctcccggctccctctgggaagccggaacaatcttgtttctgcttgatctatagagtggtgcttacaattatttatactcccttctagtccttatgtaatgagatagatctcatcttttctctctaacaaagcttatcttctaatccctatcttctctctagcaaatcttatcttttaatccttatctgcatgctttatgctgttgcccggcgcctatagtggcggccggtcataacatctctccccg

SEQ ID NO: 30684 - DNA, 1284 bp, Zea Mays
atgcctcttgactccaaatcgcaggtacgtactttagaaccctagatgcagcgacctggatggtgtcccatcgctgccgacggcctcgtgcgcgctcctccggtcgaagtcctggccgacaacgatcttgtttctaatgttttaaaactttttacaagaacttgcatatttctatattggatgtcaggtgctcaagtatggaagaacttgtttcgaattaatgttttaaaaccttttacaagaagacctgttcataacttaattgtcaccggtgtgttatgagttatgactcttggtaaacttgttgttttcatggtaattttcccttcaatccttctacaataataaacaggttgggtgcaagatgggctatggattctgtgctactggaacaatgatcttcaaaagtaatctgtcttctcgagaaattgtagagcagctggtccatgcatcctactattctcagatccaaaatgttgttttcatggatgcaggctttcttctataggatatcgttgtgttttttgccgaggtgctcatcctgaaggcaacaacaactatgcaggagcttaccaacgaagattctgaaatatgcagttcaagttacggatgtcaggctgaaactttaccaacgcggccatcattcacatggaaactggaaaatttcttgtcttttaaagagattatggagtccaaaagatttttagtaaaatttttcaggctggaggttgagttgcggataggaaaagtaaatttattcactttcttgtcttatacagcttcaccaaacccttactttgtctttacctcatcgtaagttgcaggtgtatatgagtcgtttgatacgatctgcatatgcttggagagtgatcaatcatctgggaatcggggcggcggattcccggattgatcgcaggttgtagtggtgggtgattggtggccagggtttgaggcgcgatgcacagcggcggggcgccgtgttcaccgcgcgtgagagaagagaggcgcgaggaaaggggcagctaggtcacagtaatctcccggctccctctgggaagccggaacaatcttgtttctgcttgatctatagagtggtgcttacaattatttatactcccttctagtccttatgtaatgagatagatctcatcttttctctctaacaaagcttatcttctaatccctatcttctctctagcaaatcttatcttttaatccttatctgcatgctttatgctgttgcccggcgcctatagtggcggccggtcataacatctctccccg

SEQ ID NO: 30685 - DNA, 2752 bp, Zea Mays
ctccatcgtccccggcgaaccctgccttcccgtccttccgcggttcctccgcatcatgcgacatggcggattcgcgtggaacaactcccaagagcggtgacaatgataacacctccacgcgcccggcgcgcctccgcgtcatgcgcccggaagtcaaggaatttctgacgagtcctcgccggagacgccccaagaagcaaccgcctccgcctccgcccccgccgccacgaaatgtgaagctgaaggagaggaagaacaaggaaaaggggaaggctgcgacggaggaagacaaattcgagcgcgcgcaatacaactgccccttccaggacgagggcgaagggggccgcgacttcgcgccgccggagctggtctgggcaccggaaggccggcgcgctgctcatcgtctacttctgggacaggaccttcgcttggagctccccttccgcgctgctccccttccgctccaacttcacgcgactatccgcccagagcactatgtccagcttcgtctccgctatggattccgcgctgcaggaggttgggcgacgcgtagaggctggcctctcgtgcggttgcttcacctccagcattgccaccaagcaggaggttcaaaactctggtatccggcaaggggcgtatggtgcggccgtagactctgtctacacgagggatgccttccatagcaaaacatttcttgactacatctcagcactgggaaagaaaccactggcgggtgctgatcttcttgtccttgctaccgtaaaagcacagctgagggccttgaatcgctcaaggggctcaagggacctccctgagtttgagatgtttgagggcactgatgagattacagaaatgacacacacagatggagatgatacattgagtcgagggaaaaagtcaaagcgcatgaagagttcatcgaagaagaaaactgacatttccaagcatttagatggactcaaaactggttctgttgctgacagcagaacattggccaagaaggcagtaggtgatgctttgagtgagagaaaatctggacgcacactgagatccacgagtaagaaggaagatgctttagagggtttgaaaaggctggcaaaggatggaattcaggaattaacagggaaaagcaaagacgcccccattcttaaagaaaaaaatcaggggcatggggcaggctctgcacacaagaagggtagaatcacagaggatgggtatcatagacttggagatagcaatgccaaggatcccatttttcctggcaagagaagattgggacataacgaaaactcaataagcaaacgagtgcccatctcagagcatggtaggaagaagaagaaactttctgaactcatggcagagacaggcaagcctaattctgcatctagtggtaagagcaaaactcgagggaagcgttcgttgcatgattcagctgagaaaactgaggatcctgaacatcactctaaggatacattgatgactaggaaaagaaagaagctcaacacattgggggatttgtcttcactgtcagagcctctctctcgtaagaagtccacaaaggttggagaactgatgagcaaagtagctgggagcagcatgttacaggctgcacctgctgtcaaagctaatagtgcagtgtctcagacaaaaccacgaagggctaagtacaggcaagtaaatgctgcagacaaatctccatgtcctgtgaaggtgaatcaggggaacagcgaagccgttagtaaggagtctctatcttgtggagaaatgctatggcagctctctgtagcagcatgtggtcttcagcagagagagaaaatcgttcctacaagtgttaacttctttaccggttttagaaagaacaaattttctagttctgatgtcaatgaggggatgcctgagaaggcagccaacactgagtccactctttcagaacagcccattgctgatcatatgcaggatgactattgggctgacattctcattaatgtggaggagccgctatctaacctgaaaaagaagatagatgagagtaagaaaagagtaaacaagaaggcacctcaggttaagaaacctcctgttaattcattgtcgactgtagaaaatgtagacgagccaaggagtgaaggcaaccaagatacaggaaatgaggaacaacttaggaacgaaaccaagttgttttctgcaaatggatctcaactgaacgccggaaccaaatttggtcaagagatggaaaattgctttctgtctggactggtgctgcacttcagcaggccatgcgctgttccatcacagtgtgaccttatcaagatctttagccaatacggtcctgtcaatgaagtgaaggcagatgttgcaaacagtgccagctctgcccaggtgatcttcaagaggcgcatggatgctgaggcagcgtttgcaggtgctgggaagatcagtgcccttggacctgcccttgtgagctttcgtctcactgacttcccagctagtgcttcaggaaataaagcttcccatgttgcatcaaagagcgaatagtgttgcttgaccagtgagggaaactggatgggggagttagagaaaaaggtatactctactgtatgtggtagttaggttgttgcaggattaagaggaacagcaatgtcatctgggtcttccagtgttgtggaggtgtcatactcactatcatttatgctgcagaccagttcagatgagttgccaataaccattaggtgttgtaaaagcaaggttcaagaaa

SEQ ID NO: 30686 - DNA, 3654 bp, Zea Mays
ctcactcacttcgcctgtaaggaaggaagaaggaagggatacgattattattgcaattgaaagcgatggcatcaagcagcagcctcaatccctcctcctattcgtgcttcctcttcgtcaccgccgccgccgtcttcttcaccgcctccgatgctcaggtgcctggattcgtcagcatcgactgcggcggctccaccaactacacggacgagctgggcctgcagtggacgggcgacgccggctggttccccttcggccagacggccaccatctccgtgccctccgagaaacgcgcgcagtactccacgctgcgctacttcccatcaccgtccgccagcagcagcagcagcagcaagcactgctacacgctgcacgtccgcacccgcacacgctacctcgtccgcgccaccttcctgtacggcaacttcgacagcagcaacgtgttcccggagttcgatctttaccttggcgcctcccactggtccaccatcgtcatctacgacgactccaaggtggtcaccagggaggccgtcgtcctcgccgccgaccccgccctcagcgtctgcctgtcgtccacggggacggggacgcccttcatctccacgctggagctccggcagctgaacggctccctctactacaccgactacgaggcggacgccttcctggccctctccgccaggatcaacttcggcgcgcccaccgccgaccccgtcaggtacccggacgacccctacgacaggatctgggagtcggacatggtgaggagggccaactacctggtggacgtggccgccggcaccgtcaacgtctccaccgacaggcccgtcttcgtggccggcagcgagaggcccccgcagaaggtgatgcagacggcggtggtcgggtcgctgggcgagctcacctatcgcctcgacctcccaggcttcccgggcaacggctgggccttctcgtacctggctgagatcgaggagttcttggtcccggagacgcgcaagttcaagctctacatcccggggctggcggacgtgagcaagcccacggtggacatcggcgagaacgcgccgggcaagtaccggctctacgagccaggcttccccaacatctcgctgcctttcgtcctgtccttggcgctgaggaagaccaacgattcgtccaaggggccaattctcaacgccttggagatatacaagtacatgcacatggaactcggctcaccggatggacctgtgatggcgaccctgagcctggccctggcgtcgtcgtcgtcgtccttggctgatgttgcaatggaaggcggtgatccctgcctaccttcaccctggtcctgggtcaagtgcaattcagaagcgcaaccaagagtagtttccataaatctttcaggaaagaacttgacagggagcataccaccccaagtagcggatttgccctgcttagcagagatcggatttgctaataacatgttgacgggcccaattcctgatctcagtggctcctccaacctatccatcattcatcttgagaacaaccaactgaccggaactgttccttcctactttggcagcttgccaaaactgagcgagctgtaccttgagaacaaccggttgtctggacccattcccaaggctctgctaagtcgaagcattattttcaactactctgggaacgtgtaccttggaacagcagggaagcaaaagaagaagcatgtcatcatcattatatctgctctgcttggagcatccttgctacttgcagccgccctctgttgctatatgctgacacgcaaggccatgaattcatcatcctcaccacaagcacaagagcagaacaagttgcagaaatacccaagcacgcagcagctgcagtcgatcgccaccgagacggctcatccctacagcctgtgtgagctggaagaggcgaccaacaagttcgcgagcaggatcggctcagggggtttcgggatagtgtactacgggaagctgagcgatggaaaggagatcgctgtgaaggtgcctagcaacgattcgtaccaggggaagaagcagttctcgaacgaggtggtcttgctctcgaggatacaccataggaacctagtggcgtttctaggctactgccatgaggatgggagaaacattctggtctacgagttcatgcacaatggaacgctcaaagagcagctgcataggcgcgacaagcacatcagttggatcaagcggcttgagattgccgaggatgctgcgaaaggcatcgagtatcttcacactggatgcacgccatcgatcatccacagagacatcaagacgagcaacatccttctggacaagcatatgagagccaaggtgtccgactttgggctatccaagttgctggcagcggagggcaaggactctcacgcgtcaaccaacgtgagagggacaatgggctacctggacccgcagtactacgtctctcagcagctgaccgagaagagcgacatgtacagcttcggcatcatcctgctggagctcatatccggctgtcctcccatctccaccatcgccttcggggacaacttccgcaacatcgggccgtgggccaagttctactacgagagcggcgacatcgaggccataatcgacccctccatctccacggcggccgagtaccaggacgtgcagtccgtctggaagatcgccgaggcggcggtccggtgcatcgacgcagagcctcggaagcggccctgcatgcctgaggtggttaaggagatccaggatgcattggcgctggagcgggcggcggcggagacgaccaccagcgacagggcgctcgcctgccctttctcccccgcggctgcgagcgtcaggtccggcgggacaatgaggtcgcacgacatggtcatggacaacctgctgctcttggacgatgacgacgactccaccttctccggttcgaccgtcaccaagctcaagtacccggagctacgatagctgtgatggaaccaagctcaagcaggattgcaattaattagtatagtagtagtcagcaattcatttgagttagactgttagagcagtggtgagatagcagattttaatttgcagttgttgttacgttacattacattacgaatgtgtttggttggctggcctaactcaggaccaggcccatttgatacatgcacattatgtttggttgtctggtctagtttggaagctggctgaggcgggcccaactgactccgtggcctggcccgatcgaaacatagataacttacttcgctggctagcctggcccgtgttcgcccggataaaaatgtgttagggtttactcgcctctctctcgtctccggcttcactcgcagccgcatctgtggttctcacctcactcgtatggtaacacaatacgtgcggtcttgtgttatcggagcagcaagatcaagccgctgtacgtgaaggcgtcccggcggtacggcgagcgcctgcggctcggcgacgcggcgagcgagggcgaggagacggacgtggagcccgacccgtcccggcgccgccgtcccagggtccttcgtcgtcggccccagcgccgcagccggtggtggttgcctgcggcgtgcgagcgccctgcgccggcgtgcccgcggggctgaggcaggtgtgcaagcggctcagggagagccgg

SEQ ID NO: 30687 - DNA, 3748 bp, Zea Mays
ctcactcacttcgcctgtaaggaaggaagaaggaagggatacgattattattgcaattgaaagcgatggcatcaagcagcagcctcaatccctcctcctattcgtgcttcctcttcgtcaccgccgccgccgtcttcttcaccgcctccgatgctcaggtgcctggtgagttattgccttcagtgtggatatcgatcagttagcccaactgtgtagcacaaaacaaaaacaaatacgtaacgtactccacaggattcgtcagcatcgactgcggcggctccaccaactacacggacgagctgggcctgcagtggacgggcgacgccggctggttccccttcggccagacggccaccatctccgtgccctccgagaaacgcgcgcagtactccacgctgcgctacttcccatcaccgtccgccagcagcagcagcagcagcaagcactgctacacgctgcacgtccgcacccgcacacgctacctcgtccgcgccaccttcctgtacggcaacttcgacagcagcaacgtgttcccggagttcgatctttaccttggcgcctcccactggtccaccatcgtcatctacgacgactccaaggtggtcaccagggaggccgtcgtcctcgccgccgaccccgccctcagcgtctgcctgtcgtccacggggacggggacgcccttcatctccacgctggagctccggcagctgaacggctccctctactacaccgactacgaggcggacgccttcctggccctctccgccaggatcaacttcggcgcgcccaccgccgaccccgtcaggtacccggacgacccctacgacaggatctgggagtcggacatggtgaggagggccaactacctggtggacgtggccgccggcaccgtcaacgtctccaccgacaggcccgtcttcgtggccggcagcgagaggcccccgcagaaggtgatgcagacggcggtggtcgggtcgctgggcgagctcacctatcgcctcgacctcccaggcttcccgggcaacggctgggccttctcgtacctggctgagatcgaggagttcttggtcccggagacgcgcaagttcaagctctacatcccggggctggcggacgtgagcaagcccacggtggacatcggcgagaacgcgccgggcaagtaccggctctacgagccaggcttccccaacatctcgctgcctttcgtcctgtccttggcgctgaggaagaccaacgattcgtccaaggggccaattctcaacgccttggagatatacaagtacatgcacatggaactcggctcaccggatggacctgtgatggcgaccctgagcctggccctggcgtcgtcgtcgtcgtccttggctgatgttgcaatggaaggcggtgatccctgcctaccttcaccctggtcctgggtcaagtgcaattcagaagcgcaaccaagaaaatctttcaggaaagaacttgacagggagcataccaccccaagtagcggatttgccctgcttagcagagatcggatttgctaataacatgttgacgggcccaattcctgatctcagtggctcctccaacctatccatcattcatcttgagaacaaccaactgaccggaactgttccttcctactttggcagcttgccaaaactgagcgagctgtaccttgagaacaaccggttgtctggacccattcccaaggctctgctaagtcgaagcattattttcaactactctgggaacgtgtaccttggaacagcagggaagcaaaagaagaagcatgtcatcatcattatatctgctctgcttggagcatccttgctacttgcagccgccctctgttgctatatgctgacacgcaaggccatgaattcatcatcctcaccacaagcacaagagaaggcgcttcctgcagagcagaacaagttgcagaaatacccaagcacgcagcagctgcagtcgatcgccaccgagacggctcatccctacagcctgtgtgagctggaagaggcgaccaacaagttcgcgagcaggatcggctcagggggtttcgggatagtgtactacgggaagctgagcgatggaaaggagatcgctgtgaaggtgcctagcaacgattcgtaccaggggaagaagcagttctcgaacgaggtggtcttgctctcgaggatacaccataggaacctagtggcgtttctaggctactgccatgaggatgggagaaacattctggtctacgagttcatgcacaatggaacgctcaaagagcagctgcataggcgcgacaagcacatcagttggatcaagcggcttgagattgccgaggatgctgcgaaaggcatcgagtatcttcacactggatgcacgccatcgatcatccacagagacatcaagacgagcaacatccttctggacaagcatatgagagccaaggtgtccgactttgggctatccaagttgctggcagcggagggcaaggactctcacgcgtcaaccaacgtgagagggacaatgggctacctggacccgcagtactacgtctctcagcagctgaccgagaagagcgacatgtacagcttcggcatcatcctgctggagctcatatccggctgtcctcccatctccaccatcgccttcggggacaacttccgcaacatcgggccgtgggccaagttctactacgagagcggcgacatcgaggccataatcgacccctccatctccacggcggccgagtaccaggacgtgcagtccgtctggaagatcgccgaggcggcggtccggtgcatcgacgcagagcctcggaagcggccctgcatgcctgaggtggttaaggagatccaggatgcattggcgctggagcgggcggcggcggagacgaccaccagcgacagggcgctcgcctgccctttctcccccgcggctgcgagcgtcaggtccggcgggacaatgaggtcgcacgacatggtcatggacaacctgctgctcttggacgatgacgacgactccaccttctccggttcgaccgtcaccaagctcaagtacccggagctacgatagctgtgatggaaccaagctcaagcaggattgcaattaattagtatagtagtagtcagcaattcatttgagttagactgttagagcagtggtgagatagcagattttaatttgcagttgttgttacgttacattacattacgaatgtgtttggttggctggcctaactcaggaccaggcccatttgatacatgcacattatgtttggttgtctggtctagtttggaagctggctgaggcgggcccaactgactccgtggcctggcccgatcgaaacatagataacttacttcgctggctagcctggcccgtgttcgcccggataaaaatgtgttagggtttactcgcctctctctcgtctccggcttcactcgcagccgcatctgtggttctcacctcactcgtatggtaacacaatacgtgcggtcttgtgttatcggagcagcaagatcaagccgctgtacgtgaaggcgtcccggcggtacggcgagcgcctgcggctcggcgacgcggcgagcgagggcgaggagacggacgtggagcccgacccgtcccggcgccgccgtcccagggtccttcgtcgtcggccccagcgccgcagccggtggtggttgcctgcggcgtgcgagcgccctgcgccggcgtgcccgcggggctgaggcaggtgtgcaagcggctcagggagagccgg

SEQ ID NO: 30688 - DNA, 3759 bp, Zea Mays
ctcactcacttcgcctgtaaggaaggaagaaggaagggatacgattattattgcaattgaaagcgatggcatcaagcagcagcctcaatccctcctcctattcgtgcttcctcttcgtcaccgccgccgccgtcttcttcaccgcctccgatgctcaggtgcctggtgagttattgccttcagtgtggatatcgatcagttagcccaactgtgtagcacaaaacaaaaacaaatacgtaacgtactccacaggattcgtcagcatcgactgcggcggctccaccaactacacggacgagctgggcctgcagtggacgggcgacgccggctggttccccttcggccagacggccaccatctccgtgccctccgagaaacgcgcgcagtactccacgctgcgctacttcccatcaccgtccgccagcagcagcagcagcagcaagcactgctacacgctgcacgtccgcacccgcacacgctacctcgtccgcgccaccttcctgtacggcaacttcgacagcagcaacgtgttcccggagttcgatctttaccttggcgcctcccactggtccaccatcgtcatctacgacgactccaaggtggtcaccagggaggccgtcgtcctcgccgccgaccccgccctcagcgtctgcctgtcgtccacggggacggggacgcccttcatctccacgctggagctccggcagctgaacggctccctctactacaccgactacgaggcggacgccttcctggccctctccgccaggatcaacttcggcgcgcccaccgccgaccccgtcaggtacccggacgacccctacgacaggatctgggagtcggacatggtgaggagggccaactacctggtggacgtggccgccggcaccgtcaacgtctccaccgacaggcccgtcttcgtggccggcagcgagaggcccccgcagaaggtgatgcagacggcggtggtcgggtcgctgggcgagctcacctatcgcctcgacctcccaggcttcccgggcaacggctgggccttctcgtacctggctgagatcgaggagttcttggtcccggagacgcgcaagttcaagctctacatcccggggctggcggacgtgagcaagcccacggtggacatcggcgagaacgcgccgggcaagtaccggctctacgagccaggcttccccaacatctcgctgcctttcgtcctgtccttggcgctgaggaagaccaacgattcgtccaaggggccaattctcaacgccttggagatatacaagtacatgcacatggaactcggctcaccggatggacctgtgatggcgaccctgagcctggccctggcgtcgtcgtcgtcgtccttggctgatgttgcaatggaaggcggtgatccctgcctaccttcaccctggtcctgggtcaagtgcaattcagaagcgcaaccaagagtagtttccataaatctttcaggaaagaacttgacagggagcataccaccccaagtagcggatttgccctgcttagcagagatcggatttgctaataacatgttgacgggcccaattcctgatctcagtggctcctccaacctatccatcattcatcttgagaacaaccaactgaccggaactgttccttcctactttggcagcttgccaaaactgagcgagctgtaccttgagaacaaccggttgtctggacccattcccaaggctctgctaagtcgaagcattattttcaactactctgggaacgtgtaccttggaacagcagggaagcaaaagaagaagcatgtcatcatcattatatctgctctgcttggagcatccttgctacttgcagccgccctctgttgctatatgctgacacgcaaggccatgaattcatcatcctcaccacaagcacaagagaaggcgcttcctgcagagcagaacaagttgcagaaatacccaagcacgcagcagctgcagtcgatcgccaccgagacggctcatccctacagcctgtgtgagctggaagaggcgaccaacaagttcgcgagcaggatcggctcagggggtttcgggatagtgtactacgggaagctgagcgatggaaaggagatcgctgtgaaggtgcctagcaacgattcgtaccaggggaagaagcagttctcgaacgaggtggtcttgctctcgaggatacaccataggaacctagtggcgtttctaggctactgccatgaggatgggagaaacattctggtctacgagttcatgcacaatggaacgctcaaagagcagctgcataggcgcgacaagcacatcagttggatcaagcggcttgagattgccgaggatgctgcgaaaggcatcgagtatcttcacactggatgcacgccatcgatcatccacagagacatcaagacgagcaacatccttctggacaagcatatgagagccaaggtgtccgactttgggctatccaagttgctggcagcggagggcaaggactctcacgcgtcaaccaacgtgagagggacaatgggctacctggacccgcagtactacgtctctcagcagctgaccgagaagagcgacatgtacagcttcggcatcatcctgctggagctcatatccggctgtcctcccatctccaccatcgccttcggggacaacttccgcaacatcgggccgtgggccaagttctactacgagagcggcgacatcgaggccataatcgacccctccatctccacggcggccgagtaccaggacgtgcagtccgtctggaagatcgccgaggcggcggtccggtgcatcgacgcagagcctcggaagcggccctgcatgcctgaggtggttaaggagatccaggatgcattggcgctggagcgggcggcggcggagacgaccaccagcgacagggcgctcgcctgccctttctcccccgcggctgcgagcgtcaggtccggcgggacaatgaggtcgcacgacatggtcatggacaacctgctgctcttggacgatgacgacgactccaccttctccggttcgaccgtcaccaagctcaagtacccggagctacgatagctgtgatggaaccaagctcaagcaggattgcaattaattagtatagtagtagtcagcaattcatttgagttagactgttagagcagtggtgagatagcagattttaatttgcagttgttgttacgttacattacattacgaatgtgtttggttggctggcctaactcaggaccaggcccatttgatacatgcacattatgtttggttgtctggtctagtttggaagctggctgaggcgggcccaactgactccgtggcctggcccgatcgaaacatagataacttacttcgctggctagcctggcccgtgttcgcccggataaaaatgtgttagggtttactcgcctctctctcgtctccggcttcactcgcagccgcatctgtggttctcacctcactcgtatggtaacacaatacgtgcggtcttgtgttatcggagcagcaagatcaagccgctgtacgtgaaggcgtcccggcggtacggcgagcgcctgcggctcggcgacgcggcgagcgagggcgaggagacggacgtggagcccgacccgtcccggcgccgccgtcccagggtccttcgtcgtcggccccagcgccgcagccggtggtggttgcctgcggcgtgcgagcgccctgcgccggcgtgcccgcggggctgaggcaggtgtgcaagcggctcagggagagccgg

SEQ ID NO: 30689 - DNA, 3261 bp, Zea Mays
gcgatcgccaccgtcccgccggcagcgtccgacctgatcgatccacggccgccgccaacgctcatccgtcccccgagcgatccggcggccgcgcggtgtgtcgtcgcatccccagagctcccttggtgacccacccatccggccacctccactgaactcaacaccgcaactgcttctctgcctccctccttccttcccggacccagtctcccagtcgcgtcgcatgctattcaaatctctcaccctcgccgcaaacgcagtccactgacttctaagcaaccctagctagctctgctccggccggcgcccatggtctcgcggggactcttcggctggtccccgccccacgtccagccgctcacgccggtctccgagacctccgagccgcccgagtcgccctccccctacgccgccgacctcggcctcggaggggacggcgctccgccgcctgacgacgatgcccaaccgcccctagacgatgccgacgacgacccggacccgccgcccgccgctgtccccttcaagcgcctcttcgcctgcgccgaccgcctcgactgggcgctcatggtcgccggcagcctcgcagccgctgcacacggagtcgcgctcgtcgtctacctccacctcttcggcaaagccatcaactcgcttcatgcccatgggcggcatacccacgacctcttccacgatatcaaccagcacgctttgtacttcctctatatagccattggcgttttctttgccgcatggatagaggtttcgtgctggattttgaccggggaaagacagacggcagtgattagatcaaagtatgttcaagtcctcttaaaccaggacatgagtttctttgatacatacggcaacaacggtgatattgtcagtcaagtactgagtgatgtcttgctcattcagtcagctctgagtgagaaagttggaaactacattcacaacatggctacatttttcggtggtcttgtcattggtctggtcaactgttggcaaatagctttattgacattagcaactgggcccttcatcgttgctgcaggaggaatatcaaatatatttctccataggcttgcagaaaatattcaggatgcttatggtgacgcagcaagcattgctgaacaggcaatcttgtacattaggaccttgtattccttcacaaatgagacccttgcaaaatattcttatgctacttcacttcaagcaacactgcgctatggaatccttataagtttggtgcaaggtcttggtcttggatttacatatggccttgccatatgttcttgtgccttacaactttgggttgggaggttcctgatctctcatggaagagctaatggtggtgaagttgtagtagcactgtttgctattatcttgagtggacttggacttaatcaagcagcaacaaacttctattcctttgagcaaggacgtatagctgcatacagactatatgaaatgataagccgttcaacatctactgtgaaccaggatggtagtaccttgtcttcagttcaaggcaacatcgagttccgcaatgtctacttcagctacttgtcccgccctgaaatccccatcttaagtggattctacctcactgtacctgctagaaaaactgttgctcttgttggcagaaatggttcaggaaaaagcagcataattcctctaatggaacgcttctatgacccaaccttaggtgaagtgcttttggatggggagaacataaagaatttgaagctagagtggttaagaagccaaataggacttgtgactcaagaaccagctttgttgagcttgagcatcatggaaaatattgcatatggtagatgtgccacaactgaccaaattgaagaggcagctaaaacagctcacgtgcatgctttcatcagttcactagaaaaaggatatgaaacacaggttggtcgggctggcctttctctgacagaagaacaaaagataaaactttccattgctcgtgctgtgctctcaaatccatcaattcttctactggatgaggtcactggtgctcttgattttgaggcagagaaagcagtccaggaagcactagacattctaatgcttgggaggtctaccatcatcatagctcggcgcctcagtcttatcaggaatgctgattatatagcagtaatggaggaaggtcaacttgttgagatggggacacatgaagaattgttaaaccttgatggtctttatgcagaacttcttaggtgtgaagaagccgcaaaactcccaaagagaacaccgatgagaaattataaagagccaagctccttccaaattgaaagggattcgtcagcaggtcacaactttcaagaatcatcttctccaaagatgtcaaaatcgccatcacttcagaaaacacatggctttctcacattccgaacttcagatgccaatcataactcacatgaatcaccaaatattcaaagccccccttcagagcaaatggcagaagccaggctaccaatggttgcatctgagagagctccatccatcaaaaggcaggacagttttgaaatgaaattgcctgatcttcccaaaattgatgtcccgctgcatcgacagtcgtcaaatacatcagacccagaatctccaatatctccattgttgacttctgatccaaaaaatgagcgctcccactcaaaaactttcagccggcctcttgtcatctttgatagttttcatgctgaggattccaagcagcagcacacaaaagcaccatctttttggaggcttgcagagcttagttttgcggaatatttttatgctctgttaggaagtgctggggctgcttgtttcggttcatttaatcctcttcttgcttatacaatatctcttatagtagtggcctactacaaaataggggtccgtgatgtacatgccgaagtgaataagtactgctcattcattgttggcatgggtataattactgtactagccaacttcttgcagcacttctactttggtataatgggagagaaaatgaccgagcgtgtcagaaggatgatgttttctgcaattctgcgcaatgaagttggttggtttgacgacgaagaaaatagtgcagacatattatcaatgagacttgcaaatgatgcaacatttgtccgcgctgctttcagtaacagactttctatattcattcaggatacatcggccattcttgttgcacttcttcttgctctcatccatttcaacatccaacataattttactatattcctaagaagggcg

SEQ ID NO: 30690 - DNA, 3698 bp, Zea Mays
gcgatcgccaccgtcccgccggcagcgtccgacctgatcgatccacggccgccgccaacgctcatccgtcccccgagcgatccggcggccgcgcggtgtgtcgtcgcatccccagagctcccttggtgacccacccatccggccacctccactgaactcaacaccgcaactgcttctctgcctccctccttccttcccggacccagtctcccagtcgcgtcgcatgctattcaaatctctcaccctcgccgcaaacgcagtccactgacttctaagcaaccctagctagctctgctccggccggcgcccatggtctcgcggggactcttcggctggtccccgccccacgtccagccgctcacgccggtctccgagacctccgagccgcccgagtcgccctccccctacgccgccgacctcggcctcggaggggacggcgctccgccgcctgacgacgatgcccaaccgcccctagacgatgccgacgacgacccggacccgccgcccgccgctgtccccttcaagcgcctcttcgcctgcgccgaccgcctcgactgggcgctcatggtcgccggcagcctcgcagccgctgcacacggagtcgcgctcgtcgtctacctccacctcttcggcaaagccatcaactcgcttcatgcccatgggcggcatacccacgacctcttccacgatatcaaccagcacgctttgtacttcctctatatagccattggcgttttctttgccgcatggatagaggtttcgtgctggattttgaccggggaaagacagacggcagtgattagatcaaagtatgttcaagtcctcttaaaccaggacatgagtttctttgatacatacggcaacaacggtgatattgtcagtcaagtactgagtgatgtcttgctcattcagtcagctctgagtgagaaagttggaaactacattcacaacatggctacatttttcggtggtcttgtcattggtctggtcaactgttggcaaatagctttattgacattagcaactgggcccttcatcgttgctgcaggaggaatatcaaatatatttctccataggcttgcagaaaatattcaggatgcttatggtgacgcagcaagcattgctgaacaggcaatcttgtacattaggaccttgtattccttcacaaatgagacccttgcaaaatattcttatgctacttcacttcaagcaacactgcgctatggaatccttataagtttggtgcaaggtcttggtcttggatttacatatggccttgccatatgttcttgtgccttacaactttgggttgggaggttcctgatctctcatggaagagctaatggtggtgaagttgtagtagcactgtttgctattatcttgagtggacttggacttaatcaagcagcaacaaacttctattcctttgagcaaggacgtatagctgcatacagactatatgaaatgataagccgttcaacatctactgtgaaccaggatggtagtaccttgtcttcagttcaaggcaacatcgagttccgcaatgtctacttcagctacttgtcccgccctgaaatccccatcttaagtggattctacctcactgtacctgctagaaaaactgttgctcttgttggcagaaatggttcaggaaaaagcagcataattcctctaatggaacgcttctatgacccaaccttaggtgaagtgcttttggatggggagaacataaagaatttgaagctagagtggttaagaagccaaataggacttgtgactcaagaaccagctttgttgagcttgagcatcatggaaaatattgcatatggtagatgtgccacaactgaccaaattgaagaggcagctaaaacagctcacgtgcatgctttcatcagttcactagaaaaaggatatgaaacacaggttggtcgggctggcctttctctgacagaagaacaaaagataaaactttccattgctcgtgctgtgctctcaaatccatcaattcttctactggatgaggtcactggtgctcttgattttgaggcagagaaagcagtccaggaagcactagacattctaatgcttgggaggtctaccatcatcatagctcggcgcctcagtcttatcaggaatgctgattatatagcagtaatggaggaaggtcaacttgttgagatggggacacatgaagaattgttaaaccttgatggtctttatgcagaacttcttaggtgtgaagaagccgcaaaactcccaaagagaacaccgatgagaaattataaagagccaagctccttccaaattgaaagggattcgtcagcaggtcacaactttcaagaatcatcttctccaaagatgtcaaaatcgccatcacttcagaaaacacatggctttctcacattccgaacttcagatgccaatcataactcacatgaatcaccaaatattcaaagccccccttcagagcaaatggcagaagccaggctaccaatggttgcatctgagagagctccatccatcaaaaggcaggacagttttgaaatgaaattgcctgatcttcccaaaattgatgtcccgctgcatcgacagtcgtcaaatacatcagacccagaatctccaatatctccattgttgacttctgatccaaaaaatgagcgctcccactcaaaaactttcagccggcctcttgtcatctttgatagttttcatgctgaggattccaagcagcagcacacaaaagcaccatctttttggaggcttgcagagcttagttttgcggaatatttttatgctctgttaggaagtgctggggctgcttgtttcggttcatttaatcctcttcttgcttatacaatatctcttatagtagtggcctactacaaaataggggtccgtgatgtacatgccgaagtgaataagtactgctcattcattgttggcatgggtataattactgtactagccaacttcttgcagcacttctactttggtataatgggagagaaaatgaccgagcgtgtcagaaggatgatgttttctgcaattctgcgcaatgaagttggttggtttgacgacgaagaaaatagtgcagacatattatcaatgagacttgcaaatgatgcaacatttgtccgcgctgctttcagtaacagactttctatattcattcaggatacatcggccattcttgttgcacttcttcttggtatgttactacaatggcgtgttgctcttgttgcattggcaacgttacccatccttatcatttctgcggttgcacagaaaatgagatattcgtgtatggagaaagcaccctttcctggcagtaccatcgttgttggggaggtgtatgagggggctaagtttgtcgcacttttgacattttctcaggaatggtgctccttttttttatctgtctgatgaactggaggttttttttcttcttatcattatatgtctacggcaccatttcctatctgtttgtagcagcccgttaaatttattaatttgggaagggtctattctgagggaaggagtagagcaataccatgtaacctctgcccgcagttgctggtcttcaaatttatagagaagggggatgttgatgcaagtctgcttggttgagctgcgtcctgtattctagttctagatgaggaaaccctgggctgtgttgatgcaaataatctttttttttt

SEQ ID NO: 30691 - DNA, 3397 bp, Zea Mays
cagagctcccttggtgacccacccatccggccacctccactgaactcaacaccgcaactgcttctctgcctccctccttccttcccggacccagtctcccagtcgcgtcgcatgctattcaaatctctcaccctcgccgcaaacgcagtccactgacttctaagcaaccctagctagctctgctccggccggcgcccatggtctcgcggggactcttcggctggtccccgccccacgtccagccgctcacgccggtctccgagacctccgagccgcccgagtcgccctccccctacgccgccgacctcggcctcggaggggacggcgctccgccgcctgacgacgatgcccaaccgcccctagacgatgccgacgacgacccggacccgccgcccgccgctgtccccttcaagcgcctcttcgcctgcgccgaccgcctcgactgggcgctcatggtcgccggcagcctcgcagccgctgcacacggagtcgcgctcgtcgtctacctccacctcttcggcaaagccatcaactcgcttcatgcccatgggcggcatacccacgacctcttccacgatatcaaccaggcaattgcatatgcgctcttcattcctcttcttacccaccctgttggaaactacattcacaacatggctacatttttcggtggtcttgtcattggtctggtcaactgttggcaaatagctttattgacattagcaactgggcccttcatcgttgctgcaggaggaatatcaaatatatttctccataggcttgcagaaaatattcaggatgcttatggtgacgcagcaagcattgctgaacaggcaatcttgtacattaggaccttgtattccttcacaaatgagacccttgcaaaatattcttatgctacttcacttcaagcaacactgcgctatggaatccttataagtttggtgcaaggtcttggtcttggatttacatatggccttgccatatgttcttgtgccttacaactttgggttgggaggttcctgatctctcatggaagagctaatggtggtgaagttgtagtagcactgtttgctattatcttgagtggacttggacttaatcaagcagcaacaaacttctattcctttgagcaaggacgtatagctgcatacagactatatgaaatgataagccgttcaacatctactgtgaaccaggatggtagtaccttgtcttcagttcaaggcaacatcgagttccgcaatgtctacttcagctacttgtcccgccctgaaatccccatcttaagtggattctacctcactgtacctgctagaaaaactgttgctcttgttggcagaaatggttcaggaaaaagcagcataattcctctaatggaacgcttctatgacccaaccttaggtgaagtgcttttggatggggagaacataaagaatttgaagctagagtggttaagaagccaaataggacttgtgactcaagaaccagctttgttgagcttgagcatcatggaaaatattgcatatggtagatgtgccacaactgaccaaattgaagaggcagctaaaacagctcacgtgcatgctttcatcagttcactagaaaaaggatatgaaacacaggttggtcgggctggcctttctctgacagaagaacaaaagataaaactttccattgctcgtgctgtgctctcaaatccatcaattcttctactggatgaggtcactggtgctcttgattttgaggcagagaaagcagtccaggaagcactagacattctaatgcttgggaggtctaccatcatcatagctcggcgcctcagtcttatcaggaatgctgattatatagcagtaatggaggaaggtcaacttgttgagatggggacacatgaagaattgttaaaccttgatggtctttatgcagaacttcttaggtgtgaagaagccgcaaaactcccaaagagaacaccgatgagaaattataaagagccaagctccttccaaattgaaagggattcgtcagcaggtcacaactttcaagaatcatcttctccaaagatgtcaaaatcgccatcacttcagaaaacacatggctttctcacattccgaacttcagatgccaatcataactcacatgaatcaccaaatattcaaagccccccttcagagcaaatggcagaagccaggctaccaatggttgcatctgagagagctccatccatcaaaaggcaggacagttttgaaatgaaattgcctgatcttcccaaaattgatgtcccgctgcatcgacagtcgtcaaatacatcagacccagaatctccaatatctccattgttgacttctgatccaaaaaatgagcgctcccactcaaaaactttcagccggcctcttgtcatctttgatagttttcatgctgaggattccaagcagcagcacacaaaagcaccatctttttggaggcttgcagagcttagttttgcggaatatttttatgctctgttaggaagtgctggggctgcttgtttcggttcatttaatcctcttcttgcttatacaatatctcttatagtagtggcctactacaaaataggggtccgtgatgtacatgccgaagtgaataagtactgctcattcattgttggcatgggtataattactgtactagccaacttcttgcagcacttctactttggtataatgggagagaaaatgaccgagcgtgtcagaaggatgatgttttctgcaattctgcgcaatgaagttggttggtttgacgacgaagaaaatagtgcagacatattatcaatgagacttgcaaatgatgcaacatttgtccgcgctgctttcagtaacagactttctatattcattcaggatacatcggccattcttgttgcacttcttcttggtatgttactacaatggcgtgttgctcttgttgcattggcaacgttacccatccttatcatttctgcggttgcacagaaaatgagatattcgtgtatggagaaagcaccctttcctggcagtaccatcgttgttggggaggtgtatgagggggctaagtttgtcgcacttttgacattttctcaggaatggtgctccttttttttatctgtctgatgaactggaggttttttttcttcttatcattatatgtctacggcaccatttcctatctgtttgtagcagcccgttaaatttattaatttgggaagggtctattctgagggaaggagtagagcaataccatgtaacctctgcccgcagttgctggtcttcaaatttatagagaagggggatgttgatgcaagtctgcttggttgagctgcgtcctgtattctagttctagatgaggaaaccctgggctgtgttgatgcaaataatctttttttttt

SEQ ID NO: 30692 - DNA, 1389 bp, Zea Mays
agttctgtgaacttcagtgtaaggtcgctacttgtgtagaaatacaatggtatctgatatctctaatatctcaactcaaattaataacttgtgcgaggtgaatggatgaggattatgctcttgctcttactaccgctagttactatctttagggatgtttcctttttcatttctctagttctgttctttttatgtttcttttatatcgttcttgattatttccaggttattagtcttgttggagcacaaaaggcaactttgcatcctgatgatattttattacttgcgaatttcattctgtcctctggatcttttagaacttcagagtcttttgtacccatatgtttgccaagatacaatcctatggcctacttgcatgcttatgttcatttttttgacgaacatacatatgtgactttgcttactacacgatcagatgctttttatgatctcaaagattccagggcccacattcaaaatgctcttttaaagtcaaatgtcctcatcgaagtccaaagatctttacatgagaatgcattgcgtgttgaggatctcccaaccaacccgtcttctcaatctgcatcacaccctccagagtcctctcaagacattagttcacaatctttgtcttctgaaatggcaattggaggaccaggtggactatggcattttatatataaaagcatttaccttgaccagtttgtgtcatcagaatttccctcacccataagtaacaaaaagcagaagaagggattgtacaaagcttaccaaaaattgtatgcatccatgcatgataaagcaactggtccacacaaaactcaattcagaagagatgaggattatgttctattttgctggataacccaggatttcgaactatatgcagcctttaatccactggctgataagactcaagcaatcaagatgtgcaatagagtatgccaatgggtgagggatttagaaaatgagatattcgtgtatggagaaagcaccctttcctggtgatatgttgtcctgcagtaccatcgttgttggggaggtgtatgagggggctaagtttgtcgcacttttgacattttctcaggaatggtgctccttttttttatctgtctgatgaactggaggttttttttcttcttatcattatatgtctacggcaccatttcctatctgtttgtagcagcccgttaaatttattaatttgggaagggtctattctgagggaaggagtagagcaataccatgtaacctctgcccgcagttgctggtcttcaaatttatagagaagggggatgttgatgcaagtctgcttggttgagctgcgtcctgtattctagttctagatgaggaaaccctgggctgtgttgatgcaaataatctttttttttt

SEQ ID NO: 30693 - DNA, 1160 bp, Zea Mays
cgctacttgtgtagaaatacaatggtatctgatatctctaatatctcaactcaaattaataacttgtgcgaggtgaatggatgaggattatgctcttgctcttactaccgctagttactatctttagggatgtttcctttttcatttctctagttctgttctttttatgtttcttttatatcgttcttgattatttccaggttattagtcttgttggagcacaaaaggcaactttgcatcctgatgatattttattacttgcgaatttcattctgtcctctggatcttttagaacttcagagtcttttgtacccatatgtttgccaagatacaatcctatggcctacttgcatgcttatgttcatttttttgacgaacatacatatgtgactttgcttactacacgatcagatgctttttatgatctcaaagattccagggcccacattcaaaatgctcttttaaagtcaaatgtcctcatcgaagtccaaagatctttacatgagaatgcattgcgtgttgaggatctcccaaccaacccgtcttctcaatctgcatcacaccctccagagtcctctcaagacattagttcacaatctttgtcttctgaaatggcaattggaggaccagttctattttgctggataacccaggatttcgaactatatgcagcctttaatccactggctgataagactcaagcaatcaagatgtgcaatagagtatgccaatgggtgagggatttagaaaatgagatattcgtgtatggagaaagcaccctttcctggcagtaccatcgttgttggggaggtgtatgagggggctaagtttgtcgcacttttgacattttctcaggaatggtgctccttttttttatctgtctgatgaactggaggttttttttcttcttatcattatatgtctacggcaccatttcctatctgtttgtagcagcccgttaaatttattaatttgggaagggtctattctgagggaaggagtagagcaataccatgtaacctctgcccgcagttgctggtcttcaaatttatagagaagggggatgttgatgcaagtctgcttggttgagctgcgtcctgtattctagttctagatgaggaaaccctgggctgtgttgatgcaaataatctttttttttt

SEQ ID NO: 30694 - DNA, 1086 bp, Zea Mays
atgtttcttttatatcgttcttgattatttccaggttattagtcttgttggagcacaaaaggcaactttgcatcctgatgatattttattacttgcgaatttcattctgtcctctggatcttttagaacttcagagtcttttgtacccatatgtttgccaagatacaatcctatggcctacttgcatgcttatgttcatttttttgacgaacatacatatgtgactttgcttactacacgatcagatgctttttatgatctcaaagattccagggcccacattcaaaatgctcttttaaagtcaaatgtcctcatcgaagtccaaagatctttacatgagaatgcattgcgtgttgaggatctcccaaccaacccgtcttctcaatctgcatcacaccctccagagtcctctcaagacattagttcacaatctttgtcttctgaaatggcaattggaggaccagattgtacaaagcttaccaaaaattgtatgcatccatgcatgataaagcaactggtccacacaaaactcaattcagaagagatgaggattatgttctattttgctggataacccaggatttcgaactatatgcagcctttaatccactggctgataagactcaagcaatcaagatgtgcaatagagtatgccaatgggtgagggatttagaaaatgagatattcgtgtatggagaaagcaccctttcctggcagtaccatcgttgttggggaggtgtatgagggggctaagtttgtcgcacttttgacattttctcaggaatggtgctccttttttttatctgtctgatgaactggaggttttttttcttcttatcattatatgtctacggcaccatttcctatctgtttgtagcagcccgttaaatttattaatttgggaagggtctattctgagggaaggagtagagcaataccatgtaacctctgcccgcagttgctggtcttcaaatttatagagaagggggatgttgatgcaagtctgcttggttgagctgcgtcctgtattctagttctagatgaggaaaccctgggctgtgttgatgcaaataatctttttttttt

SEQ ID NO: 30695 - DNA, 1235 bp, Zea Mays
gactacttgggtgtcatctcgagcttgtgcagagacattttgcatttcatagtcccatgctaccacgacctttattgttcttgctgaactctagtttagaaattgtcaatactgactggtgacagattaggggattttcatcaatacgtccatttcagggtcactcttcatctataccaccaacaaagctagccaatgacacgttgggtctggttctaaatgttcgtgtttttactggtgttcgagggaaattgagtgtggaacatacatatgtgactttgcttactacacgatcagatgctttttatgatctcaaagattccagggcccacattcaaaatgctcttttaaagtcaaatgtcctcatcgaagtccaaagatctttacatgagaatgcattgcgtgttgaggatctcccaaccaacccgtcttctcaatctgcatcacaccctccagagtcctctcaagacattagttcacaatctttgtcttctgaaatggcaattggaggaccaggtggactatggcattttatatataaaagcatttaccttgaccagtttgtgtcatcagaatttccctcacccataagtaacaaaaagcagaagaagggattgtacaaagcttaccaaaaattgtatgcatccatgcatgataaagcaactggtccacacaaaactcaattcagaagagatgaggattatgttctattttgctggataacccaggatttcgaactatatgcagcctttaatccactggctgataagactcaagcaatcaagatgtgcaatagagtatgccaatgggtgagggatttagaaaatgagatattcgtgtatggagaaagcaccctttcctggcagtaccatcgttgttggggaggtgtatgagggggctaagtttgtcgcacttttgacattttctcaggaatggtgctccttttttttatctgtctgatgaactggaggttttttttcttcttatcattatatgtctacggcaccatttcctatctgtttgtagcagcccgttaaatttattaatttgggaagggtctattctgagggaaggagtagagcaataccatgtaacctctgcccgcagttgctggtcttcaaatttatagagaagggggatgttgatgcaagtctgcttggttgagctgcgtcctgtattctagttctagatgaggaaaccctgggctgtgttgatgcaaataatctttttttttt

SEQ ID NO: 30696 - DNA, 2368 bp, Zea Mays
ttttgcctggaatgcccagcttttaaattgcatgttaggaacaccatgaccaccataacttagaggcctcgtaattatcccccaagacactagacaactttcaccattaacctcctttccccttttccaaagaaacccccatcaaattttgtcaattgatttaatcacccacttaggagcggcccggcggcaaggagccgtggcacagctccgaggctaggggaggtccgactgtgcggcctcgcagcgggagccgcggctcggcccatggcggaagagcagagccaccccacgacaggattcgacgcagccccgacccgtgacagaggggcggagcggccccgcgcctaccgcgtgcaatgagaggtgcggctccggtccgcggcggaggggtggcggctggcctggaggtggacggagtggaggaggggcacatgcatgtcgacgcttgctaccgcctccatggcggcgcgcagagtggcccgaccggcgccgaagtccgcggctgtcaccacgacggcgtacggagaagccccaatctcgcggatccacataccctcaggtgacactcccgatctgttgctgctggatgacgcgacgcgcagcgggatcagatggatccgccgtggaaatgaggacgatgaacacggcggtcatagggatcggccgcgcatcctaggagggcgctgcccccggcggagaacagtctccccgggggcggcgcagccgtggcagcggaagacgtctgttggatctaaaacctaaactcgtaataccatgaaggaaggagagaatgtgtataatgtgtaatgttcattgcctgagccctcgagatgtttatcatggcttggagggcaaggcgcctctcctagagataaggaaggctatcatgggattacaatcaatcctaaactatccatatccggtgttgcctaatatactctaacacgattgaaggcttgatatcaaccaccaacgatttaacttgagtctcttttagcacggtcattaagacctcttacattccagatcagaaaatggctagattccataataaaacaaaaagaagactaccagcgattctccacataacagcacctaaacagaggttagtggcttaccaaaacttcacccatgagccggattggacccaaaaataactaacagattgagcccaaaagtagctaatggtctaaaacgcatgaaacacaacattttacagtttagaacgccaaaatgtggttttaacctttaattagcgttttgacgtttaaacgtagttttaataataccggcatggcatgcatctctaccgcatattcgagaaaaaagaagaatttcacagtgatttttcttctaccttctatgcagagaagacatttctgggaagaaggtatatgcggggcttttataacgatgttgctcggctgcaggatgtgcgtaaaatattccctcattgcagctcagatatggaaccggggcagtgcttcttcccacaagaagttgcaaaaagcatcaccaccccgatgtttatactcaatccagcatatgatgtttggcaggtagagcatgtgttgtctccagaaggttctgaccgtgaaaatctatggcaaaattgcaggatggatattagcaggtttcaggaaagcgctgcttgatgctataaatgaattcaagaagagaagggactggggtatgttcattgactcctgctttatacactgtcagtcaatgaaagctttggcttggcattcgccatcagctgctagagtgaacaacaagacggccgcagaagcggtgggagattggttctttgagcggagggaggtgaaggaaatagattgtgaatatccctgcaacccgacatgctacaatgtggttctcgatcagccctacaaggaagattaactgacttgcagtgttagttgtggtagatttaattcgtaattgactctccatgagttgatatttgtcgagctaaatgtgatcattagcagagttcggactgagacttgtacttgaggcctattaaaatacgaggagaacaatacttacaaagagaattctatacaatgagcgttgatatgacatacagtaggatatatgtgtgtgtcacgagacgagagggaccttgtccttgaaacagggtaggccatcgttttctttgagagggacattgtgctgtgcatggagagataggtaaggctgacaagttgaccaacgcaacagcatgctgtgtattcaccacgtcatctgttgtatttttttgttgttgttgttcaggttggctgatgacagtggcaagggatgttgtctccgtgagcggagcctggttggttgatgcgtttgtgttctccgggggtccagt

SEQ ID NO: 30697 - DNA, 2341 bp, Zea Mays
ttttgcctggaatgcccagcttttaaattgcatgttaggaacaccatgaccaccataacttagaggcctcgtaattatcccccaagacactagacaactttcaccattaacctcctttccccttttccaaagaaacccccatcaaattttgtcaattgatttaatcacccacttaggagcggcccggcggcaaggagccgtggcacagctccgaggctaggggaggtccgactgtgcggcctcgcagcgggagccgcggctcggcccatggcggaagagcagagccaccccacgacaggattcgacgcagccccgacccgtgacagaggggcggagcggccccgcgcctaccgcgtgcaatgagaggtgcggctccggtccgcggcggaggggtggcggctggcctggaggtggacggagtggaggaggggcacatgcatgtcgacgcttgctaccgcctccatggcggcgcgcagagtggcccgaccggcgccgaagtccgcggctgtcaccacgacggcgtacggagaagccccaatctcgcggatccacataccctcaggtgacactcccgatctgttgctgctggatgacgcgacgcgcagcgggatcagatggatccgccgtggaaatgaggacgatgaacacggcggtcatagggatcggccgcgcatcctaggagggcgctgcccccggcggagaacagtctccccgggggcggcgcagccgtggcagcggaagacgtctgttggatctaaaacctaaactcgtaataccatgaaggaaggagagaatgtgtataatgtgtaatgttcattgcctgagccctcgagatgtttatcatggcttggagggcaaggcgcctctcctagagataaggaaggctatcatgggattacaatcaatcctaaactatccatatccggtgttgcctaatatactctaacacgattgaaggcttgatatcaaccaccaacgatttaacttgagtctcttttagcacggtcattaagacctcttacattccagatcagaaaatggctagattccataataaaacaaaaagaagactaccagcgattctccacataacagcacctaaacagaggttagtggcttaccaaaacttcacccatgagccggattggacccaaaaataactaacagattgagcccaaaagtagctaatggtctaaaacgcatgaaacacaacattttacagtttagaacgccaaaatgtggttttaacctttaattagcgttttgacgtttaaacgtagttttaataataccggcatggcatgcatctctaccgcatattcgagaaaaaagaagaatttcacagtgatttttcttctaccttctatgcagagaagacatttctgggaagaaggtatatgcggggcttttataacgatgttgctcggctgcaggatgtgcgtaaaatattccctcattgcagctcagatatggaaccggggcagtgcttcttcccacaagaagttgcaaaaagcatcaccaccccgatgtttatactcaatccagcatatgatgtttggcaggatggatattagcaggtgtagctcaaaacagcttgaagttcttcaaggtttcaggaaagcgctgcttgatgctataaatgaattcaagaagagaagggactggggtatgttcattgactcctgctttatacactgtcagtcaatgaaagctttggcttggcattcgccatcagctgctagagtgaacaacaagacggccgcagaagcggtgggagattggttctttgagcggagggaggtgaaggaaatagattgtgaatatccctgcaacccgacatgctacaatgtggttctcgatcagccctacaaggaagattaactgacttgcagtgttagttgtggtagatttaattcgtaattgactctccatgagttgatatttgtcgagctaaatgtgatcattagcagagttcggactgagacttgtacttgaggcctattaaaatacgaggagaacaatacttacaaagagaattctatacaatgagcgttgatatgacatacagtaggatatatgtgtgtgtcacgagacgagagggaccttgtccttgaaacagggtaggccatcgttttctttgagagggacattgtgctgtgcatggagagataggtaaggctgacaagttgaccaacgcaacagcatgctgtgtattcaccacgtcatctgttgtatttttttgttgttgttgttcaggttggctgatgacagtggcaagggatgttgtctccgtgagcggagcctggttggttgatgcgtttgtgttctccgggggtccagt

SEQ ID NO: 30698 - DNA, 1591 bp, Zea Mays
ttttgcctggaatgcccagcttttaaattgcatgttaggaacaccatgaccaccataacttagaggcctcgtaattatcccccaagacactagacaactttcaccattaacctcctttccccttttccaaagaaacccccatcaaattttgtcaattgatttaatcacccacttaggagcggcccggcggcaaggagccgtggcacagctccgaggctaggggaggtccgactgtgcggcctcgcagcgggagccgcggctcggcccatggcggaagagcagagccaccccacgacaggattcgacgcagccccgacccgtgacagaggggcggagcggccccgcgcctaccgcgtgcaatgagaggtgcggctccggtccgcggcggaggggtggcggctggcctggaggtggacggagtggaggaggggcacatgcatgtcgacgcttgctaccgcctccatggcggcgcgcagagtggcccgaccggcgccgaagtccgcggctgtcaccacgacggcgtacggagaagccccaatctcgcggatccacataccctcagagaagacatttctgggaagaaggtatatgcggggcttttataacgatgttgctcggctgcaggatgtgcgtaaaatattccctcattgcagctcagatatggaaccggggcagtgcttcttcccacaagaagttgcaaaaagcatcaccaccccgatgtttatactcaatccagcatatgatgtttggcaggtagagcatgtgttgtctccagaaggttctgaccgtgaaaatctatggcaaaattgcaggatggatattagcaggtgtagctcaaaacagcttgaagttcttcaaggtttcaggaaagcgctgcttgatgctataaatgaattcaagaagagaagggactggggtatgttcattgactcctgctttatacactgtcagtcaatgaaagctttggcttggcattcgccatcagctgctagagtgaacaacaagacggccgcagaagcggtgggagattggttctttgagcggagggaggtgaaggaaatagattgtgaatatccctgcaacccgacatgctacaatgtggttctcgatcagccctacaaggaagattaactgacttgcagtgttagttgtggtagatttaattcgtaattgactctccatgagttgatatttgtcgagctaaatgtgatcattagcagagttcggactgagacttgtacttgaggcctattaaaatacgaggagaacaatacttacaaagagaattctatacaatgagcgttgatatgacatacagtaggatatatgtgtgtgtcacgagacgagagggaccttgtccttgaaacagggtaggccatcgttttctttgagagggacattgtgctgtgcatggagagataggtaaggctgacaagttgaccaacgcaacagcatgctgtgtattcaccacgtcatctgttgtatttttttgttgttgttgttcaggttggctgatgacagtggcaagggatgttgtctccgtgagcggagcctggttggttgatgcgtttgtgttctccgggggtccagt

SEQ ID NO: 30699 - DNA, 1787 bp, Zea Mays
aagccccaatctcgcggatccacataccctcaggtgacactcccgatctgttgctgctggatgacgcgacgcgcagcgggatcagatggatccgccgtggaaatgaggacgatgaacacggcggtcatagggatcggccgcgcatcctaggagggcgctgcccccggcggagaacagtctccccgggggcggcgcagccgtggcagcggaagacgtctgttggatctaaaacctaaactcgtaataccatgaaggaaggagagaatgtgtataatgtgtaatgttcattgcctgagccctcgagatgtttatcatggcttggagggcaaggcgcctctcctagagataaggaaggctatcatgggattacaatcaatcctaaactatccatatccggtgttgcctaatatactctaacacgattgaaggcttgatatcaaccaccaacgatttaacttgagtctcttttagcacggtcattaagacctcttacattccagatcagaaaatggctagattccataataaaacaaaaagaagactaccagcgattctccacataacagcacctaaacagaggttagtggcttaccaaaacttcacccatgagccggattggacccaaaaataactaacagattgagcccaaaagtagctaatggtctaaaacgcatgaaacacaacattttacagtttagaacgccaaaatgtggttttaacctttaattagcgttttgacgtttaaacgtagttttaataataccggcatggcatgcatctctaccgcatattcgagaaaaaagaagaatttcacagtgatttttcttctaccttctatgcagagaagacatttctgggaagaaggtatatgcggggcttttataacgatgttgctcggctgcaggatgtgcgtaaaatattccctcattgcagctcagatatggaaccggggcagtgcttcttcccacaagaagttgcaaaaagcatcaccaccccgatgtttatactcaatccagcatatgatgtttggcaggtagagcatgtgttgtctccagaaggttctgaccgtgaaaatctatggcaaaattgcaggatggatattagcaggtgtagctcaaaacagcttgaagttcttcaaggtttcaggaaagcgctgcttgatgctataaatgaattcaagaagagaagggactggggtatgttcattgactcctgctttatacactgtcagtcaatgaaagctttggcttggcattcgccatcagctgctagagtgaacaacaagacggccgcagaagcggtgggagattggttctttgagcggagggaggtgaaggaaatagattgtgaatatccctgcaacccgacatgctacaatgtggttctcgatcagccctacaaggaagattaactgacttgcagtgttagttgtggtagatttaattcgtaattgactctccatgagttgatatttgtcgagctaaatgtgatcattagcagagttcggactgagacttgtacttgaggcctattaaaatacgaggagaacaatacttacaaagagaattctatacaatgagcgttgatatgacatacagtaggatatatgtgtgtgtcacgagacgagagggaccttgtccttgaaacagggtaggccatcgttttctttgagagggacattgtgctgtgcatggagagataggttggctgatgacagtggcaagggatgttgtctccgtgagcggagcctggttggttgatgcgtttgtgttctccgggggtccagt

SEQ ID NO: 30700 - DNA, 4904 bp, Zea Mays
ataatttgaacatccacccgaatgccgacgacgcccaccgcaccaccccaaagcccacaggaggaagacctagctagacacctgacctagggtttcccttccttggtctccttctccagggccgggagggaacccgtccatctctgagagccgagatcgctccatctcccccacatgccgctccgggagggagccaagcgtgtctccagcgcgcgccactatgcccccgccgcgccaacacccgcgcccgcgggggcacccgtcccgccccaccgcccgccgcgatctgtctccgccgctggctccatatccactgcctccgcccgcaagccgccagagccgcttcgaagggccgtcgccgactgcctctcgccgcccgccccgcacacccatggcccagctgcagccgccgcttctgccaccgcggaggcttcacggacgctccgggattatatagccaacccttcaaccatggatatggcttataatgtcctcattgaccatgcacttgcagaaagtgatcgtagcccagcagttgttccgagatgcgtgtcattgttaaagagatatcttatccggtacattccaagggtgcaaactctgcgacaaattgatctgttttgtgcgaatacgattgcaaaatgtgaaccgatggcaaataatagagcagcatcttttgccaagaataatgtatcagcagcagctgcaataaattcttcatcccttgccccaccaatatccaactttgcttcagcatctcttgtgaagtctttaaactatgttcgctcattggttgcaaggcatactccaaagttgtcattccaatcaatagtcgcggcaaagcagtcacttccttcactttcatcatttctgaataggtccttactttctcaactaactccagaagttattagcaacagagaacatcttgaatcgaaggaatgccatagctcacctgattttatatcatcagcaagtgaaaaagttgatgtgggtgaacctgtagatgatagcaaatatatatccttcgacattttaagctggcgatggcatgtgtatggcgaacggcagtcgtccttatctgccaaagaaagcagtgattttgtgggtcttcaagattttcatatacatggttttcttgaagtcggtgctgcagctcttctagttggggatatggatgcgaaaattaatgatcaacagtggaaatattctgttatccaggaatttccagatattgatttgttacaaccttcatcttctgccgcaagtacttttgcgtcatcacaaagtcatttaaaagcaataactgcttcaaaacgcatgagatcagctccaaatcaagtctggatgaacataccaataaacacattccagcctcgagcacggcctctttttcagtacagatactacagtgagcagcaacccttaagattgaatcctgctgaaatttctgaagtcatagctgaagtttgttcagaagcaacttcaaatgcaaatcagttgattgttccatcaagattgagcacccagagtcggcaaccttcagcagatgtggcattcagtgtccttatcaaacttgtcattgacatgtatatgatggactccgagactgctgctcctctgacactttatatgcttgagggtatgctgagctctcaaaagtcatcagccagaacgaaggctcttgatttgatcctaaatctgggggtacatgcacacctgctgcaacctatggttattggagatgcgccgcttatagataaaagtgaatctgtgaaccgttcttatctgagcaatgaatacggatcaagtataaatgaaccgagggaagcagaacctgaagtagaacagaagatcagtcctgctattgatcaatttgaatcatggcttcttaaaatgctttttgaggttctccttctcctagtacagatagaggagcgacaagagatcgtgtgggcctcagctttgagttgtctattttactttgtttgtgatggaggaaaaattatcaggagtagactgggaggtctggacataagggtggttaagactcttcttgagattagtgtggagcactcttgggcaaaagtagtgcacagcaagctcatttgcatgttatcaaatatgatgtaccaagtatcagatttaactcagaatggtgtttctgacacacattttgttcctgagcggattgatcttcttggtgggattgactacatttgtcttgagtattcacgagccaactcaagggaagagaagcgggatttgttctttgtcatttttgactacgtagtgcatcaaataaatgaggcatgcttggctggtggtatttcaacctatacttatgatgatgcccagccccttgcttcccttcttgcctttgctgatgctcctgaggctttctacatatctgtgaagcacggcgttgaaggcgtcggagacatgctaagaaaagctatatcagcagcattatctcagtctgctcaatatgaccaattgaatgtgcttctggataaggttatgaggaaacttgatggaactgccagcacattttccaggattgacaatgagttttcttatatgatccaagtaacgaaatcatgcaagtgttttggcagcattaaagatggatgtgatgatgctgatgtagcgcttagagccaggctttgctgggcaactttgcactcacttcttcactcacatatttcatcatataggcaccatggatatatttggttagttgaattgctcctttcagaaatcagtgaagaaacagatggttctgtatggtctaaaatccaaaagcttcaagaggaaattgaagttgctggtagccaagacctatcatgttcagaagtctctctgcctgtttgtatgctttgtgggcttctaaagtcaaaacacaatttcattaggtggggattcctatatgtgctggacaaatttcttatgcgttgcaaattattattggatgacaatgacatgcaagaccacacaactgctgatcataataaaaattgtcttgataaagcttttgcggttatagatattatgaatagtgctttgttacttgttgttcaaaacaatgagacggaccatatcaacatattaaagatgtgtgacatgctgttctctcaattatgcctgagaattccatccacaaatgcgatgcaagttaggggtcttcagtcccttggtcaactttttggttatacatctaagaacatcgatagtcatttggaaacccttgcatctcaccaaagtattggaaataagaatatttgccggagtgagacattgcaagatattggcatagatcaatctggtcaatccacttctttctgtgaagcatcaatggcagcactgcttctgagagggctcgcgatagccccaatgcagcttgtagcccgtgtaccaacctctttgtttttctggccattgatacagcttgaaggggcagccagtgatgacattgcattgggtattgctgttggtagcacaggaagaggcaaccttcctggtgctacatcagatatccgagcagcactccttttacttttgatcggtaaatgcacagctgatcaggaggcactgaaagaggtagaaggcaatgagttcttcaggggtcttctggatgacacagattcaagggtagcatactattctgccgcttttcttttgaagagaatgatgacagaggaaccagagatataccaacggatgcttcaaagcctcatctcaaaagctcaacagtgtaacaatgagaaacttctggagaacccataccttcagatgcgtgggatattgcagttatcaaatgacctaggagttcaatgataagatcgtgatgacatttcaatggataaagctctaagttagaatcactacttctggctgtgtttattgcagagaacctgaagatgttccgaactaaggtatgtccttctgaattattcattgttattgtcatcattataataatgtgaatttgcctgtaagttacttgacataatgcactctattatctttagaggaaacagtatgaaaggatcttactttggaatagagtatgaaatagaggaagcaccatgggagtaacactttttattttattttatgaactttaggcatttttctgcatcctgaacaaacttattctctgctctatggatgataattgcaatctcatgctcgaagattaatttttcctatgcatctgtgttgatggaccaaccctttccagtatcctgccacttcttatgatcaagattattttgtcgtttcttatgattgaaatgctaggctaccagaataacattctccatagtccctatttgtactatcgaggttactaatatttcttgtttgtagttttgcagatgctatgtgaatcatgtaaattattgctttggccagatgcatgtacagatccatgaatttctttattctttgttagactagtcacagtccaagggagtcacagattaacaagataatctgatgatcatcctgtgttatggacacagtgcattgtggtttaccaacctggacgacttgacaaaggtttaagccaaggtggcgtagatgtgactccctacaattttgtattgcagaaaccgttgagatctgaggcaaggcattatatatattttttgggcgagacatgctcggttcaataaatatttgtgtgttcgctttgcatatatggtaactgatcagaggagtgtagatttgtattgcggagtaacaatgtaaatgttaggtttgaatatactgatttcgagatgatgtaatccttctatactagcttagcttccatgttggttgtttaatttcgataagaggttgtttacttttatatgctgtttggtttacatatttgtgacgtgatgaataaccgataa

SEQ ID NO: 30701 - DNA, 4289 bp, Zea Mays
ccgacgacgcccaccgcaccaccccaaagcccacaggaggaagacctagctagacacctgacctagggtttcccttccttggtctccttctccagggccgggagggaacccgtccatctctgagagccgagatcgctccatctcccccacatgccgctccgggagggagccaagcgtgtctccagcgcgcgccactatgcccccgccgcgccaacacccgcgcccgcgggggcacccgtcccgccccaccgcccgccgcgatctgtctccgccgctggctccatatccactgcctccgcccgcaagccgccagagccgcttcgaagggccgtcgccgactgcctctcgccgcccgccccgcacacccatggcccagctgcagccgccgcttctgccaccgcggaggcttcacggacgctccgggattatatagccaacccttcaaccatggatatggcttataatgtcctcattgaccatgcacttgcagaaagtgatcgtagcccagcagttgttccgagatgcgtgtcattgttaaagagatatcttatccggtacattccaagggtgcaaactctgcgacaaattgatctgttttgtgcgaatacgattgcaaaatgtgaaccgatggcaaataatagagcagcatcttttgccaagaataatgtatcagcagcagctgcaataaattcttcatcccttgccccaccaatatccaactttgcttcagcatctcttgtgaagtctttaaactatgttcgctcattggttgcaaggcatactccaaagttgtcattccaatcaatagtcgcggcaaagcagtcacttccttcactttcatcatttctgaataggtccttactttctcaactaactccagaagttattagcaacagagaacatcttgaatcgaaggaatgccatagctcacctgattttatatcatcagcaagtgaaaaagttgatgtgggtgaacctgtagatgatagcaaatatatatccttcgacattttaagctggcgatggcatgtgtatggcgaacggcagtcgtccttatctgccaaagaaagcagtgattttgtgggtcttcaagattttcatatacatggttttcttgaagtcggtgctgcagctcttctagttggggatatggatgcgaaaattaatgatcaacagtggaaatattctgttatccaggaatttccagatattgatttgttacaaccttcatcttctgccgcaagtacttttgcgtcatcacaaagtcatttaaaagcaataactgcttcaaaacgcatgagatcagctccaaatcaagtctggatgaacataccaataaacacattccagcctcgagcacggcctctttttcagtacagatactacagtgagcagcaacccttaagattgaatcctgctgaaatttctgaagtcatagctgaagtttgttcagaagcaacttcaaatgcaaatcagttgattgttccatcaagattgagcacccagagtcggcaaccttcagcagatgtggcattcagtgtccttatcaaacttgtcattgacatgtatatgatggactccgagactgctgctcctctgacactttatatgcttgagggtatgctgagctctcaaaagtcatcagccagaacgaaggctcttgatttgatcctaaatctgggggtacatgcacacctgctgcaacctatggttattggagatgcgccgcttatagataaaagtgaatctgtgaaccgttcttatctgagcaatgaatacggatcaagtataaatgaaccgagggaagcagaacctgaagtagaacagaagatcagtcctgctattgatcaatttgaatcatggcttcttaaaatgctttttgaggttctccttctcctagtacagatagaggagcgacaagagatcgtgtgggcctcagctttgagttgtctattttactttgtttgtgatggaggaaaaattatcaggagtagactgggaggtctggacataagggtggttaagactcttcttgagattagtgtggagcactcttgggcaaaagtagtgcacagcaagctcatttgcatgttatcaaatatgatgtaccaagtatcagatttaactcagaatggtgtttctgacacacattttgttcctgagcggattgatcttcttggtgggattgactacatttgtcttgagtattcacgagccaactcaagggaagagaagcgggatttgttctttgtcatttttgactacgtagtgcatcaaataaatgaggcatgcttggctggtggtatttcaacctatacttatgatgatgcccagccccttgcttcccttcttgcctttgctgatgctcctgaggctttctacatatctgtgaagcacggcgttgaaggcgtcggagacatgctaagaaaagctatatcagcagcattatctcagtctgctcaatatgaccaattgaatgtgcttctggataaggttatgaggaaacttgatggaactgccagcacattttccaggattgacaatgagttttcttatatgatccaagtaacgaaatcatgcaagtgttttggcagcattaaagatggatgtgatgatgctgatgtagcgcttagagccaggctttgctgggcaactttgcactcacttcttcactcacatatttcatcatataggcaccatggatatatttggttagttgaattgctcctttcagaaatcagtgaagaaacagatggttctgtatggtctaaaatccaaaagcttcaagaggaaattgaagttgctggtagccaagacctatcatgttcagaagtctctctgcctgtttgtatgctttgtgggcttctaaagtcaaaacacaatttcattaggtggggattcctatatgtgctggacaaatttcttatgcgttgcaaattattattggatgacaatgacatgcaagaccacacaactgctgatcataataaaaattgtcttgataaagcttttgcggttatagatattatgaatagtgctttgttacttgttgttcaaaacaatgagacggaccatatcaacatattaaagatgtgtgacatgctgttctctcaattatgcctgagaattccatccacaaatgcgatgcaagttaggggtcttcagtcccttggtcaactttttggttatacatctaagaacatcgatagtcatttggaaacccttgcatctcaccaaagtattggaaataagaatatttgccggagtgagacattgcaagatattggcatagatcaatctggtcaatccacttctttctgtgaagcatcaatggcagcactgcttctgagagggctcgcgatagccccaatgcagcttgtagcccgtgtaccaacctctttgtttttctggccattgatacagcttgaaggggcagccagtgatgacattgcattgggtattgctgttggtagcacaggaagaggcaaccttcctggtgctacatcagatatccgagcagcactccttttacttttgatcggtaaatgcacagctgatcaggaggcactgaaagaggtagaaggcaatgagttcttcaggggtcttctggatgacacagattcaagggtagcatactattctgccgcttttcttttgaagagaatgatgacagaggaaccagagatataccaacggatgcttcaaagcctcatctcaaaagctcaacagtgtaacaatgagaaacttctggagaacccataccttcagatgcgtgggatattgcagttatcaaatgacctaggagttcaatgataagatcgtgatgacatttcaatggataaagctctaagttagaatcactacttctggctgtgtttattgcagagaacctgaagatgttccgaactaagtgcattgtggtttaccaacctggacgacttgacaaaggtttaagccaaggtggcgtagatgtgactccctacaattttgtattgcagaaaccgttgagatctgaggcaaggcattatatatattttttgggcgagacatgctcggttcaataaatatttgtgtgttcgctttgcatatatggtaactgatcagaggagtgtagatttgtattgcggagtaacaatgtaaatgttaggtttgaatatactgatttcgagatgatgtaatccttctatactagcttagcttccatgttggttgtttaatttcgataagaggttgtttacttttatatgctgtttggtttacatatttgtgacgtgatgaataaccgataa

SEQ ID NO: 30702 - DNA, 4333 bp, Zea Mays
caccaccccaaagcccacaggaggaagacctagctagacacctgacctagggtttcccttccttggtctccttctccagggccgggagggaacccgtccatctctgagagccgagatcgctccatctcccccacatgccgctccgggagggagccaagcgtgtctccagcgcgcgccactatgcccccgccgcgccaacacccgcgcccgcgggggcacccgtcccgccccaccgcccgccgcgatctgtctccgccgctggctccatatccactgcctccgcccgcaagccgccagagccgcttcgaagggccgtcgccgactgcctctcgccgcccgccccgcacacccatggcccagctgcagccgccgcttctgccaccgcggaggcttcacggacgctccgggattatatagccaacccttcaaccatggatatggcttataatgtcctcattgaccatgcacttgcagaaagtgatcgtagcccagcagttgttccgagatgcgtgtcattgttaaagagatatcttatccggtacattccaagggtgcaaactctgcgacaaattgatctgttttgtgcgaatacgattgcaaaatgtgaaccgatggcaaataatagagcagcatcttttgccaagaataatgtatcagcagcagctgcaataaattcttcatcccttgccccaccaatatccaactttgcttcagcatctcttgtgaagtctttaaactatgttcgctcattggttgcaaggcatactccaaagttgtcattccaatcaatagtcgcggcaaagcagtcacttccttcactttcatcatttctgaatagcaagtgaaaaagttgatgtgggtgaacctgtagatgatagcaaatatatatccttcgacattttaagctggcgatggcatgtgtatggcgaacggcagtcgtccttatctgccaaagaaagcagtgattttgtgggtcttcaagattttcatatacatggttttcttgaagtcggtgctgcagctcttctagttggggatatggatgcgaaaattaatgatcaacagtggaaatattctgttatccaggaatttccagatattgatttgttacaaccttcatcttctgccgcaagtacttttgcgtcatcacaaagtcatttaaaagcaataactgcttcaaaacgcatgagatcagctccaaatcaagtctggatgaacataccaataaacacattccagcctcgagcacggcctctttttcagtacagatactacagtgagcagcaacccttaagattgaatcctgctgaaatttctgaagtcatagctgaagtttgttcagaagcaacttcaaatgcaaatcagttgattgttccatcaagattgagcacccagagtcggcaaccttcagcagatgtggcattcagtgtccttatcaaacttgtcattgacatgtatatgatggactccgagactgctgctcctctgacactttatatgcttgagggtatgctgagctctcaaaagtcatcagccagaacgaaggctcttgatttgatcctaaatctgggggtacatgcacacctgctgcaacctatggttattggagatgcgccgcttatagataaaagtgaatctgtgaaccgttcttatctgagcaatgaatacggatcaagtataaatgaaccgagggaagcagaacctgaagtagaacagaagatcagtcctgctattgatcaatttgaatcatggcttcttaaaatgctttttgaggttctccttctcctagtacagatagaggagcgacaagagatcgtgtgggcctcagctttgagttgtctattttactttgtttgtgatggaggaaaaattatcaggagtagactgggaggtctggacataagggtggttaagactcttcttgagattagtgtggagcactcttgggcaaaagtagtgcacagcaagctcatttgcatgttatcaaatatgatgtaccaagtatcagatttaactcagaatggtgtttctgacacacattttgttcctgagcggattgatcttcttggtgggattgactacatttgtcttgagtattcacgagccaactcaagggaagagaagcgggatttgttctttgtcatttttgactacgtagtgcatcaaataaatgaggcatgcttggctggtggtatttcaacctatacttatgatgatgcccagccccttgcttcccttcttgcctttgctgatgctcctgaggctttctacatatctgtgaagcacggcgttgaaggcgtcggagacatgctaagaaaagctatatcagcagcattatctcagtctgctcaatatgaccaattgaatgtgcttctggataaggttatgaggaaacttgatggaactgccagcacattttccaggattgacaatgagttttcttatatgatccaagtaacgaaatcatgcaagtgttttggcagcattaaagatggatgtgatgatgctgatgtagcgcttagagccaggctttgctgggcaactttgcactcacttcttcactcacatatttcatcatataggcaccatggatatatttggttagttgaattgctcctttcagaaatcagtgaagaaacagatggttctgtatggtctaaaatccaaaagcttcaagaggaaattgaagttgctggtagccaagacctatcatgttcagaagtctctctgcctgtttgtatgctttgtgggcttctaaagtcaaaacacaatttcattaggtggggattcctatatgtgctggacaaatttcttatgcgttgcaaattattattggatgacaatgacatgcaagaccacacaactgctgatcataataaaaattgtcttgataaagcttttgcggttatagatattatgaatagtgctttgttacttgttgttcaaaacaatgagacggaccatatcaacatattaaagatgtgtgacatgctgttctctcaattatgcctgagaattccatccacaaatgcgatgcaagttaggggtcttcagtcccttggtcaactttttggttatacatctaagaacatcgatagtcatttggaaacccttgcatctcaccaaagtattggaaataagaatatttgccggagtgagacattgcaagatattggcatagatcaatctggtcaatccacttctttctgtgaagcatcaatggcagcactgcttctgagagggctcgcgatagccccaatgcagcttgtagcccgtgtaccaacctctttgtttttctggccattgatacagcttgaaggggcagccagtgatgacattgcattgggtattgctgttggtagcacaggaagaggcaaccttcctggtgctacatcagatatccgagcagcactccttttacttttgatcggtaaatgcacagctgatcaggaggcactgaaagaggtagaaggcaatgagttcttcaggggtcttctggatgacacagattcaagggtagcatactattctgccgcttttcttttgaagagaatgatgacagaggaaccagagatataccaacggatgcttcaaagcctcatctcaaaagctcaacagtgtaacaatgagaaacttctggagaacccataccttcagatgcgtgggatattgcagttatcaaatgacctaggagttcaatgataagatcgtgatgacatttcaatggataaagctctaagttagaatcactacttctggctgtgtttattgcagagaacctgaagatgttccgaactaagttttgcagatgctatgtgaatcatgtaaattattgctttggccagatgcatgtacagatccatgaatttctttattctttgttagactagtcacagtccaagggagtcacagattaacaagataatctgatgatcatcctgtgttatggacacagtgcattgtggtttaccaacctggacgacttgacaaaggtttaagccaaggtggcgtagatgtgactccctacaattttgtattgcagaaaccgttgagatctgaggcaaggcattatatatattttttgggcgagacatgctcggttcaataaatatttgtgtgttcgctttgcatatatggtaactgatcagaggagtgtagatttgtattgcggagtaacaatgtaaatgttaggtttgaatatactgatttcgagatgatgtaatccttctatactagcttagcttccatgttggttgtttaatttcgataagaggttgtttacttttatatgctgtttggtttacatatttgtgacgtgatgaataaccgataa

SEQ ID NO: 30703 - DNA, 4420 bp, Zea Mays
caccccaaagcccacaggaggaagacctagctagacacctgacctagggtttcccttccttggtctccttctccagggccgggagggaacccgtccatctctgagagccgagatcgctccatctcccccacatgccgctccgggagggagccaagcgtgtctccagcgcgcgccactatgcccccgccgcgccaacacccgcgcccgcgggggcacccgtcccgccccaccgcccgccgcgatctgtctccgccgctggctccatatccactgcctccgcccgcaagccgccagagccgcttcgaagggccgtcgccgactgcctctcgccgcccgccccgcacacccatggcccagctgcagccgccgcttctgccaccgcggaggcttcacggacgctccgggattatatagccaacccttcaaccatggatatggcttataatgtcctcattgaccatgcacttgcagaaagtgatcgtagcagttgttccgagatgcgtgtcattgttaaagagatatcttatccggtacattccaagggtgcaaactctgcgacaaattgatctgttttgtgcgaatacgattgcaaaatgtgaaccgatggcaaataatagagcagcatcttttgccaagaataatgtatcagcagcagctgcaataaattcttcatcccttgccccaccaatatccaactttgcttcagcatctcttgtgaagtctttaaactatgttcgctcattggttgcaaggcatactccaaagttgtcattccaatcaatagtcgcggcaaagcagtcacttccttcactttcatcatttctgaataggtccttactttctcaactaactccagaagttattagcaacagagaacatcttgaatcgaaggaatgccatagctcacctgattttatatcatcagcaagtgaaaaagttgatgtgggtgaacctgtagatgatagcaaatatatatccttcgacattttaagctggcgatggcatgtgtatggcgaacggcagtcgtccttatctgccaaagaaagcagtgattttgtgggtcttcaagattttcatatacatggttttcttgaagtcggtgctgcagctcttctagttggggatatggatgcgaaaattaatgatcaacagtggaaatattctgttatccaggaatttccagatattgatttgttacaaccttcatcttctgccgcaagtacttttgcgtcatcacaaagtcatttaaaagcaataactgcttcaaaacgcatgagatcagctccaaatcaagtctggatgaacataccaataaacacattccagcctcgagcacggcctctttttcagtacagatactacagtgagcagcaacccttaagattgaatcctgctgaaatttctgaagtcatagctgaagtttgttcagaagcaacttcaaatgcaaatcagttgattgttccatcaagattgagcacccagagtcggcaaccttcagcagatgtggcattcagtgtccttatcaaacttgtcattgacatgtatatgatggactccgagactgctgctcctctgacactttatatgcttgagggtatgctgagctctcaaaagtcatcagccagaacgaaggctcttgatttgatcctaaatctgggggtacatgcacacctgctgcaacctatggttattggagatgcgccgcttatagataaaagtgaatctgtgaaccgttcttatctgagcaatgaatacggatcaagtataaatgaaccgagggaagcagaacctgaagtagaacagaagatcagtcctgctattgatcaatttgaatcatggcttcttaaaatgctttttgaggttctccttctcctagtacagatagaggagcgacaagagatcgtgtgggcctcagctttgagttgtctattttactttgtttgtgatggaggaaaaattatcaggagtagactgggaggtctggacataagggtggttaagactcttcttgagattagtgtggagcactcttgggcaaaagtagtgcacagcaagctcatttgcatgttatcaaatatgatgtaccaagtatcagatttaactcagaatggtgtttctgacacacattttgttcctgagcggattgatcttcttggtgggattgactacatttgtcttgagtattcacgagccaactcaagggaagagaagcgggatttgttctttgtcatttttgactacgtagtgcatcaaataaatgaggcatgcttggctggtggtatttcaacctatacttatgatgatgcccagccccttgcttcccttcttgcctttgctgatgctcctgaggctttctacatatctgtgaagcacggcgttgaaggcgtcggagacatgctaagaaaagctatatcagcagcattatctcagtctgctcaatatgaccaattgaatgtgcttctggataaggttatgaggaaacttgatggaactgccagcacattttccaggattgacaatgagttttcttatatgatccaagtaacgaaatcatgcaagtgttttggcagcattaaagatggatgtgatgatgctgatgtagcgcttagagccaggctttgctgggcaactttgcactcacttcttcactcacatatttcatcatataggcaccatggatatatttggttagttgaattgctcctttcagaaatcagtgaagaaacagatggttctgtatggtctaaaatccaaaagcttcaagaggaaattgaagttgctggtagccaagacctatcatgttcagaagtctctctgcctgtttgtatgctttgtgggcttctaaagtcaaaacacaatttcattaggtggggattcctatatgtgctggacaaatttcttatgcgttgcaaattattattggatgacaatgacatgcaagaccacacaactgctgatcataataaaaattgtcttgataaagcttttgcggttatagatattatgaatagtgctttgttacttgttgttcaaaacaatgagacggaccatatcaacatattaaagatgtgtgacatgctgttctctcaattatgcctgagaattccatccacaaatgcgatgcaagttaggggtcttcagtcccttggtcaactttttggttatacatctaagaacatcgatagtcatttggaaacccttgcatctcaccaaagtattggaaataagaatatttgccggagtgagacattgcaagatattggcatagatcaatctggtcaatccacttctttctgtgaagcatcaatggcagcactgcttctgagagggctcgcgatagccccaatgcagcttgtagcccgtgtaccaacctctttgtttttctggccattgatacagcttgaaggggcagccagtgatgacattgcattgggtattgctgttggtagcacaggaagaggcaaccttcctggtgctacatcagatatccgagcagcactccttttacttttgatcggtaaatgcacagctgatcaggaggcactgaaagaggtagaaggcaatgagttcttcaggggtcttctggatgacacagattcaagggtagcatactattctgccgcttttcttttgaagagaatgatgacagaggaaccagagatataccaacggatgcttcaaagcctcatctcaaaagctcaacagtgtaacaatgagaaacttctggagaacccataccttcagatgcgtgggatattgcagttatcaaatgacctaggagttcaatgataagatcgtgatgacatttcaatggataaagctctaagttagaatcactacttctggctgtgtttattgcagagaacctgaagatgttccgaactaagttttgcagatgctatgtgaatcatgtaaattattgctttggccagatgcatgtacagatccatgaatttctttattctttgttagactagtcacagtccaagggagtcacagattaacaagataatctgatgatcatcctgtgttatggacacagtgcattgtggtttaccaacctggacgacttgacaaaggtttaagccaaggtggcgtagatgtgactccctacaattttgtattgcagaaaccgttgagatctgaggcaaggcattatatatattttttgggcgagacatgctcggttcaataaatatttgtgtgttcgctttgcatatatggtaactgatcagaggagtgtagatttgtattgcggagtaacaatgtaaatgttaggtttgaatatactgatttcgagatgatgtaatccttctatactagcttagcttccatgttggttgtttaatttcgataagaggttgtttacttttatatgctgtttggtttacatatttgtgacgtgatgaataaccgataa

SEQ ID NO: 30704 - DNA, 4224 bp, Zea Mays
caccccaaagcccacaggaggaagacctagctagacacctgacctagggtttcccttccttggtctccttctccagggccgggagggaacccgtccatctctgagagccgagatcgctccatctcccccacatgccgctccgggagggagccaagcgtgtctccagcgcgcgccactatgcccccgccgcgccaacacccgcgcccgcgggggcacccgtcccgccccaccgcccgccgcgatctgtctccgccgctggctccatatccactgcctccgcccgcaagccgccagagccgcttcgaagggccgtcgccgactgcctctcgccgcccgccccgcacacccatggcccagctgcagccgccgcttctgccaccgcggaggcttcacggacgctccgggattatatagccaacccttcaaccatggatatggcttataatgtcctcattgaccatgcacttgcagaaagtgatcgtagcccagcagttgttccgagatgcgtgtcattgttaaagagatatcttatccggtacattccaagggtgcaaactctgcgacaaattgatctgttttgtgcgaatacgattgcaaaatgtgaaccgatggcaaataatagagcagcatcttttgccaagaataatgtatcagcagcagctgcaataaattcttcatcccttgccccaccatttctcaactaactccagaagttattagcaacagagaacatcttgaatcgaaggaatgccatagctcacctgattttatatcatcagcaagtgaaaaagttgatgtgggtgaacctgtagatgatagcaaatatatatccttcgacattttaagctggcgatggcatgtgtatggcgaacggcagtcgtccttatctgccaaagaaagtcggtgctgcagctcttctagttggggatatggatgcgaaaattaatgatcaacagtggaaatattctgttatccaggaatttccagatattgatttgttacaaccttcatcttctgccgcaagtacttttgcgtcatcacaaagtcatttaaaagcaataactgcttcaaaacgcatgagatcagctccaaatcaagtctggatgaacataccaataaacacattccagcctcgagcacggcctctttttcagtacagatactacagtgagcagcaacccttaagattgaatcctgctgaaatttctgaagtcatagctgaagtttgttcagaagcaacttcaaatgcaaatcagttgattgttccatcaagattgagcacccagagtcggcaaccttcagcagatgtggcattcagtgtccttatcaaacttgtcattgacatgtatatgatggactccgagactgctgctcctctgacactttatatgcttgagggtatgctgagctctcaaaagtcatcagccagaacgaaggctcttgatttgatcctaaatctgggggtacatgcacacctgctgcaacctatggttattggagatgcgccgcttatagataaaagtgaatctgtgaaccgttcttatctgagcaatgaatacggatcaagtataaatgaaccgagggaagcagaacctgaagtagaacagaagatcagtcctgctattgatcaatttgaatcatggcttcttaaaatgctttttgaggttctccttctcctagtacagatagaggagcgacaagagatcgtgtgggcctcagctttgagttgtctattttactttgtttgtgatggaggaaaaattatcaggagtagactgggaggtctggacataagggtggttaagactcttcttgagattagtgtggagcactcttgggcaaaagtagtgcacagcaagctcatttgcatgttatcaaatatgatgtaccaagtatcagatttaactcagaatggtgtttctgacacacattttgttcctgagcggattgatcttcttggtgggattgactacatttgtcttgagtattcacgagccaactcaagggaagagaagcgggatttgttctttgtcatttttgactacgtagtgcatcaaataaatgaggcatgcttggctggtggtatttcaacctatacttatgatgatgcccagccccttgcttcccttcttgcctttgctgatgctcctgaggctttctacatatctgtgaagcacggcgttgaaggcgtcggagacatgctaagaaaagctatatcagcagcattatctcagtctgctcaatatgaccaattgaatgtgcttctggataaggttatgaggaaacttgatggaactgccagcacattttccaggattgacaatgagttttcttatatgatccaagtaacgaaatcatgcaagtgttttggcagcattaaagatggatgtgatgatgctgatgtagcgcttagagccaggctttgctgggcaactttgcactcacttcttcactcacatatttcatcatataggcaccatggatatatttggttagttgaattgctcctttcagaaatcagtgaagaaacagatggttctgtatggtctaaaatccaaaagcttcaagaggaaattgaagttgctggtagccaagacctatcatgttcagaagtctctctgcctgtttgtatgctttgtgggcttctaaagtcaaaacacaatttcattaggtggggattcctatatgtgctggacaaatttcttatgcgttgcaaattattattggatgacaatgacatgcaagaccacacaactgctgatcataataaaaattgtcttgataaagcttttgcggttatagatattatgaatagtgctttgttacttgttgttcaaaacaatgagacggaccatatcaacatattaaagatgtgtgacatgctgttctctcaattatgcctgagaattccatccacaaatgcgatgcaagttaggggtcttcagtcccttggtcaactttttggttatacatctaagaacatcgatagtcatttggaaacccttgcatctcaccaaagtattggaaataagaatatttgccggagtgagacattgcaagatattggcatagatcaatctggtcaatccacttctttctgtgaagcatcaatggcagcactgcttctgagagggctcgcgatagccccaatgcagcttgtagcccgtgtaccaacctctttgtttttctggccattgatacagcttgaaggggcagccagtgatgacattgcattgggtattgctgttggtagcacaggaagaggcaaccttcctggtgctacatcagatatccgagcagcactccttttacttttgatcggtaaatgcacagctgatcaggaggcactgaaagaggtagaaggcaatgagttcttcaggggtcttctggatgacacagattcaagggtagcatactattctgccgcttttcttttgaagagaatgatgacagaggaaccagagatataccaacggatgcttcaaagcctcatctcaaaagctcaacagtgtaacaatgagaaacttctggagaacccataccttcagatgcgtgggatattgcagttatcaaatgacctaggagttcaatgataagatcgtgatgacatttcaatggataaagctctaagttagaatcactacttctggctgtgtttattgcagagaacctgaagatgttccgaactaagttttgcagatgctatgtgaatcatgtaaattattgctttggccagatgcatgtacagatccatgaatttctttattctttgttagactagtcacagtccaagggagtcacagattaacaagataatctgatgatcatcctgtgttatggacacagtgcattgtggtttaccaacctggacgacttgacaaaggtttaagccaaggtggcgtagatgtgactccctacaattttgtattgcagaaaccgttgagatctgaggcaaggcattatatatattttttgggcgagacatgctcggttcaataaatatttgtgtgttcgctttgcatatatggtaactgatcagaggagtgtagatttgtattgcggagtaacaatgtaaatgttaggtttgaatatactgatttcgagatgatgtaatccttctatactagcttagcttccatgttggttgtttaatttcgataagaggttgtttacttttatatgctgtttggtttacatatttgtgacgtgatgaataaccgataa

SEQ ID NO: 30705 - DNA, 4585 bp, Zea Mays
aaagcccacaggaggaagacctagctagacacctgacctagggtttcccttccttggtctccttctccagggccgggagggaacccgtccatctctgagagccgagatcgctccatctcccccacatgccgctccgggagggagccaagcgtgtctccagcgcgcgccactatgcccccgccgcgccaacacccgcgcccgcgggggcacccgtcccgccccaccgcccgccgcgatctgtctccgccgctggctccatatccactgcctccgcccgcaagccgccagagccgcttcgaagggccgtcgccgactgcctctcgccgcccgccccgcacacccatggcccagctgcagccgccgcttctgccaccgcggaggcttcacggacgctccgggattatatagccaacccttcaaccatggatatggcttataatgtcctcattgaccatgcacttgcagaaagtgatcgtagttggtgaaatttgtttgcactaaaacaatcaaggattttgtcttcaggtacattccaagggtgcaaactctgcgacaaattgatctgttttgtgcgaatacgattgcaaaatgtgaaccgatggcaaataatagagcagcatcttttgccaagaataatgtatcagcagcagctgcaataaattcttcatcccttgccccaccaatatccaactttgcttcagcatctcttgtgaagtctttaaactatgttcgctcattggttgcaaggcatactccaaagttgtcattccaatcaatagtcgcggcaaagcagtcacttccttcactttcatcatttctgaataggtccttactttctcaactaactccagaagttattagcaacagagaacatcttgaatcgaaggaatgccatagctcacctgattttatatcatcagcaagtgaaaaagttgatgtgggtgaacctgtagatgatagcaaatatatatccttcgacattttaagctggcgatggcatgtgtatggcgaacggcagtcgtccttatctgccaaagaaaggtagataccttgttcttgtagttttttgtccccatttttttttgttttgcaaacactttctcattttttgtttatcagaagcagtgattttgtgggtcttcaagattttcatatacatggttttcttgaagtcggtgctgcagctcttctagttggggatatggatgcgaaaattaatgatcaacagtggaaatattctgttatccaggaatttccagatattgatttgttacaaccttcatcttctgccgcaagtacttttgcgtcatcacaaagtcatttaaaagcaataactgcttcaaaacgcatgagatcagctccaaatcaagtctgaaacgattatctgcatctgccctgctgacatattattaagtgttctatgcaaatgttagactaaaggctattgatacttgctacctgtacaaaagtaggtatctagcataaactttgttacacgcataatttgtttaaattgccaatgattcaaataaacttattttggaatggtctaaccttctttttttaggatgaacataccaataaacacattccagcctcgagcacggcctctttttcagtacagatactacagtgagcagcaacccttaagattgaatcctgctgaaatttctgaagtcatagctgaagtttgttcagaagcaacttcaaatgcaaatcagttgattgttccatcaagattgagcacccagagtcggcaaccttcagcagatgtggcattcagtgtccttatcaaacttgtcattgacatgtatatgatggactccgagactgctgctcctctgacactttatatgcttgagggtatgctgagctctcaaaagtcatcagccagaacgaaggctcttgatttgatcctaaatctgggggtacatgcacacctgctgcaacctatggttattggagatgcgccgcttatagataaaagtgaatctgtgaaccgttcttatctgagcaatgaatacggatcaagtataaatgaaccgagggaagcagaacctgaagtagaacagaagatcagtcctgctattgatcaatttgaatcatggcttcttaaaatgctttttgaggttctccttctcctagtacagatagaggagcgacaagagatcgtgtgggcctcagctttgagttgtctattttactttgtttgtgatggaggaaaaattatcaggagtagactgggaggtctggacataagggtggttaagactcttcttgagattagtgtggagcactcttgggcaaaagtagtgcacagcaagctcatttgcatgttatcaaatatgatgtaccaagtatcagatttaactcagaatggtgtttctgacacacattttgttcctgagcggattgatcttcttggtgggattgactacatttgtcttgagtattcacgagccaactcaagggaagagaagcgggatttgttctttgtcatttttgactacgtagtgcatcaaataaatgaggcatgcttggctggtggtatttcaacctatacttatgatgatgcccagccccttgcttcccttcttgcctttgctgatgctcctgaggctttctacatatctgtgaagcacggcgttgaaggcgtcggagacatgctaagaaaagctatatcagcagcattatctcagtctgctcaatatgaccaattgaatgtgcttctggataaggttatgaggaaacttgatggaactgccagcacattttccaggattgacaatgagttttcttatatgatccaagtaacgaaatcatgcaagtgttttggcagcattaaagatggatgtgatgatgctgatgtagcgcttagagccaggctttgctgggcaactttgcactcacttcttcactcacatatttcatcatataggcaccatggatatatttggttagttgaattgctcctttcagaaatcagtgaagaaacagatggttctgtatggtctaaaatccaaaagcttcaagaggaaattgaagttgctggtagccaagacctatcatgttcagaagtctctctgcctgtttgtatgctttgtgggcttctaaagtcaaaacacaatttcattaggtggggattcctatatgtgctggacaaatttcttatgcgttgcaaattattattggatgacaatgacatgcaagaccacacaactgctgatcataataaaaattgtcttgataaagcttttgcggttatagatattatgaatagtgctttgttacttgttgttcaaaacaatgagacggaccatatcaacatattaaagatgtgtgacatgctgttctctcaattatgcctgagaattccatccacaaatgcgatgcaagttaggggtcttcagtcccttggtcaactttttggttatacatctaagaacatcgatagtcatttggaaacccttgcatctcaccaaagtattggaaataagaatatttgccggagtgagacattgcaagatattggcatagatcaatctggtcaatccacttctttctgtgaagcatcaatggcagcactgcttctgagagggctcgcgatagccccaatgcagcttgtagcccgtgtaccaacctctttgtttttctggccattgatacagcttgaaggggcagccagtgatgacattgcattgggtattgctgttggtagcacaggaagaggcaaccttcctggtgctacatcagatatccgagcagcactccttttacttttgatcggtaaatgcacagctgatcaggaggcactgaaagaggtagaaggcaatgagttcttcaggggtcttctggatgacacagattcaagggtagcatactattctgccgcttttcttttgaagagaatgatgacagaggaaccagagatataccaacggatgcttcaaagcctcatctcaaaagctcaacagtgtaacaatgagaaacttctggagaacccataccttcagatgcgtgggatattgcagttatcaaatgacctaggagttcaatgataagatcgtgatgacatttcaatggataaagctctaagttagaatcactacttctggctgtgtttattgcagagaacctgaagatgttccgaactaagttttgcagatgctatgtgaatcatgtaaattattgctttggccagatgcattgcattgtggtttaccaacctggacgacttgacaaaggtttaagccaaggtggcgtagatgtgactccctacaattttgtattgcagaaaccgttgagatctgaggcaaggcattatatatattttttgggcgagacatgctcggttcaataaatatttgtgtgttcgctttgcatatatggtaactgatcagaggagtgtagatttgtattgcggagtaacaatgtaaatgttaggtttgaatatactgatttcgagatgatgtaatccttctatactagcttagcttccatgttggttgtttaatttcgataagaggttgtttacttttatatgctgtttggtttacatatttgtgacgtgatgaataaccgataa

SEQ ID NO: 30706 - DNA, 4403 bp, Zea Mays
ggaagacctagctagacacctgacctagggtttcccttccttggtctccttctccagggccgggagggaacccgtccatctctgagagccgagatcgctccatctcccccacatgccgctccgggagggagccaagcgtgtctccagcgcgcgccactatgcccccgccgcgccaacacccgcgcccgcgggggcacccgtcccgccccaccgcccgccgcgatctgtctccgccgctggctccatatccactgcctccgcccgcaagccgccagagccgcttcgaagggccgtcgccgactgcctctcgccgcccgccccgcacacccatggcccagctgcagccgccgcttctgccaccgcggaggcttcacggacgctccgggattatatagccaacccttcaaccatggatatggcttataatgtcctcattgaccatgcacttgcagaaagtgatcgtagcccagcagttgttccgagatgcgtgtcattgttaaagagatatcttatccggtacattccaagggtgcaaactctgcgacaaattgatctgttttgtgcgaatacgattgcaaaatgtgaaccgatggcaaataatagagcagcatcttttgccaagaataatgtatcagcagcagctgcaataaattcttcatcccttgccccaccaatatccaactttgcttcagcatctcttgtgaagtctttaaactatgttcgctcattggttgcaaggcatactccaaagttgtcattccaatcaatagtcgcggcaaagcagtcacttccttcactttcatcatttctgaataggtccttactttctcaactaactccagaagttattagcaacagagaacatcttgaatcgaaggaatgccatagctcacctgattttatatcatcagcaagtgaaaaagttgatgtgggtgaacctgtagatgatagcaaatatatatccttcgacattttaagctggcgatggcatgtgtatggcgaacggcagtcgtccttatctgccaaagaaagtgattttgtgggtcttcaagattttcatatacatggttttcttgaagtcggtgctgcagctcttctagttggggatatggatgcgaaaattaatgatcaacagtggaaatattctgttatccaggaatttccagatattgatttgttacaaccttcatcttctgccgcaagtacttttgcgtcatcacaaagtcatttaaaagcaataactgcttcaaaacgcatgagatcagctccaaatcaagtctggatgaacataccaataaacacattccagcctcgagcacggcctctttttcagtacagatactacagtgagcagcaacccttaagattgaatcctgctgaaatttctgaagtcatagctgaagtttgttcagaagcaacttcaaatgcaaatcagttgattgttccatcaagattgagcacccagagtcggcaaccttcagcagatgtggcattcagtgtccttatcaaacttgtcattgacatgtatatgatggactccgagactgctgctcctctgacactttatatgcttgagggtatgctgagctctcaaaagtcatcagccagaacgaaggctcttgatttgatcctaaatctgggggtacatgcacacctgctgcaacctatggttattggagatgcgccgcttatagataaaagtgaatctgtgaaccgttcttatctgagcaatgaatacggatcaagtataaatgaaccgagggaagcagaacctgaagtagaacagaagatcagtcctgctattgatcaatttgaatcatggcttcttaaaatgctttttgaggttctccttctcctagtacagatagaggagcgacaagagatcgtgtgggcctcagctttgagttgtctattttactttgtttgtgatggaggaaaaattatcaggagtagactgggaggtctggacataagggtggttaagactcttcttgagattagtgtggagcactcttgggcaaaagtagtgcacagcaagctcatttgcatgttatcaaatatgatgtaccaagtatcagatttaactcagaatggtgtttctgacacacattttgttcctgagcggattgatcttcttggtgggattgactacatttgtcttgagtattcacgagccaactcaagggaagagaagcgggatttgttctttgtcatttttgactacgtagtgcatcaaataaatgaggcatgcttggctggtggtatttcaacctatacttatgatgatgcccagccccttgcttcccttcttgcctttgctgatgctcctgaggctttctacatatctgtgaagcacggcgttgaaggcgtcggagacatgctaagaaaagctatatcagcagcattatctcagtctgctcaatatgaccaattgaatgtgcttctggataaggttatgaggaaacttgatggaactgccagcacattttccaggattgacaatgagttttcttatatgatccaagtaacgaaatcatgcaagtgttttggcagcattaaagatggatgtgatgatgctgatgtagcgcttagagccaggctttgctgggcaactttgcactcacttcttcactcacatatttcatcatataggcaccatggatatatttggttagttgaattgctcctttcagaaatcagtgaagaaacagatggttctgtatggtctaaaatccaaaagcttcaagaggaaattgaagttgctggtagccaagacctatcatgttcagaagtctctctgcctgtttgtatgctttgtgggcttctaaagtcaaaacacaatttcattaggtggggattcctatatgtgctggacaaatttcttatgcgttgcaaattattattggatgacaatgacatgcaagaccacacaactgctgatcataataaaaattgtcttgataaagcttttgcggttatagatattatgaatagtgctttgttacttgttgttcaaaacaatgagacggaccatatcaacatattaaagatgtgtgacatgctgttctctcaattatgcctgagaattccatccacaaatgcgatgcaagttaggggtcttcagtcccttggtcaactttttggttatacatctaagaacatcgatagtcatttggaaacccttgcatctcaccaaagtattggaaataagaatatttgccggagtgagacattgcaagatattggcatagatcaatctggtcaatccacttctttctgtgaagcatcaatggcagcactgcttctgagagggctcgcgatagccccaatgcagcttgtagcccgtgtaccaacctctttgtttttctggccattgatacagcttgaaggggcagccagtgatgacattgcattgggtattgctgttggtagcacaggaagaggcaaccttcctggtgctacatcagatatccgagcagcactccttttacttttgatcggtaaatgcacagctgatcaggaggcactgaaagaggtagaaggcaatgagttcttcaggggtcttctggatgacacagattcaagggtagcatactattctgccgcttttcttttgaagagaatgatgacagaggaaccagagatataccaacggatgcttcaaagcctcatctcaaaagctcaacagtgtaacaatgagaaacttctggagaacccataccttcagatgcgtgggatattgcagttatcaaatgacctaggagttcaatgataagatcgtgatgacatttcaatggataaagctctaagttagaatcactacttctggctgtgtttattgcagagaacctgaagatgttccgaactaagttttgcagatgctatgtgaatcatgtaaattattgctttggccagatgcatgtacagatccatgaatttctttattctttgttagactagtcacagtccaagggagtcacagattaacaagataatctgatgatcatcctgtgttatggacacagtgcattgtggtttaccaacctggacgacttgacaaaggtttaagccaaggtggcgtagatgtgactccctacaattttgtattgcagaaaccgttgagatctgaggcaaggcattatatatattttttgggcgagacatgctcggttcaataaatatttgtgtgttcgctttgcatatatggtaactgatcagaggagtgtagatttgtattgcggagtaacaatgtaaatgttaggtttgaatatactgatttcgagatgatgtaatccttctatactagcttagcttccatgttggttgtttaatttcgataagaggttgtttacttttatatgctgtttggtttacatatttgtgacgtgatgaataaccgataa

SEQ ID NO: 30707 - DNA, 4398 bp, Zea Mays
ggaagacctagctagacacctgacctagggtttcccttccttggtctccttctccagggccgggagggaacccgtccatctctgagagccgagatcgctccatctcccccacatgccgctccgggagggagccaagcgtgtctccagcgcgcgccactatgcccccgccgcgccaacacccgcgcccgcgggggcacccgtcccgccccaccgcccgccgcgatctgtctccgccgctggctccatatccactgcctccgcccgcaagccgccagagccgcttcgaagggccgtcgccgactgcctctcgccgcccgccccgcacacccatggcccagctgcagccgccgcttctgccaccgcggaggcttcacggacgctccgggattatatagccaacccttcaaccatggatatggcttataatgtcctcattgaccatgcacttgcagaaagtgatcgtagcccagcagttgttccgagatgcgtgtcattgttaaagagatatcttatccggtacattccaagggtgcaaactctgcgacaaattgatctgttttgtgcgaatacgattgcaaaatgtgaaccgatggcaaataatagagcagcatcttttgccaagaataatgtatcagcagcagctgcaataaattcttcatcccttgccccaccaatatccaactttgcttcagcatctcttgtgaagtctttaaactatgttcgctcattggttgcaaggcatactccaaagttgtcattccaatcaatagtcgcggcaaagcagtcacttccttcactttcatcatttctgaataggtccttactttctcaactaactccagaagttattagcaacagagaacatcttgaatcgaaggaatgccatagctcacctgattttatatcatcagcaagtgaaaaagttgatgtgggtgaacctgtagatgatagcaaatatatatccttcgacattttaagctggcgatggcatgtgtatggcgaacggcagtcgtccttatctgccaaagaaagcagtgattttgtgggtcttcaagattttcatatacatggttttcttgaagtcggtgctgcagctcttctagttggggatatggatgcgaaaattaatgatcaacagtggaaatattctgttatccaggaatttccagatattgatttgttacaaccttcatcttctgccgcaagtacttttgcgtcatcacaaagtcatttaaaagcaataactgcttcaaaacgcatgagatcagctccaaatcaagtctggatgaacataccaataaacacattccagcctcgagcacggcctctttttcagtacagatactacagtgagcagcaacccttaagattgaatcctgctgaaatttctgaagtcatagctgaagtttgttcagaagcaacttcaaatgcaaatcagttgattgttccatcaagattgagcacccagagtcggcaaccttcagcagatgtggcattcagtgtccttatcaaacttgtcattgacatgtatatgatggactccgagactgctgctcctctgacactttatatgcttgagggtatgctgagctctcaaaagtcatcagccagaacgaaggctcttgatttgatcctaaatctgggggtacatgcacacctgctgcaacctatggttattggagatgcgccgcttatagataaaagtgaatctgtgaaccgttcttatctgagcaatgaatacggatcaagtataaatgaaccgagggaagcagaacctgaagtagaacagaagatcagtcctgctattgatcaatttgaatcatggcttcttaaaatgctttttgaggttctccttctcctagtacagatagaggagcgacaagagatcgtgtgggcctcagctttgagttgtctattttactttgtttgtgatggaggaaaaattatcaggagtagactgggaggtctggacataagggtggttaagactcttcttgagattagtgtggagcactcttgggcaaaagtagtgcacagcaagctcatttgcatgttatcaaatatgatgtaccaagtatcagatttaactcagaatggtgtttctgacacacattttgttcctgagcggattgatcttcttggtgggattgactacatttgtcttgagtattcacgagccaactcaagggaagagaagcgggatttgttctttgtcatttttgactacgtagtgcatcaaataaatgaggcatgcttggctggtggtatttcaacctatacttatgatgatgcccagccccttgcttcccttcttgcctttgctgatgctcctgaggctttctacatatctgtgaagcacggcgttgaaggcgtcggagacatgctaagaaaagctatatcagcagcattatctcagtctgctcaatatgaccaattgaatgtgcttctggataaggttatgaggaaacttgatggaactgccagcacattttccaggattgacaatgagttttcttatatgatccaagtaacgaaatcatgcaagtgttttggcagcattaaagatggatgtgatgatgctgatgtagcgcttagagccaggctttgctgggcaactttgcactcacttcttcactcacatatttcatcatataggcaccatggatatatttggttagttgaattgctcctttcagaaatcagtgaagaaacagatggttctgtatggtctaaaatccaaaagcttcaagaggaaattgaagttgctggtagccaagacctatcatgttcagaagtctctctgcctgtttgtatgctttgtgggcttctaaagtcaaaacacaatttcattaggtggggattcctatatgtgctggacaaatttcttatgcgttgcaaattattattggatgacaatgacatgcaagaccacacaactgctgatcataataaaaattgtcttgataaagcttttgcggttatagatattatgaatagtgctttgttacttgttgttcaaaacaatgagacggaccatatcaacatattaaagatgtgtgacatgctgttctctcaattatgcctgagaattccatccacaaatgcgatgcaagttaggggtcttcagtcccttggtcaactttttggttatacatctaagaacatcgatagtcatttggaaacccttgcatctcaccaaagtattggaaataagaatatttgccggagtgagacattgcaagatattggcatagatcaatctggtcaatccacttctttctgtgaagcatcaatggcagcactgcttctgagagggctcgcgatagccccaatgcagcttgtagcccgtgtaccaacctctttgtttttctggccattgatacagcttgaaggggcagccagtgatgacattgcattgggtattgctgttggtagcacaggaagaggcaaccttcctggtgctacatcagatatccgagcagcactccttttacttttgatcggtaaatgcacagctgatcaggaggcactgaaagaggtagaaggcaatgagttcttcaggggtcttctggatgacacagattcaagggtagcatactattctgccgcttttcttttgaagagaatgatgacagaggaaccagagatataccaacggatgcttcaaagcctcatctcaaaagctcaacagtgtaacaatgagaaacttctggagaacccataccttcagatgcgtgggatattgcagttatcaaatgacctaggagttcaatgataagatcgtgatgacatttcaatggataaagctctaagttagaatcactacttctggctgtgtttattgcagagaacctgaagatgttccgaactaagatgctatgtgaatcatgtaaattattgctttggccagatgcatgtacagatccatgaatttctttattctttgttagactagtcacagtccaagggagtcacagattaacaagataatctgatgatcatcctgtgttatggacacagtgcattgtggtttaccaacctggacgacttgacaaaggtttaagccaaggtggcgtagatgtgactccctacaattttgtattgcagaaaccgttgagatctgaggcaaggcattatatatattttttgggcgagacatgctcggttcaataaatatttgtgtgttcgctttgcatatatggtaactgatcagaggagtgtagatttgtattgcggagtaacaatgtaaatgttaggtttgaatatactgatttcgagatgatgtaatccttctatactagcttagcttccatgttggttgtttaatttcgataagaggttgtttacttttatatgctgtttggtttacatatttgtgacgtgatgaataaccgataa

SEQ ID NO: 30708 - DNA, 4399 bp, Zea Mays
ggaagacctagctagacacctgacctagggtttcccttccttggtctccttctccagggccgggagggaacccgtccatctctgagagccgagatcgctccatctcccccacatgccgctccgggagggagccaagcgtgtctccagcgcgcgccactatgcccccgccgcgccaacacccgcgcccgcgggggcacccgtcccgccccaccgcccgccgcgatctgtctccgccgctggctccatatccactgcctccgcccgcaagccgccagagccgcttcgaagggccgtcgccgactgcctctcgccgcccgccccgcacacccatggcccagctgcagccgccgcttctgccaccgcggaggcttcacggacgctccgggattatatagccaacccttcaaccatggatatggcttataatgtcctcattgaccatgcacttgcagaaagtgatcgtagcccagcagttgttccgagatgcgtgtcattgttaaagagatatcttatccggtacattccaagggtgcaaactctgcgacaaattgatctgttttgtgcgaatacgattgcaaaatgtgaaccgatggcaaataatagagcagcatcttttgccaagaataatgtatcagcagcagctgcaataaattcttcatcccttgccccaccaatatccaactttgcttcagcatctcttgtgaagtctttaaactatgttcgctcattggttgcaaggcatactccaaagttgtcattccaatcaatagtcgcggcaaagcagtcacttccttcactttcatcatttctgaataggtccttactttctcaactaactccagaagttattagcaacagagaacatcttgaatcgaaggaatgccatagctcacctgattttatatcatcagcaagtgaaaaagttgatgtgggtgaacctgtagatgatagcaaatatatatccttcgacattttaagctggcgatggcatgtgtatggcgaacggcagtcgtccttatctgccaaagaaagcagtgattttgtgggtcttcaagattttcatatacatggttttcttgaagtcggtgctgcagctcttctagttggggatatggatgcgaaaattaatgatcaacagtggaaatattctgttatccaggaatttccagatattgatttgttacaaccttcatcttctgccgcaagtacttttgcgtcatcacaaagtcatttaaaagcaataactgcttcaaaacgcatgagatcagctccaaatcaagtctggatgaacataccaataaacacattccagcctcgagcacggcctctttttcagtacagatactacagcaacccttaagattgaatcctgctgaaatttctgaagtcatagctgaagtttgttcagaagcaacttcaaatgcaaatcagttgattgttccatcaagattgagcacccagagtcggcaaccttcagcagatgtggcattcagtgtccttatcaaacttgtcattgacatgtatatgatggactccgagactgctgctcctctgacactttatatgcttgagggtatgctgagctctcaaaagtcatcagccagaacgaaggctcttgatttgatcctaaatctgggggtacatgcacacctgctgcaacctatggttattggagatgcgccgcttatagataaaagtgaatctgtgaaccgttcttatctgagcaatgaatacggatcaagtataaatgaaccgagggaagcagaacctgaagtagaacagaagatcagtcctgctattgatcaatttgaatcatggcttcttaaaatgctttttgaggttctccttctcctagtacagatagaggagcgacaagagatcgtgtgggcctcagctttgagttgtctattttactttgtttgtgatggaggaaaaattatcaggagtagactgggaggtctggacataagggtggttaagactcttcttgagattagtgtggagcactcttgggcaaaagtagtgcacagcaagctcatttgcatgttatcaaatatgatgtaccaagtatcagatttaactcagaatggtgtttctgacacacattttgttcctgagcggattgatcttcttggtgggattgactacatttgtcttgagtattcacgagccaactcaagggaagagaagcgggatttgttctttgtcatttttgactacgtagtgcatcaaataaatgaggcatgcttggctggtggtatttcaacctatacttatgatgatgcccagccccttgcttcccttcttgcctttgctgatgctcctgaggctttctacatatctgtgaagcacggcgttgaaggcgtcggagacatgctaagaaaagctatatcagcagcattatctcagtctgctcaatatgaccaattgaatgtgcttctggataaggttatgaggaaacttgatggaactgccagcacattttccaggattgacaatgagttttcttatatgatccaagtaacgaaatcatgcaagtgttttggcagcattaaagatggatgtgatgatgctgatgtagcgcttagagccaggctttgctgggcaactttgcactcacttcttcactcacatatttcatcatataggcaccatggatatatttggttagttgaattgctcctttcagaaatcagtgaagaaacagatggttctgtatggtctaaaatccaaaagcttcaagaggaaattgaagttgctggtagccaagacctatcatgttcagaagtctctctgcctgtttgtatgctttgtgggcttctaaagtcaaaacacaatttcattaggtggggattcctatatgtgctggacaaatttcttatgcgttgcaaattattattggatgacaatgacatgcaagaccacacaactgctgatcataataaaaattgtcttgataaagcttttgcggttatagatattatgaatagtgctttgttacttgttgttcaaaacaatgagacggaccatatcaacatattaaagatgtgtgacatgctgttctctcaattatgcctgagaattccatccacaaatgcgatgcaagttaggggtcttcagtcccttggtcaactttttggttatacatctaagaacatcgatagtcatttggaaacccttgcatctcaccaaagtattggaaataagaatatttgccggagtgagacattgcaagatattggcatagatcaatctggtcaatccacttctttctgtgaagcatcaatggcagcactgcttctgagagggctcgcgatagccccaatgcagcttgtagcccgtgtaccaacctctttgtttttctggccattgatacagcttgaaggggcagccagtgatgacattgcattgggtattgctgttggtagcacaggaagaggcaaccttcctggtgctacatcagatatccgagcagcactccttttacttttgatcggtaaatgcacagctgatcaggaggcactgaaagaggtagaaggcaatgagttcttcaggggtcttctggatgacacagattcaagggtagcatactattctgccgcttttcttttgaagagaatgatgacagaggaaccagagatataccaacggatgcttcaaagcctcatctcaaaagctcaacagtgtaacaatgagaaacttctggagaacccataccttcagatgcgtgggatattgcagttatcaaatgacctaggagttcaatgataagatcgtgatgacatttcaatggataaagctctaagttagaatcactacttctggctgtgtttattgcagagaacctgaagatgttccgaactaagttttgcagatgctatgtgaatcatgtaaattattgctttggccagatgcatgtacagatccatgaatttctttattctttgttagactagtcacagtccaagggagtcacagattaacaagataatctgatgatcatcctgtgttatggacacagtgcattgtggtttaccaacctggacgacttgacaaaggtttaagccaaggtggcgtagatgtgactccctacaattttgtattgcagaaaccgttgagatctgaggcaaggcattatatatattttttgggcgagacatgctcggttcaataaatatttgtgtgttcgctttgcatatatggtaactgatcagaggagtgtagatttgtattgcggagtaacaatgtaaatgttaggtttgaatatactgatttcgagatgatgtaatccttctatactagcttagcttccatgttggttgtttaatttcgataagaggttgtttacttttatatgctgtttggtttacatatttgtgacgtgatgaataaccgataa

SEQ ID NO: 30709 - DNA, 4281 bp, Zea Mays
atgccgctccgggagggagccaagcgtgtctccagcgcgcgccactatgcccccgccgcgccaacacccgcgcccgcgggggcacccgtcccgccccaccgcccgccgcgatctgtctccgccgctggctccatatccactgcctccgcccgcaagccgccagagccgcttcgaagggccgtcgccgactgcctctcgccgcccgccccgcacacccatggcccagctgcagccgccgcttctgccaccgcggaggcttcacggacgctccgggattatatagccaacccttcaaccatggatatggcttataatgtcctcattgaccatgcacttgcagaaagtgatcgtagcagttgttccgagatgcgtgtcattgttaaagagatatcttatccggtacattccaagggtgcaaactctgcgacaaattgatctgttttgtgcgaatacgattgcaaaatgtgaaccgatggcaaataatagagcagcatcttttgccaagaataatgtatcagcagcagctgcaataaattcttcatcccttgccccaccaatatccaactttgcttcagcatctcttgtgaagtctttaaactatgttcgctcattggttgcaaggcatactccaaagttgtcattccaatcaatagtcgcggcaaagcagtcacttccttcactttcatcatttctgaataggtccttactttctcaactaactccagaagttattagcaacagagaacatcttgaatcgaaggaatgccatagctcacctgattttatatcatcagcaagtgaaaaagttgatgtgggtgaacctgtagatgatagcaaatatatatccttcgacattttaagctggcgatggcatgtgtatggcgaacggcagtcgtccttatctgccaaagaaagcagtgattttgtgggtcttcaagattttcatatacatggttttcttgaagtcggtgctgcagctcttctagttggggatatggatgcgaaaattaatgatcaacagtggaaatattctgttatccaggaatttccagatattgatttgttacaaccttcatcttctgccgcaagtacttttgcgtcatcacaaagtcatttaaaagcaataactgcttcaaaacgcatgagatcagctccaaatcaagtctggatgaacataccaataaacacattccagcctcgagcacggcctctttttcagtacagatactacagtgagcagcaacccttaagattgaatcctgctgaaatttctgaagtcatagctgaagtttgttcagaagcaacttcaaatgcaaatcagttgattgttccatcaagattgagcacccagagtcggcaaccttcagcagatgtggcattcagtgtccttatcaaacttgtcattgacatgtatatgatggactccgagactgctgctcctctgacactttatatgcttgagggtatgctgagctctcaaaagtcatcagccagaacgaaggctcttgatttgatcctaaatctgggggtacatgcacacctgctgcaacctatggttattggagatgcgccgcttatagataaaagtgaatctgtgaaccgttcttatctgagcaatgaatacggatcaagtataaatgaaccgagggaagcagaacctgaagtagaacagaagatcagtcctgctattgatcaatttgaatcatggcttcttaaaatgctttttgaggttctccttctcctagtacagatagaggagcgacaagagatcgtgtgggcctcagctttgagttgtctattttactttgtttgtgatggaggaaaaattatcaggagtagactgggaggtctggacataagggtggttaagactcttcttgagattagtgtggagcactcttgggcaaaagtagtgcacagcaagctcatttgcatgttatcaaatatgatgtaccaagtatcagatttaactcagaatggtgtttctgacacacattttgttcctgagcggattgatcttcttggtgggattgactacatttgtcttgagtattcacgagccaactcaagggaagagaagcgggatttgttctttgtcatttttgactacgtagtgcatcaaataaatgaggcatgcttggctggtggtatttcaacctatacttatgatgatgcccagccccttgcttcccttcttgcctttgctgatgctcctgaggctttctacatatctgtgaagcacggcgttgaaggcgtcggagacatgctaagaaaagctatatcagcagcattatctcagtctgctcaatatgaccaattgaatgtgcttctggataaggttatgaggaaacttgatggaactgccagcacattttccaggattgacaatgagttttcttatatgatccaagtaacgaaatcatgcaagtgttttggcagcattaaagatggatgtgatgatgctgatgtagcgcttagagccaggctttgctgggcaactttgcactcacttcttcactcacatatttcatcatataggcaccatggatatatttggttagttgaattgctcctttcagaaatcagtgaagaaacagatggttctgtatggtctaaaatccaaaagcttcaagaggaaattgaagttgctggtagccaagacctatcatgttcagaagtctctctgcctgtttgtatgctttgtgggcttctaaagtcaaaacacaatttcattaggtggggattcctatatgtgctggacaaatttcttatgcgttgcaaattattattggatgacaatgacatgcaagaccacacaactgctgatcataataaaaattgtcttgataaagcttttgcggttatagatattatgaatagtgctttgttacttgttgttcaaaacaatgagacggaccatatcaacatattaaagatgtgtgacatgctgttctctcaattatgcctgagaattccatccacaaatgcgatgcaagttaggggtcttcagtcccttggtcaactttttggttatacatctaagaacatcgatagtcatttggaaacccttgcatctcaccaaagtattggaaataagaatatttgccggagtgagacattgcaagatattggcatagatcaatctggtcaatccacttctttctgtgaagcatcaatggcagcactgcttctgagagggctcgcgatagccccaatgcagcttgtagcccgtgtaccaacctctttgtttttctggccattgatacagcttgaaggggcagccagtgatgacattgcattgggtattgctgttggtagcacaggaagaggcaaccttcctggtgctacatcagatatccgagcagcactccttttacttttgatcggtaaatgcacagctgatcaggaggcactgaaagaggtagaaggcaatgagttcttcaggggtcttctggatgacacagattcaagggtagcatactattctgccgcttttcttttgaagagaatgatgacagaggaaccagagatataccaacggatgcttcaaagcctcatctcaaaagctcaacagtgtaacaatgagaaacttctggagaacccataccttcagatgcgtgggatattgcagttatcaaatgacctaggagttcaatgataagatcgtgatgacatttcaatggataaagctctaagttagaatcactacttctggctgtgtttattgcagagaacctgaagatgttccgaactaagatgctatgtgaatcatgtaaattattgctttggccagatgcatgtacagatccatgaatttctttattctttgttagactagtcacagtccaagggagtcacagattaacaagataatctgatgatcatcctgtgttatggacacagtgcattgtggtttaccaacctggacgacttgacaaaggtttaagccaaggtggcgtagatgtgactccctacaattttgtattgcagaaaccgttgagatctgaggcaaggcattatatatattttttgggcgagacatgctcggttcaataaatatttgtgtgttcgctttgcatatatggtaactgatcagaggagtgtagatttgtattgcggagtaacaatgtaaatgttaggtttgaatatactgatttcgagatgatgtaatccttctatactagcttagcttccatgttggttgtttaatttcgataagaggttgtttacttttatatgctgtttggtttacatatttgtgacgtgatgaataaccgataa

SEQ ID NO: 30710 - DNA, 4725 bp, Zea Mays
atgccgctccgggagggagccaagcgtgtctccagcgcgcgccactatgcccccgccgcgccaacacccgcgcccgcgggggcacccgtcccgccccaccgcccgccgcgatctgtctccgccgctggctccatatccactgcctccgcccgcaagccgccagagccgcttcgaagggccgtcgccgactgcctctcgccgcccgccccgcacacccatggcccagctgcagccgccgcttctgccaccgcggaggcttcacggacgctccgggattatatagccaacccttcaaccatggatatggcttataatgtcctcattgaccatgcacttgcagaaagtgatcgtagcagttgttccgagatgcgtgtcattgttaaagagatatcttatccggtacattccaagggtgcaaactctgcgacaaattgatctgttttgtgcgaatacgattgcaaaatgtgaaccgatggcaaataatagagcagcatcttttgccaagaataatgtatcagcagcagctgcaataaattcttcatcccttgccccaccaatatccaactttgcttcagcatctcttgtgaagtctttaaactatgttcgctcattggttgcaaggcatactccaaagttgtcattccaatcaatagtcgcggcaaagcagtcacttccttcactttcatcatttctgaataggtccttactttctcaactaactccagaagttattagcaacagagaacatcttgaatcgaaggaatgccatagctcacctgattttatatcatcagcaagtgaaaaagttgatgtgggtgaacctgtagatgatagcaaatatatatccttcgacattttaagctggcgatggcatgtgtatggcgaacggcagtcgtccttatctgccaaagaaagcagtgattttgtgggtcttcaagattttcatatacatggttttcttgaagtcggtgctgcagctcttctagttggggatatggatgcgaaaattaatgatcaacagtggaaatattctgttatccaggaatttccagatattgatttgttacaaccttcatcttctgccgcaagtacttttgcgtcatcacaaagtcatttaaaagcaataactgcttcaaaacgcatgagatcagctccaaatcaagtctggatgaacataccaataaacacattccagcctcgagcacggcctctttttcagtacagatactacagtgagcagcaacccttaagattgaatcctgctgaaatttctgaagtcatagctgaagtttgttcagaagcaacttcaaatgcaaatcagttgattgttccatcaagattgagcacccagagtcggcaaccttcagcagatgtggcattcagtgtccttatcaaacttgtcattgacatgtatatgatggactccgagactgctgctcctctgacactttatatgcttgagggtatgctgagctctcaaaagtcatcagccagaacgaaggctcttgatttgatcctaaatctgggggtacatgcacacctgctgcaacctatggttattggagatgcgccgcttatagataaaagtgaatctgtgaaccgttcttatctgagcaatgaatacggatcaagtataaatgaaccgagggaagcagaacctgaagtagaacagaagatcagtcctgctattgatcaatttgaatcatggcttcttaaaatgctttttgaggttctccttctcctagtacagatagaggagcgacaagagatcgtgtgggcctcagctttgagttgtctattttactttgtttgtgatggaggaaaaattatcaggagtagactgggaggtctggacataagggtggttaagactcttcttgagattagtgtggagcactcttgggcaaaagtagtgcacagcaagctcatttgcatgttatcaaatatgatgtaccaagtatcagatttaactcagaatggtgtttctgacacacattttgttcctgagcggattgatcttcttggtgggattgactacatttgtcttgagtattcacgagccaactcaagggaagagaagcgggatttgttctttgtcatttttgactacgtagtgcatcaaataaatgaggcatgcttggctggtggtatttcaacctatacttatgatgatgcccagccccttgcttcccttcttgcctttgctgatgctcctgaggctttctacatatctgtgaagcacggcgttgaaggcgtcggagacatgctaagaaaagctatatcagcagcattatctcagtctgctcaatatgaccaattgaatgtgcttctggataaggttatgaggaaacttgatggaactgccagcacattttccaggattgacaatgagttttcttatatgatccaagtaacgaaatcatgcaagtgttttggcagcattaaagatggatgtgatgatgctgatgtagcgcttagagccaggctttgctgggcaactttgcactcacttcttcactcacatatttcatcatataggcaccatggatatatttggttagttgaattgctcctttcagaaatcagtgaagaaacagatggttctgtatggtctaaaatccaaaagcttcaagaggaaattgaagttgctggtagccaagacctatcatgttcagaagtctctctgcctgtttgtatgctttgtgggcttctaaagtcaaaacacaatttcattaggtggggattcctatatgtgctggacaaatttcttatgcgttgcaaattattattggatgacaatgacatgcaagaccacacaactgctgatcataataaaaattgtcttgataaagcttttgcggttatagatattatgaatagtgctttgttacttgttgttcaaaacaatgagacggaccatatcaacatattaaagatgtgtgacatgctgttctctcaattatgcctgagaattccatccacaaatgcgatgcaagttaggggtcttcagtcccttggtcaactttttggttatacatctaagaacatcgatagtcatttggaaacccttgcatctcaccaaagtattggaaataagaatatttgccggagtgagacattgcaagatattggcatagatcaatctggtcaatccacttctttctgtgaagcatcaatggcagcactgcttctgagagggctcgcgatagccccaatgcagcttgtagcccgtgtaccaacctctttgtttttctggccattgatacagcttgaaggggcagccagtgatgacattgcattgggtattgctgttggtagcacaggaagaggcaaccttcctggtgctacatcagatatccgagcagcactccttttacttttgatcggtaaatgcacagctgatcaggaggcactgaaagaggtagaaggcaatgagttcttcaggggtcttctggatgacacagattcaagggtagcatactattctgccgcttttcttttgaagagaatgatgacagaggaaccagagatataccaacggatgcttcaaagcctcatctcaaaagctcaacagtgtaacaatgagaaacttctggagaacccataccttcagatgcgtgggatattgcagttatcaaatgacctaggagttcaatgataagatcgtgatgacatttcaatggataaagctctaagttagaatcactacttctggctgtgtttattgcagagaacctgaagatgttccgaactaaggtatgtccttctgaattattcattgttattgtcatcattataataatgtgaatttgcctgtaagttacttgacataatgcactctattatctttagaggaaacagtatgaaaggatcttactttggaatagagtatgaaatagaggaagcaccatgggagtaacactttttattttattttatgaactttaggcatttttctgcatcctgaacaaacttattctctgctctatggatgataattgcaatctcatgctcgaagattaatttttcctatgcatctgtgttgatggaccaaccctttccagtatcctgccacttcttatgatcaagattattttgtcgtttcttatgattgaaatgctaggctaccagaataacattctccatagtccctatttgtactatcgaggttactaatatttcttgtttgtagttttgcagatgctatgtgaatcatgtaaattattgctttggccagatgcatgtacagatccatgaatttctttattctttgttagactagtcacagtccaagggagtcacagattaacaagataatctgatgatcatcctgtgttatggacacagtgcattgtggtttaccaacctggacgacttgacaaaggtttaagccaaggtggcgtagatgtgactccctacaattttgtattgcagaaaccgttgagatctgaggcaaggcattatatatattttttgggcgagacatgctcggttcaataaatatttgtgtgttcgctttgcatatatggtaactgatcagaggagtgtagatttgtattgcggagtaacaatgtaaatgttaggtttgaatatactgatttcgagatgatgtaatccttctatactagcttagcttccatgttggttgtttaatttcgataagaggttgtttacttttatatgctgtttggtttacatatttgtgacgtgatgaataaccgataa

SEQ ID NO: 30711 - DNA, 4286 bp, Zea Mays
atgccgctccgggagggagccaagcgtgtctccagcgcgcgccactatgcccccgccgcgccaacacccgcgcccgcgggggcacccgtcccgccccaccgcccgccgcgatctgtctccgccgctggctccatatccactgcctccgcccgcaagccgccagagccgcttcgaagggccgtcgccgactgcctctcgccgcccgccccgcacacccatggcccagctgcagccgccgcttctgccaccgcggaggcttcacggacgctccgggattatatagccaacccttcaaccatggatatggcttataatgtcctcattgaccatgcacttgcagaaagtgatcgtagttgttccgagatgcgtgtcattgttaaagagatatcttatccggtacattccaagggtgcaaactctgcgacaaattgatctgttttgtgcgaatacgattgcaaaatgtgaaccgatggcaaataatagagcagcatcttttgccaagaataatgtatcagcagcagctgcaataaattcttcatcccttgccccaccaatatccaactttgcttcagcatctcttgtgaagtctttaaactatgttcgctcattggttgcaaggcatactccaaagttgtcattccaatcaatagtcgcggcaaagcagtcacttccttcactttcatcatttctgaataggtccttactttctcaactaactccagaagttattagcaacagagaacatcttgaatcgaaggaatgccatagctcacctgattttatatcatcagcaagtgaaaaagttgatgtgggtgaacctgtagatgatagcaaatatatatccttcgacattttaagctggcgatggcatgtgtatggcgaacggcagtcgtccttatctgccaaagaaagcagtgattttgtgggtcttcaagattttcatatacatggttttcttgaagtcggtgctgcagctcttctagttggggatatggatgcgaaaattaatgatcaacagtggaaatattctgttatccaggaatttccagatattgatttgttacaaccttcatcttctgccgcaagtacttttgcgtcatcacaaagtcatttaaaagcaataactgcttcaaaacgcatgagatcagctccaaatcaagtctggatgaacataccaataaacacattccagcctcgagcacggcctctttttcagtacagatactacagtgagcagcaacccttaagattgaatcctgctgaaatttctgaagtcatagctgaagtttgttcagaagcaacttcaaatgcaaatcagttgattgttccatcaagattgagcacccagagtcggcaaccttcagcagatgtggcattcagtgtccttatcaaacttgtcattgacatgtatatgatggactccgagactgctgctcctctgacactttatatgcttgagggtatgctgagctctcaaaagtcatcagccagaacgaaggctcttgatttgatcctaaatctgggggtacatgcacacctgctgcaacctatggttattggagatgcgccgcttatagataaaagtgaatctgtgaaccgttcttatctgagcaatgaatacggatcaagtataaatgaaccgagggaagcagaacctgaagtagaacagaagatcagtcctgctattgatcaatttgaatcatggcttcttaaaatgctttttgaggttctccttctcctagtacagatagaggagcgacaagagatcgtgtgggcctcagctttgagttgtctattttactttgtttgtgatggaggaaaaattatcaggagtagactgggaggtctggacataagggtggttaagactcttcttgagattagtgtggagcactcttgggcaaaagtagtgcacagcaagctcatttgcatgttatcaaatatgatgtaccaagtatcagatttaactcagaatggtgtttctgacacacattttgttcctgagcggattgatcttcttggtgggattgactacatttgtcttgagtattcacgagccaactcaagggaagagaagcgggatttgttctttgtcatttttgactacgtagtgcatcaaataaatgaggcatgcttggctggtggtatttcaacctatacttatgatgatgcccagccccttgcttcccttcttgcctttgctgatgctcctgaggctttctacatatctgtgaagcacggcgttgaaggcgtcggagacatgctaagaaaagctatatcagcagcattatctcagtctgctcaatatgaccaattgaatgtgcttctggataaggttatgaggaaacttgatggaactgccagcacattttccaggattgacaatgagttttcttatatgatccaagtaacgaaatcatgcaagtgttttggcagcattaaagatggatgtgatgatgctgatgtagcgcttagagccaggctttgctgggcaactttgcactcacttcttcactcacatatttcatcatataggcaccatggatatatttggttagttgaattgctcctttcagaaatcagtgaagaaacagatggttctgtatggtctaaaatccaaaagcttcaagaggaaattgaagttgctggtagccaagacctatcatgttcagaagtctctctgcctgtttgtatgctttgtgggcttctaaagtcaaaacacaatttcattaggtggggattcctatatgtgctggacaaatttcttatgcgttgcaaattattattggatgacaatgacatgcaagaccacacaactgctgatcataataaaaattgtcttgataaagcttttgcggttatagatattatgaatagtgctttgttacttgttgttcaaaacaatgagacggaccatatcaacatattaaagatgtgtgacatgctgttctctcaattatgcctgagaattccatccacaaatgcgatgcaagttaggggtcttcagtcccttggtcaactttttggttatacatctaagaacatcgatagtcatttggaaacccttgcatctcaccaaagtattggaaataagaatatttgccggagtgagacattgcaagatattggcatagatcaatctggtcaatccacttctttctgtgaagcatcaatggcagcactgcttctgagagggctcgcgatagccccaatgcagcttgtagcccgtgtaccaacctctttgtttttctggccattgatacagcttgaaggggcagccagtgatgacattgcattgggtattgctgttggtagcacaggaagaggcaaccttcctggtgctacatcagatatccgagcagcactccttttacttttgatcggtaaatgcacagctgatcaggaggcactgaaagaggtagaaggcaatgagttcttcaggggtcttctggatgacacagattcaagggtagcatactattctgccgcttttcttttgaagagaatgatgacagaggaaccagagatataccaacggatgcttcaaagcctcatctcaaaagctcaacagtgtaacaatgagaaacttctggagaacccataccttcagatgcgtgggatattgcagttatcaaatgacctaggagttcaatgataagatcgtgatgacatttcaatggataaagctctaagttagaatcactacttctggctgtgtttattgcagagaacctgaagatgttccgaactaagttttgcagatgctatgtgaatcatgtaaattattgctttggccagatgcatgtacagatccatgaatttctttattctttgttagactagtcacagtccaagggagtcacagattaacaagataatctgatgatcatcctgtgttatggacacagtgcattgtggtttaccaacctggacgacttgacaaaggtttaagccaaggtggcgtagatgtgactccctacaattttgtattgcagaaaccgttgagatctgaggcaaggcattatatatattttttgggcgagacatgctcggttcaataaatatttgtgtgttcgctttgcatatatggtaactgatcagaggagtgtagatttgtattgcggagtaacaatgtaaatgttaggtttgaatatactgatttcgagatgatgtaatccttctatactagcttagcttccatgttggttgtttaatttcgataagaggttgtttacttttatatgctgtttggtttacatatttgtgacgtgatgaataaccgataa

SEQ ID NO: 30712 - DNA, 1159 bp, Zea Mays
tatcatattttttcatgattatttgaatttggaattgttgaagatgtgtgacatgctgttctctcaattatgcctgagaattccatccacaaatgcgatgcaagttaggggtcttcagtcccttggtcaactttttggttatacatctaagaacatcgatagtcatttggaaacccttgcatctcaccaaagtattggaaataagaatatttgccggagtgagacattgcaagatattggcatagatcaatctggtcaatccacttctttctgtgaagcatcaatggcagcactgcttctgagagggctcgcgatagccccaatgcagcttgtagcccgtgtaccaacctctttgtttttctggccattgatacagcttgaaggggcagccagtgatgacattgcattgggtattgctgttggtagcacaggaagaggcaaccttcctggtgctacatcagatatccgagcagcactccttttacttttgatcggtaaatgcacagctgatcaggaggcactgaaagaggtagaaggcaatgagttcttcaggggtcttctggatgacacagattcaagggtagcatactattctgccgcttttcttttgaagagaatgatgacagaggaaccagagatataccaacggatgcttcaaagcctcatctcaaaagctcaacagtgtaacaatgagaaacttctggagaacccataccttcagatgcgtgggatattgcaattaacaagataatctgatgatcatcctgtgttatggacacagtgcattgtggtttaccaacctggacgacttgacaaaggtttaagccaaggtggcgtagatgtgactccctacaattttgtattgcagaaaccgttgagatctgaggcaaggcattatatatattttttgggcgagacatgctcggttcaataaatatttgtgtgttcgctttgcatatatggtaactgatcagaggagtgtagatttgtattgcggagtaacaatgtaaatgttaggtttgaatatactgatttcgagatgatgtaatccttctatactagcttagcttccatgttggttgtttaatttcgataagaggttgtttacttttatatgctgtttggtttacatatttgtgacgtgatgaataaccgataa

SEQ ID NO: 30713 - DNA, 1624 bp, Zea Mays
attttggcccatttaggcgccatgcccagcccaatccaagaaacaacggaacgaggttggatgatgacgtggttttctcctttttccccaccaaaagaaatttgaaatccagtcagtccaggtttccccagcccctccgcttctccaatgtctaccgccgtccacgctgcagccatggcggaggacgccgccgccgatctgcgccggaggatgaaggacaagcgagccgccatcgagcgccggatcaccgactcccgggaccgcgccgccgccgcctcctccgccttcagcgccgccctcctcgaggcgcgctccatcgccaaccagaccgtctccaaccgaggcatatcaaactcttggccccctacttctactactcgcctcttttttcccccttcggctttggcttcgccctcctctccaatctttggtttagttagcataatggatcagccaggtccggtagggttagtgtttccgtgggaagccagcatccaatccaccaccgaggctcctaaaactagtcaaccaggcagctcgattctgcctggcacagccccgcctactatgttggccttgtgctgagatctcactcagtggcagatccaagtagcaaaactcagcgaacaaaaacaacacctcaggaaattagaatcagatctagcacaggccctctccgtccaagcaagcagaaggtcaaaacacaagttcatgactgagtcgatttcaaacaccactgcaacaaatgaacatcttagacacttggctatggaccgtaggtctacaagagatgaatgcatgaatgccatatcaaatcaactaaaagatattgaatcccttgaagctgaaagtgacgcacatggagataagagcctagagacggctcttatgtggtatgataagtttcttggttttcaagttgttggaggagaaggggtgaaatttgtgttcaacaaaattgatgtgcaaaatcctgacaagaagtattctttttgcataaaacttgctggagaaagatacatcttagtctggtgtgttccatctgtggacgatgctgaagaattggtgaaggatcttaactgcagcaatgatctgtacaaatttgtgagggccatgagagagatgttccaggctgctacaatcagtggaaatctgttgccaagctccttttgccccgacgtttcatccataacatcttcatcgttctcagcgttatcactggattccagaagtgaaaaatagcattaatcagagtcataccatgacattgacttagcaatgggctgcggatatctgtacagtacaagttgaagcacttctgaagccctcttctgttacacacgctagcagtgttgtataatgcttgtctgctgcttgcattttgactccaaactcgcagttttgctgtttgtaactttgtactattacctatcattcttaataatcatggtaatgtttgagccttttaggtgctcgatcccactgattttgatcaacgcattattttgtttttgtttctttattagccacccatcaaaattctcactgcgctttgcttaccaagaacattaattttcatggtttgacgtcttgtgaacagaaattagcatctgcattaattttc

SEQ ID NO: 30714 - DNA, 2099 bp, Zea Mays
attttggcccatttaggcgccatgcccagcccaatccaagaaacaacggaacgaggttggatgatgacgtggttttctcctttttccccaccaaaagaaatttgaaatccagtcagtccaggtttccccagcccctccgcttctccaatgtctaccgccgtccacgctgcagccatggcggaggacgccgccgccgatctgcgccggaggatgaaggacaagcgagccgccatcgagcgccggatcaccgactcccgggaccgcgccgccgccgcctcctccgccttcagcgccgccctcctcgaggcgcgctccatcgccaaccagaccgtctccaaccgaggcatatcaaactcttggccccctacttctactactcgcctcttttttcccccttcggctttggcttcgccctcctctccaatctttggtttagttagcataatggatcagccaggtccggtagggttagtgtttccgtgggaagccagcatccaatccaccaccgaggctcctaaaactagtcaaccaggcagctcgattctgcctggcacagccccgcctactatgttggccttgtgctgagatctcactcagtggcagatccaagtaggcaagtaatcaagcacctgcctagtactagtactcatttcttgataaaggtgttctctcgaggtggccgtcgctcaattcatctaccactcatcaatttggcaaacagctttggccgttgccttttagtacaacatttgccattagcatcttatctatatgcttgtttaagctcattattatttgcaaaattactttactcatctctctctctctctctctctctctctgtgtgtgtgtgtgtgtgttttggattggcagcaaaactcagcgaacaaaaacaacacctcaggaaattagaatcagatctagcacaggccctctccgtccaagcaagcagaaggtcaaaacacaagttcatgactgagtcgatttcaaacaccactgcaacaaatgaacatcttagacacttggctatggaccgtaggtctacaagagatgaatgcatgaatgccatatcaaatcaactaaaagatattgaatcccttgaagctgaaagtgacgcacatggagataagagcctagagacggctcttatgtggtatgataagtttcttggttttcaagttgttggaggagaaggggtgaaatttgtgttcaacaaaattgatgtgcaaaatcctgacaagaagtattctttttgcataaaacttgctggagaaagatacatcttagtctggtgtgttccatctgtggacgatgctgaagaattggtgaaggatcttaactgcagcaatgatctgtacaaatttgtgagggccatgagagagatgttccaggctgctacaatcagtggtattttatgctacatattctcgttacgtgttttgtcttcaatcatgacataggttccaagctcaggactattgggcatggtttgcggtagttttttttaagtcttttgaacttagttagttatttggtggtttgtaaatgtagcaaccaactcgtcgttattatttatttggagttatggtttgcgttttttttttgtgtgtgtgtgtgtgcaggaaatctgttgccaagctccttttgccccgacgtttcatccataacatcttcatcgttctcagcgttatcactggattccagaagtgaaaaatagcattaatcagagtcataccatgacattgacttagcaatgggctgcggatatctgtacagtacaagttgaagcacttctgaagccctcttctgttacacacgctagcagtgttgtataatgcttgtctgctgcttgcattttgactccaaactcgcagttttgctgtttgtaactttgtactattacctatcattcttaataatcatggtaatgtttgagccttttaggtgctcgatcccactgattttgatcaacgcattattttgtttttgtttctttattagccacccatcaaaattctcactgcgctttgcttaccaagaacattaattttcatggtttgacgtcttgtgaacagaaattagcatctgcattaattttc

SEQ ID NO: 30715 - DNA, 1090 bp, Zea Mays
ctctcctctcctctcgctctctactactagctactagctttaatttgtaactgcttgtctgccatggaggaagaggagggatcgtcgacatcatcagtcgctgtgcctgtgccgccgccgcctaataagtacgactcctggacgacagatccggaggagctgatgatgatgatggtcgacgaggcggcggtgctgatgagcaagatggagaacaagtacacgctcaagatcaagacctgtgggaacggcagcagccttgcggaggatggatacaaatggaggaaatacggccagaaatccatcaagaacagccccaacccaaggagctactaccggtgcacgaaccctcggtgcaacgccaagaagcaggtggagcggtcgacggacgagccggacacgctcgtcgtcacctacgagggcctccacctgcactacacctactcgcacttcctccaccaccagcaaccgccgccgcagcccaaaaagcccaagctcggcgccggcccaccacaacagcccatcgtcgtcatggacgacgaccttctccacggcccggcccaacaagacatcatcaccaccggcccactgggagctgctgtcatggctccagcaccagcaccaccaccagcagcagcatctttctgctacgaccttgacgacgatgtacctgcttttttcgacgaccacgaccaccaccaccaccagcagcagcacatcaccaacggcgggctgctggaagacatggtgccgctgctggtccggcggccctgcaccaccaccaccaccacctccgccggtagcacgtcgccggacctttccgcgtcgtcctctgtctcatggaaccccacctcgccttacatcgacatggccattctctccaacattttctagtgcatgcatgcatgcgtccgtgttcaactaccatgcacacgcacccatcgtcatgtttgtattgtgtgctgatatatagtatgtatgtatgtatgtactagctagtataatactactagcagtacgtgtgtgtacgtacgtagatccgatccatcctcaggcgcgcggtgctatatatattgtcgatctgttattaaat

SEQ ID NO: 30716 - DNA, 2469 bp, Zea Mays
ctcctcctcgctcccagcccagctagctagctgctgcatatgccttctagctagctagctttcatccccggccccctttcgatccatccatcctgtgttccaagttcatcattcactcgtcactaatagctttctatctgatcgattcatcatcatccgggcatgcatgagcatcatcgtctccagatcgttgggctctcgcagctacctacattcaacattcaagctcgctctacatatgcatgcaaatctgcaacactcgctcttggcagggatacattcacgccgagagagagagagagagagagagagagagagagagagagagagatgtgtgtgctgtagtcatcagccagccggtgatttctggagtggcatcatcaagattcacacactgcatgccaacataatgcgcgtgttcatgcatccatcgccgccgctgcatcatgcatcatatataatatatatatatgtgtatgtgtgggaatcttgatgatgctgcattggatatcaagggctatatatatatatggatcaagcatatatatatatatatcagatcaccagtcatatcgagttcttccttccaggcttgctaggtaatttataacttaaaccttgttgctgaactaactaattttacttagctagctagctactactatacttcattgttagtagtagctagcaagaaggaaagtaggcatcccggccggttcgtaccttctttttttttgcacagcaggatctgaccttctgtataaaatgcatttttgccttgagtttttttgtttttccacagtaggaggtagctgattctgatctgctgtataaaaatgcatttttttccttttcatttcatggcagaaggcaatatataataagaaaagactgaaaggaaaaggcaccactgccatgatggatcgcatcagtgcatctgttttgttcttctaaacgattcaggtcatcagctcagctcagcacagcaggatttgtatcgctcgtatgtgtggctgggctgccagagcgtgttcggcccaatctaaatccggattggcatagcaggccaaactgggccagccatggatgaccccgacccataattgtatgtttgggcctggtttggatcatcggtcaaactgacccagcgggctgcttgcttcaactccgatctccactctcctctcctctcctctcctctatacagagattagagagaagagatctaggaaggcagacactgcaactagctagcaggtccggcaggccgcacgccatggacgcctccgccggcagcgtgctctgcagcaggagctactcggccagcgtgagcagagcctcgtcttcccagcaagcagaatcgtcgtcgcggctgtgcgtggaggagcaccgggcggaatggtgattcatctgcatgtactacgagcagcatttgttcgatttttccgctgtgttcgtaccgagaatatccagtcacttgtgggtccgagagagcatttcgtttgtgagttttagtgtttacaaggattaagtgaaaacttcacaagtaagtcgtaactattttctgcaaataagttttattgtcttacattcaccctcctctagacgtatgtttcggtccttcatcgtcgcctccgtcatgttgtgatggtcctaaaagcacatatatattgtatctactaggtgtgtgaccgtgcgttgccacagaagttaaaaattagtatacaaatctagatacagaacaatatacaaaatctttgtgataaaatatcactgtaacactaatattatattgacgatataaatatataatattattataaatataccgactcaaatagaatgaactgacgtcgaacaaacattataatcaagaaaatcttattgatctcggtcaaaatactgaaccaagtagtagcaagaggctaagaacttaggaaaatgattttctaaggaatcttcagactcctaggtagcttcttcttctgtgtgtgttggttccattgtactttgtaaaacttgagagtcctttttcgagtaactcggtctttctaatccaaaacttggatgggatattccgaataggttaagtctggttccaaattaacatcagacacatccatagtttgatcagggatccgaagacacttcttcaattgggatacgtggaacacattatgtacagcagacagtgattctagcaactgaagtatgtacgcaacctgcccacatcgttcaagaatagggaacgggccaatgtatcggggtgctaactttcctttaaccccgaatcgactaataccctttatcggtgatactttcaagtacacatgaggttggacggacggtctcttatgcattgactgtaaagtatgcctacgcgaaggccgctgattgtatagtggatggcaattttgtcatcaatcagggcagttgcgacttcaggaggaggaactttttataatagtc

SEQ ID NO: 30717 - DNA, 2198 bp, Zea Mays
ctcctcgctcccagcccagctagctagctgctgcatatgccttctagctagctagctttcatccccggccccctttcgatccatccatcctgtgttccaagttcatcattcactcgtcactaatagctttctatctgatcgattcatcatcatccgggcatgcatgagcatcatcgtctccagatcgttgggctctcgcagctacctacattcaacattcaagctcgctctacatatgcatgcaaatctgcaacactcgctcttggcagggatacattcacgccgagagagagagagagagagagagagagagagagagagagagagatgtgtgtgctgtagtcatcagccagccggtgatttctggagtggcatcatcaagattcacacactgcatgccaacataatgcgcgtgttcatgcatccatcgccgccgctgcatcatgcatcatatataatatatatatatgtgtatgtgtgggaatcttgatgatgctgcattggatatcaagggctatatatatatatggatcaagcatatatatatatatatcagatcaccagtcatatcgagttcttccttccaggcttgctagaaggcaatatataataagaaaagactgaaaggaaaaggcaccactgccatgatggatcgcatcagtgcatctgttttgttcttctaaacgattcaggtcatcagctcagctcagcacagcaggatttgtatcgctcgtatgtgtggctgggctgccagagcgtgttcggcccaatctaaatccggattggcatagcaggccaaactgggccagccatggatgaccccgacccataattgtatgtttgggcctggtttggatcatcggtcaaactgacccagcgggctgcttgcttcaactccgatctccactctcctctcctctcctctcctctatacagagattagagagaagagatctaggaaggcagacactgcaactagctagcaggtccggcaggccgcacgccatggacgcctccgccggcagcgtgctctgcagcaggagctactcggccagcgtgagcagagcctcgtcttcccagcaagcagaatcgtcgtcgcggctgtgcgtggaggagcaccgggcggaatggtgattcatctgcatgtactacgagcagcatttgttcgatttttccgctgtgttcgtaccgagaatatccagtcacttgtgggtccgagagagcatttcgtttgtgagttttagtgtttacaaggattaagtgaaaacttcacaagtaagtcgtaactattttctgcaaataagttttattgtcttacattcaccctcctctagacgtatgtttcggtccttcatcgtcgcctccgtcatgttgtgatggtcctaaaagcacatatatattgtatctactaggtgtgtgaccgtgcgttgccacagaagttaaaaattagtatacaaatctagatacagaacaatatacaaaatctttgtgataaaatatcactgtaacactaatattatattgacgatataaatatataatattattataaatataccgactcaaatagaatgaactgacgtcgaacaaacattataatcaagaaaatcttattgatctcggtcaaaatactgaaccaagtagtagcaagaggctaagaacttaggaaaatgattttctaaggaatcttcagactcctaggtagcttcttcttctgtgtgtgttggttccattgtactttgtaaaacttgagagtcctttttcgagtaactcggtctttctaatccaaaacttggatgggatattccgaataggttaagtctggttccaaattaacatcagacacatccatagtttgatcagggatccgaagacacttcttcaattgggatacgtggaacacattatgtacagcagacagtgattctagcaactgaagtatgtacgcaacctgcccacatcgttcaagaatagggaacgggccaatgtatcggggtgctaactttcctttaaccccgaatcgactaataccctttatcggtgatactttcaagtacacatgaggttggacggacggtctcttatgcattgactgtaaagtatgcctacgcgaaggccgctgattgtatagtggatggcaattttgtcatcaatcagggcagttgcgacttcaggaggaggaactttttataatagtc

SEQ ID NO: 30718 - DNA, 385 bp, Zea Mays
ctcgaatgtggccatcccctggcggattgggcgaggaggaacggcgcaagagcaggccttgacggacggaggcggagcacagagcgatcgcgacgggggagggaaaggaggagagggactgcgggagaggcggaggaggagggaattcgaaatctggcttcttatatacggacggagacggagacggaggtgggagaagagggattatataggacggatcggatcctgttcattctcttccgcatgtcggtgccagttattgattctacccctccagattgccatttggttattggcatacaactgtcagctgtacaaggacgaccgcacacatctcatctcatctcctcccctccccctctcctttggatcatttgtcgttttc

SEQ ID NO: 30719 - DNA, 175 bp, Zea Mays
catctacccagtgaatccataccgatgccttcgtgacggtatcgtctcccccgtgtgaactccctcgcattcctctcctcacgccgcctccactcgtgcagtcgcctcccttcgcgccgccgcctctcctcgcgtcgtcgaccgcctctcaccgagaacgattcggtcgaggagc

SEQ ID NO: 30720 - DNA, 326 bp, Zea Mays
tctacccagtgaatccataccgatgccttcgtgacggtatcgtctcccccgtgtgaactccctcgcattcctctcctcacgccgcctccactcgtgcagtcgcctcccttcgcgccgccgcctctcctcgcgtcgtcgaccgcctctcaccgcacgtcctgagcctacaacaaagttgatgctcggtgggttttggagccttgtttgtgaggttcggccgattttacaggcagtctaacgatctgctcctggtacttctggttcagggaggcacctcttcaggtactgctagctggaagctttgtaccccttgaaaaatttcagat

SEQ ID NO: 30721 - DNA, 314 bp, Zea Mays
cataccgatgccttcgtgacggtatcgtctcccccgtgtgaactccctcgcattcctctcctcacgccgcctccactcgtgcagtcgcctcccttcgcgccgccgcctctcctcgcgtcgtcgaccgcctctcaccgcagcacgtcctgagcctacaacaaagttgatgctcggtgggttttggagccttgtttgtgaggttcggccgattttacaggcagtctaacgatctgctcctggtacttctggttcagggaggcacctcttcaggtactgctagctggaagctttgtaccccttgaaaaatttcagat

SEQ ID NO: 30722 - DNA, 2907 bp, Zea Mays
ctcttttagtagagacactctgccacagcgtagcctagcatagcgtccactagctagctagctagctagcatcagtcatggaggatggcgccgagaaggcgacgacaccggattcttcttcttcgcaagcggcaccgccagcgctgagcgcggtgtacgtgaacaggcgcctcgtggcgggcaaccgcgccatggccgccgtccacgtcgcgctggtcgccacggtcatcggccagcgcgccctggcgctgctctctgctggaaccagcagcgcgtcgcccgcgtcccggtccctgcaggtgcagcacgtggccatggcgctggccgacctgacgctgctgttcgtgtgggcgctgtcgcagtcggggctgtggcgtcccgtgacgcgcgccgcgttcccgggccggctgctggcggcggtgccccgcggcgcgctcccgcgcgtggacgtgctggtggtgacggccgacccggacaaggagccgcctctcggggtggtgaacacggtggtgtcggcgatggcgctggactaccccggcggcaagctgagcgtgtacctgtcggacgacgccgggtcgccgctcacgctgctcgccgcccgtaaggcctacgccttcgctgccagggcctgggtgcccttctgcaggaggcactccgtgcagtgcccctggccggacaggtacttcgccggcgacgacgacgacgctgacggcgatcggcggcgggaggagctcgcggaggagagggcaagagtcagggtacatgtctgtctgtctgtctctagtgttttgcttttgattagactattttttttcttttccggtccctctgggcgtgacgtgtgtgatgacgtcaaagtggcacatcgggatggagtctccaacacactccaaagtccaaactccaaagtgccgtaatcagtgtcacgtggaagtggaacaaccattttcgtcctcatgcattgcatgcatgaaactatacgagaagttgaaagcggatatagaggcggctaagaatgacgagactatttctgggagctggtcaaaagacaaacgtcagaatcacgatgcttacgtggagatcatcgaagacggcgacggcgttgaggagattccggcgctggtgtacgtagcccgcgagaagcggagagcgtggcctcaccacttcaaggccggcgctctcaacgccctgctgcgagtgtcgggcgtggtgagcaacgcgccctacgtgctggtcctcgactgtgacatggcctgcaacagccgcgcctccgccctggacgccatgtgcttcctcctcgaccgcaggccgccgccggacagcctcgccttcgtgcagttcccgcagctgttccacaacctcagccacaaggacatctacgccaacgagctcagatacatcttcgggacccgatggttcggcctggacggcgtccggggccctcccctctccggctccggcttctacgtcaggagagacgcgctttacggggccacaccgaccgcggacttcatgcccgatgccaccgccgtcgccgagctcaagacaaggttcggccactccgaccgtctcgtggcatccttacgcagccccggcgttccaccagaagcagaagcgatgatgtcccttgcggcgctggcctcctgcgcatacgaggccggcaccgcctggggcgccggcgtcggcttcatgtaccagtcggtggtggaggactacttcacggggttccagcgcttcttcgcccgggggtggacctccgcctactgctacccggagccgcgcccggcgttcctcggcagcgtgcccaccaacctcaacgacgtgctggtccagaacaagcgctggatgtccggcatgctcgccgtcggcgtctccaggcgccactccccgctcgcctgccgcccgctcctccgggcctccctgctccaggccatggcctacgcctacttcggcttcgccgcgctctgcgccgtccccgtgctctgctacgccaccctgccgcagctctgcctcctccggggcgtcccgctattcccctgccccgccgccaccgcggcggcgttcgcgtcctcgcttctgcagcacatggcggaggtgtgcgtgtccaggcggggtaggctggacctgcgcacgtggtggaacgagcagaggttctgggtgctcaacgccctcacagcccagctcttcggctgcgtcagcgccgcccaggagctgctcggcgcacgcgccttggacttcgacctcaccagcaaggccgccgtcgacgggagcctgtaccaggacggcgtgttcgacttcacgggctgctccgcgctgctgctccctgccaccacgctctccgtgctcaacgccgctgcgatcgtcgccggcacctggaagatgtcgtcgtcgtcgtcgtcatcgagcggcggcttccacttcgccccgcagctgttcctcatgtgctacggcgcggcgctcagctacccgctactggaggggatgttcctcaggcgggatcctgcgagggttccgccacgcatcaccgcactctcggtcgcattggcagccgtgctgcttgccgccatgcttggatgaacatcaaccgagagatgcacggcctgcttcaactcttgtctactgttctagatatactgtacttttaattactattcccactgtattcccaccgttgaagcacaacaacgcagtgaactaaacgacgaacgagaagaagcccaaggttaattagaactaatttatgatatacgttcggactaattattctacacatcaaagatatttatgtaatgcggtataatatatataatttgtttactattgcatacgcataaatttagaaagataagaatgtgagttcaaaggaaatgaattgacgtgcatgataaaaaaaaaatctgattttca

SEQ ID NO: 30723 - DNA, 3054 bp, Zea Mays
ctgagatcgaagctattgctctgcttgtgcatcgcggtaagtaggtaaccacatggaattctgatagaatcgattatcgtacccaaaaaacattggagtaaaaatatgtacacaaaaaaaggtgcgtcacaggagtgtaagccccgttctgttagtccaatagtggaccaagtgaataactgtgagacaaagttggccatttaacccagagccggctcccttttaattgggctccacacgtgtctcagccccccaccgaagcagggagagccagctcgtgggccgtacacgtgtccgtgggcgcatcgctgcgcattaaggcccggggactttccagggctttgaaagcccgctcacttcatcctgtgacgcggccaagaatgccaccacgctccttatatacacggtctcatgtacctgaaccggcgatacgggactaatcgtccttgactgggaatgtggcatgctatgcctgtgtccactccctcccaccacctccaccatggcccgaagcagcttatgggccgctcattcccgccgtttattcttagggctcttcctcaactctcgcactgccgccgccgctgctacgcctacgcaaccgtcaccgtcatccccatggcttccacggcgaccacgcgccgccggccgcggcggggttccaagggccccaacgccgacctctcgcgcaccctaaccgactgcacccgccgcggggacgcggccgccgccatggccgctttcgacgccgccgtcgacgctgacgccgacgccgttccccgcctctccgctcaccagtacaaccaactcctccacctcctcgccgccaccgaccgctcctccttccccagcccccccgccgccgccgcgcgccgtgtcttcgcccacatgctccaggccgcggcgccgccctccgaggccaccataacctccctcgcgcgcgtcatcgccgccgacccggcgtcggccgccgatgaggcgttcgagctcgtggccacaatgaaggacaagtacggcctctccccgcgcctccgctcctacggccccgtcctcgcggcgttccggcgtgccggggaggccgctaaggcctacgctgtcgaggcgcacatgacggcctccggcgtctcgcctgaggagcccgagcttgccgcgctgctggatgtcagctccagagccggggatgcggacaaggtgtatgagtatatgcataagctgaggcaagccgtccactgtgtcagcgaggagactgccggagttgtggaggcctggttcaggagcgacgaggcggcaactgccggcaagcctcaatgggatgccgctcaggtgaaggacgccattgtggcgaacggtggtggctgcccaccgccttgggtggcttggaacccggcccttgaccgtgcagcgggtaagagtggggatgctgatcagtgtgggggatgtagattccatcttgcttgcattgacattgacatggagagacacagaggtttgctgattccgttgctgggtttggccctcgagagggagacaaaaacaaatttcagccgatttcaggagtggttggaagcaaataaagactaccaagctatagtcgatggtgcgaatattgcactatatcaacaaaattttgcggagggcggtttcagtttgacccagctggatggcgttataacagagcttcgggatagatatcatggaaaatggccacttgtcatactacacaataagcgaatttccaagcttatggaaaattcgtctaataggcatttgattgagacctggagaacaaatggggctttgtatacttcaccaagtgggtcaaatgatgactggtaatgctaagtttctagccttcagtatctctgaacttgctgtttatgctcaattctcaaagacaacggaaagaccttgtggttgcggccaccttttcttgtaaactgggaggtgtttcttgtttatgttgtaattctgcagagatcgcagacatctattatcacatagtttgttgattattcacttttcttcattgttatgtttcctcctggatgtttctaattatatgagatgcaaacatccaggtattggctatatgcagcgatcaaactaaattgtttgcttgtgactaatgatgaaatgagagatcacatattcgagcttctagggccgtctttttttccaaagtggaagcaacgccatcgggtaaagtacacctttaataaaggaaaagcggtgcttgtgatgccacccccttactcttcagaacttcaagagtcggagatgggatcttggcacattccaattgaagagaagtctgggaatgagagaggcaggatttggctttgtattggcaggggaggttcctgcaaagaacatggcgaagttccttcgactaatggagctgtccacaaagttcctcaaactgaggcatctaacgtggtgcagcaggggctgacagaaaataaggatgaatcgataactggtaaaagaaaggatagagattgatcaccttcacctatccaggagcaccatctgctcttgagtctgccatcttgtgagcgattgtggccacttgttgttgattcagctgaggcatttcaagaatagggatgcagcgataatgccatcccagatatgtagggtgtgataattattaatcactttcgctgggttgcagactttcattcttcacaaattgggtgtgatcttagacgatttctgtgctatgtatctgactgcatccatgatcatctagtgttaactccagaataccagctaatgaacttttttattaccatcaaactgaggcacatttgcaagtgcattgttgagctactgcaccagaatggtaccgacgctattgatgttgcagcactgctggagctattagtgtatactatgtaggtttgatggtgtagcagcacttagtattactattagtgtatactagttctataatcccctcctgttcaagtcgaattatcctaatcttcctatgtttaccgtttgctattaccaaaaagacttagtattacagtcatcaaataacaactagct

SEQ ID NO: 30724 - DNA, 2822 bp, Zea Mays
ctgagatcgaagctattgctctgcttgtgcatcgcggtaagtaggtaaccacatggaattctgatagaatcgattatcgtacccaaaaaacattggagtaaaaatatgtacacaaaaaaaggtgcgtcacaggagtgtaagccccgttctgttagtccaatagtggaccaagtgaataactgtgagacaaagttggccatttaacccagagccggctcccttttaattgggctccacacgtgtctcagccccccaccgaagcagggagagccagctcgtgggccgtacacgtgtccgtgggcgcatcgctgcgcattaaggcccggggactttccagggctttgaaagcccgctcacttcatcctgtgacgcggccaagaatgccaccacgctccttatatacacggtctcatgtacctgaaccggcgatacgggactaatcgtccttgactgggaatgtggcatgctatgcctgtgtccactccctcccaccacctccaccatggcccgaagcagcttatgggccgctcattcccgccgtttattcttagggctcttcctcaactctcgcactgccgccgccgctgctacgcctacgcaaccgtcaccgtcatccccatggcttccacggcgaccacgcgccgccggccgcggcggggttccaagggccccaacgccgacctctcgcgcaccctaaccgactgcacccgccgcggggacgcggccgccgccatggccgctttcgacgccgccgtcgacgctgacgccgacgccgttccccgcctctccgctcaccagtacaaccaactcctccacctcctcgccgccaccgaccgctcctccttccccagcccccccgccgccgccgcgcgccgtgtcttcgcccacatgctccaggccgcggcgccgccctccgaggccaccataacctccctcgcgcgcgtcatcgccgccgacccggcgtcggccgccgatgaggcgttcgagctcgtggccacaatgaaggacaagtacggcctctccccgcgcctccgctcctacggccccgtcctcgcggcgttccggcgtgccggggaggccgctaaggcctacgctgtcgaggcgcacatgacggcctccggcgtctcgcctgaggagcccgagcttgccgcgctgctggatgtcagctccagagccggggatgcggacaaggtgtatgagtatatgcataagctgaggcaagccgtccactgtgtcagcgaggagactgccggagttgtggaggcctggttcaggagcgacgaggcggcaactgccggcaagcctcaatgggatgccgctcaggtgaaggacgccattgtggcgaacggtggtggctgcccaccgccttgggtggcttggaacccggcccttgaccgtgcagcgggtaagagtggggatgctgatcagtgtgggggatgtagattccatcttgcttgcattgacattgacatggagagacacagaggtttgctgattccgttgctgggtttggccctcgagagggagacaaaaacaaatttcagccgatttcaggagtggttggaagcaaataaagactaccaagctatagtcgatggtgcgaatattgcactatatcaacaaaattttgcggagggcggtttcagtttgacccagctggatggcgttataacagagcttcgggatagatatcatggaaaatggccacttgtcatactacacaataagcgaatttccaagcttatggaaaattcgtctaataggcatttgattgagacctggagaacaaatggggctttgtatacttcaccaagtgggtcaaatgatgactggtattggctatatgcagcgatcaaactaaattgtttgcttgtgactaatgatgaaatgagagatcacatattcgagcttctagggccgtctttttttccaaagtggaagcaacgccatcggttgcaactgcgcaggtaaagtacacctttaataaaggaaaagcggtgcttgtgatgccacccccttactcttcagaacttcaagagtcggagatgggatcttggcacattccaattgaagagaagtctgggaatgagagaggcaggatttggctttgtattggcaggggaggttcctgcaaagaacatggcgaagttccttcgactaatggagctgtccacaaagttcctcaaactgaggcatctaacgtggtgcagcaggggctgacagaaaataaggatgaatcgataactggtaaaagaaaggatagagattgatcaccttcacctatccaggagcaccatctgctcttgagtctgccatcttgtgagcgattgtggccacttgttgttgattcagctgaggcatttcaagaatagggatgcagcgataatgccatcccagatatgtagggtgtgataattattaatcactttcgctgggttgcagactttcattcttcacaaattgggtgtgatcttagacgatttctgtgctatgtatctgactgcatccatgatcatctagtgttaactccagaataccagctaatgaacttttttattaccatcaaactgaggcacatttgcaagtgcattgttgagctactgcaccagaatggtaccgacgctattgatgttgcagcactgctggagctattagtgtatactatgtaggtttgatggtgtagcagcacttagtattactattagtgtatactagttctataatcccctcctgttcaagtcgaattatcctaatcttcctatgtttaccgtttgctattaccaaaaagacttagtattacagtcatcaaataacaactagct

SEQ ID NO: 30725 - DNA, 2813 bp, Zea Mays
ctgagatcgaagctattgctctgcttgtgcatcgcggtaagtaggtaaccacatggaattctgatagaatcgattatcgtacccaaaaaacattggagtaaaaatatgtacacaaaaaaaggtgcgtcacaggagtgtaagccccgttctgttagtccaatagtggaccaagtgaataactgtgagacaaagttggccatttaacccagagccggctcccttttaattgggctccacacgtgtctcagccccccaccgaagcagggagagccagctcgtgggccgtacacgtgtccgtgggcgcatcgctgcgcattaaggcccggggactttccagggctttgaaagcccgctcacttcatcctgtgacgcggccaagaatgccaccacgctccttatatacacggtctcatgtacctgaaccggcgatacgggactaatcgtccttgactgggaatgtggcatgctatgcctgtgtccactccctcccaccacctccaccatggcccgaagcagcttatgggccgctcattcccgccgtttattcttagggctcttcctcaactctcgcactgccgccgccgctgctacgcctacgcaaccgtcaccgtcatccccatggcttccacggcgaccacgcgccgccggccgcggcggggttccaagggccccaacgccgacctctcgcgcaccctaaccgactgcacccgccgcggggacgcggccgccgccatggccgctttcgacgccgccgtcgacgctgacgccgacgccgttccccgcctctccgctcaccagtacaaccaactcctccacctcctcgccgccaccgaccgctcctccttccccagcccccccgccgccgccgcgcgccgtgtcttcgcccacatgctccaggccgcggcgccgccctccgaggccaccataacctccctcgcgcgcgtcatcgccgccgacccggcgtcggccgccgatgaggcgttcgagctcgtggccacaatgaaggacaagtacggcctctccccgcgcctccgctcctacggccccgtcctcgcggcgttccggcgtgccggggaggccgctaaggcctacgctgtcgaggcgcacatgacggcctccggcgtctcgcctgaggagcccgagcttgccgcgctgctggatgtcagctccagagccggggatgcggacaaggtgtatgagtatatgcataagctgaggcaagccgtccactgtgtcagcgaggagactgccggagttgtggaggcctggttcaggagcgacgaggcggcaactgccggcaagcctcaatgggatgccgctcaggtgaaggacgccattgtggcgaacggtggtggctgcccaccgccttgggtggcttggaacccggcccttgaccgtgcagcgggtaagagtggggatgctgatcagtgtgggggatgtagattccatcttgcttgcattgacattgacatggagagacacagaggtttgctgattccgttgctgggtttggccctcgagagggagacaaaaacaaatttcagccgatttcaggagtggttggaagcaaataaagactaccaagctatagtcgatggtgcgaatattgcactatatcaacaaaattttgcggagggcggtttcagtttgacccagagcagctggatggcgttataacagagcttcgggatagatatcatggaaaatggccacttgtcatactacacaataagcgaatttccaagcttatggaaaattcgtctaataggcatttgattgagacctggagaacaaatggggctttgtatacttcaccaagtgggtcaaatgatgactggtattggctatatgcagcgatcaaactaaattgtttgcttgtgactaatgatgaaatgagagatcacatattcgagcttctagggccgtctttttttccaaagtggaagcaacgccatcgggtaaagtacacctttaataaaggaaaagcggtgcttgtgatgccacccccttactcttcagaacttcaagagtcggagatgggatcttggcacattccaattgaagagaagtctgggaatgagagaggcaggatttggctttgtattggcaggggaggttcctgcaaagaacatggcgaagttccttcgactaatggagctgtccacaaagttcctcaaactgaggcatctaacgtggtgcagcaggggctgacagaaaataaggatgaatcgataactggtaaaagaaaggatagagattgatcaccttcacctatccaggagcaccatctgctcttgagtctgccatcttgtgagcgattgtggccacttgttgttgattcagctgaggcatttcaagaatagggatgcagcgataatgccatcccagatatgtagggtgtgataattattaatcactttcgctgggttgcagactttcattcttcacaaattgggtgtgatcttagacgatttctgtgctatgtatctgactgcatccatgatcatctagtgttaactccagaataccagctaatgaacttttttattaccatcaaactgaggcacatttgcaagtgcattgttgagctactgcaccagaatggtaccgacgctattgatgttgcagcactgctggagctattagtgtatactatgtaggtttgatggtgtagcagcacttagtattactattagtgtatactagttctataatcccctcctgttcaagtcgaattatcctaatcttcctatgtttaccgtttgctattaccaaaaagacttagtattacagtcatcaaataacaactagct

SEQ ID NO: 30726 - DNA, 1698 bp, Zea Mays
atcagaaggaagaccaatcaaagggaggcaaacgccatagcggccaatcacttggcggcggcggcggcggcgatggggcggctgaccgaggagcaggcggcgcgcgaggcgggctcggcggggaccaacgctatgtccctcaagctcacacaccgcgctctctccgacgtgtcgtgcctgagcagcttcaagaacctggagcacctcgacctcggcttcaactgcctcgtcaccctcgagggtttgtcctcctgtgccaatttgaagtggctttcggttaaggaaaacaagcttgtgagcttaaaaggtgttgaggggctctcaaagctgcaggtactgaatgctggcaagaacgaacttacaaaaatggacgaggtcacatctttaacaagcctgggagcattgattcttaatgttctctctaagaaccctgtctttaccattggcaatgctttggtcaaggctaagtctatgaaaaagctatccttgtctcactgccaaatagaaaatattggatcttctcttgttaagtgtgtggaactgaaggaacttaggctttctcacaacaagatcagtacaatcccttcagatttggccaaaaatgtgaagatcttgagccttgatttggggaataactttattgagaggagttcagatttgaaggtactttctgaattgcgctacttgaggaaccttaatttgcagggaaatcctgtttccaagaaagacagtcttgtcaaaaaggttaagaaatctgtgccaaccttgcgcatactgaacgcaaagcccctagaggccacctccaagagtgataagaggtctacaaaagagaatcctccgagcaaagatgaagacctcattgggattgatgcgaagaagaaggataaaaggaagggatctaaacaagaggtaaagggccttgaagagcttgaagtccagagtgtttctacaggtatcaccacttcgaaccctggtaaacttgaagtgccagacagtaaggaaaagaaaaaggtcaaggaagctaagacgaagaaatctgaagagccgtaccatgccaataacagtagcttaaagaacaaagaagttcaatcttttgtctatgataccagcacgaaggacaagaaggaagccaagaggaagaaatttgttgacgaagaagatgtagatgctgaaggaattgacaatacagaaatctcgtttgcagatttaatgttttccaatgtgggcaatccagagactaagctaaagaacatctcaaccctggaagcagctcctgatggaaaatctgttggaggtctggtaattgatcacacaaagaagagaaagaaaccaaaaggtgttgtcaccatcactgactcctcagctcttaagatgttttcctcaatgccagaggtaggagcaggagggcttggcctgtcaggatgggatgagtagcgtctagctctctagtaccataagtttgctgcctgatgaatatcgttttttggtgaaaacctcaattttatgtgaactgagcagcattttcttctcttcccatcaagtgcatttatgatgtgtgatttgaggaaccaagcccctctagatgagtggtgcatcttcggttcaaccaataatttagtggaataactacttttctcacgcttgcatgaattataaactactccgtccattctaaattataaaatattttacttttct

SEQ ID NO: 30727 - DNA, 1728 bp, Zea Mays
atcagaaggaagaccaatcaaagggaggcaaacgccatagcggccaatcacttggcggcggcggcggcggcgatggggcggctgaccgaggagcaggcggcgcgcgaggcgggctcggcggggaccaacgctatgtccctcaagctcacacaccgcgctctctccgacgtgtcgtgcctgagcagcttcaagaacctggagcacctcgacctcggcttcaactgcctcgtcaccctcgagtggctttcggttaaggaaaacaagcttgtgagcttaaaaggtgttgaggggctctcaaagctgcaggtactgaatgctggcaagaacgaacttacaaaaatggacgaggtcacatctttaacaagcctgggagcattgattcttaatgataacaatatttcttccatctgcaagcttgatcagttgcaacagttgaatacacttgttctctctaagaaccctgtctttaccattggcaatgctttggtcaaggctaagtctatgaaaaagctatccttgtctcactgccaaatagaaaatattggatcttctcttgttaagtgtgtggaactgaaggaacttaggctttctcacaacaagatcagtacaatcccttcagatttggccaaaaatgtgaagatcttgagccttgatttggggaataactttattgagaggagttcagatttgaaggtactttctgaattgcgctacttgaggaaccttaatttgcagggaaatcctgtttccaagaaagacagtcttgtcaaaaaggttaagaaatctgtgccaaccttgcgcatactgaacgcaaagcccctagaggccacctccaagagtgataagaggtctacaaaagagaatcctccgagcaaagatgaagacctcattgggattgatgcgaagaagaaggataaaaggaagggatctaaacaagaggtaaagggccttgaagagcttgaagtccagagtgtttctacaggtatcaccacttcgaaccctggtaaacttgaagtgccagacagtaaggaaaagaaaaaggtcaaggaagctaagacgaagaaatctgaagagccgtaccatgccaataacagtagcttaaagaacaaagaagttcaatcttttgtctatgataccagcacgaaggacaagaaggaagccaagaggaagaaatttgttgacgaagaagatgtagatgctgaaggaattgacaatacagaaatctcgtttgcagatttaatgttttccaatgtgggcaatccagagactaagctaaagaacatctcaaccctggaagcagctcctgatggaaaatctgttggaggtctggtaattgatcacacaaagaagagaaagaaaccaaaaggtgttgtcaccatcactgactcctcagctcttaagatgttttcctcaatgccagaggtaggagcaggagggcttggcctgtcaggatgggatgagtagcgtctagctctctagtaccataagtttgctgcctgatgaatatcgttttttggtgaaaacctcaattttatgtgaactgagcagcattttcttctcttcccatcaagtgcatttatgatgtgtgatttgaggaaccaagcccctctagatgagtggtgcatcttcggttcaaccaataatttagtggaataactacttttctcacgcttgcatgaattataaactactccgtccattctaaattataaaatattttacttttct

SEQ ID NO: 30728 - DNA, 690 bp, Zea Mays
ctcctcttcaacttttcaattagcagtcaatgatctatagcgcctgagggaaacagacatcttgggaactagtacaatcaactacaacgcacctcgtataacagcccaacaaaatcaccataccacacacgcgtcacccacggcacaatatataatacgtctgctatcacatcgagcacgtgaaggtgtcgcgccaaaaaaacggcgcgggtttcccgcggaatgtaaagctgcgtaccctgagttggaggaggagctggagcccatggcggcgcaggcgcggcgcttggcggagagacagagcggagcggcgacgggatgggctctccgtccgagaggagggagcataggagacggagaccgtggcgaggggaggcgcgggagaaaggtagcaggccccgcggcggcggcagaggcggccatagttgcctgtggccggctggccgctggagcgagtgcggcaagcagccgtcgatctccgggatgggaggacaagcaaggactgagaggatgatcaggaaggaggggagatattttttctccattttaaaggataaggactcgggttaaatgggcccgaaatgtgagttgcagctgggcagcactatttcgagcagctttcacctcttatctttgtatctcttattttaaactctactctataaatagtgttatttataatgtaaaaat

SEQ ID NO: 30729 - DNA, 846 bp, Zea Mays
ttcctgtggtcgccgatagtcctgctccttctgcctccagcagtcctgctgcgttctctactcgagtcattattgcttcacttcaacaagagcgcgaggaagcagagaagaggggatgatggagaagcgacacggcggcgacggcggagccggagctggaggcttcactgtgctccacctcctcggcgccggtgtcttggcgttcctgctgccgcgggccgccggagcgaccgacgatgccaagtggcacgcccatgcccattccgccgctggcagcaacggcgccgtcaccgtcggccacggtgcccccgcgccccacgtgcacgcggccggtctcccgccgctctcggcaccggcgcccacagcgggagctgacgacctgccgccaccgcccgcgcccgtgccgacgtccgtgtcctcaccgccgagccgcgagcccggcccgcacttcggcttcccgctgcagccgggcccgggcaccgcgtccgctgcggcacctgggctgggacccggcggcgaggggtatccgttcatcggaagcaacccaacggtgccgttgcccaccggcacgaccaacaccgccaccgtgctgccgctgacggacaccggggacgccgccgccgccgccaccaaggtggtggggttggcagcgtcccttggtgctcgcgtctccatgattgggcttgggatttccctcgccaccctgtccctgtccaagatctaattaatccaaaatgtgtactactgagatactgatgctgctgccgccgctttcatctaaaatgtgtactagccttgagtttttgtcatggacagatctagagattttactggcagtttctttca

SEQ ID NO: 30730 - DNA, 858 bp, Zea Mays
attaatggcagatattgacaatttaggtccactggctgctgtccagatgcttgaactatgtcctgtactcgtcgttgcacttgccggagtttgcagctactatgagccatccaattttagttctgctgctgtatcaaaatttctgttcctagtccaggacatctgggctcaaagacaataaactagtggaagctaagaagcaaactttttcttcatttgatgagttgctggagaagtctgagaagccattgttagttgacttctatgcaacttggtgtggtccatgccaatacatggttcccatacttcaagaagtgagtgagaagttaggcgacaaaattcaagttgtgaaaattgatactgagaagtacactagcattgcaagtcgttacagaattgaagcattgccaacttttatcatattcaaggatgggaaaccttgttatcgctttgagggagcattacctgttgaccagatgatcgaacagattgaaaatgctttggcagtcacaaagtagcacatatggtgatgagcagggcagaatccccccccccccccccaaaaaaaaaaaagaaacttggtggtacctcataacgtgtgcctctacatattgaaaaatcttgattattgtctacaagatcacaacatcaagggcctaacatttgtaaggatttgttggatcttctagattcttatggggagttagatgttctcttccgatgagacatgtagatgttggtctgccattggcgtattaatggttccttgtgtcttttatcgggagcaagagccctcgcattgcctagtgttggtaataaggattattttaatcctccgatatgcatgaacgtctatca

SEQ ID NO: 30731 - DNA, 1088 bp, Zea Mays
cacaaatgtagggttttctgtccgcgccaccgctcctcgacccccgcccaacactcccagccgtcacgccgtcgccgccgcgagtccttcattcaccatgatcatctccaagaagaaccgccgcgagatctgcaagtacatcttccatgagggggttctatatgccaagaaggactacaacctggccaagcaccccaagcttgacgtgcccaacctggaggtgattaagctcatgcagagcttcaagtccaaggagtatgtcagggagaccttctcctggcagtactactactggtacctcaccaacgatggcattgagcacctccgcagcttcctcaacctgccgtcagaggttgtgcccaacaccctcaagaagtcctccaagcccccgtcccgtccctttggctctggcccaccgggtgaccgccccaggggtccccctcgctttggggaagacagacctaggtttggggatagggatggttacagaggaggtccacgaggtgcaatgggtgattttggtggtgagaagggtagtgctcctgcggatttccagccatcttttaggcagacctggcttcggccgtggtggcggcagcgcttttggtgccagtggatcttccatggagtgatctatcaacttaagcgggaaaattgattcaggataggcacatgtttgttgatctttgaacttttgaggacaatgagattttggtttaccgagctgttgccgtggcttgacatggttttgtgatcctcctttttttgttacattaaattattaaagcagcaagtcatcattcgcatcgatggtgctattgccccctgttttgatatctgatctcgctgggaatgaccttgctctctgtattgttgtgctcagagttttgatatcgctggacaaggcattgcactccctatcgcttgaaatcgtctctgttggtgctggtgtataaaactttgacgtgtgccgtttataatatatatgtaactgcaaaaccaagtttctatacaagtcaaaacagtatacaatttggatcagaaggtggtgcaatgtataacccttctaaatttaaggatgttttgtg

SEQ ID NO: 30732 - DNA, 2194 bp, Zea Mays
tatggaatgccattttttattatttcctgcattttgtctgtaacaaaaaaattgattgtcgtaggatctcaaataaaatacctgaatttaacggagccatcagccatgtgatctttggcacagccgtttgcctgaaaaaagacaaatcaaaaaggaaaaaagaagggaaaaattcttccattgcgtgcttggcagctcgtccgacgcgccgcagcgggcgctgataaacctccagttaaaccctagtatctccccgcgtcgccgcacacatcgcccgttcgcacgcgccgtccccctggaggatcgagccaccctcctcacctggaatggaggacggcctggaggagccgccgcccgcggggagcgcggccgccaacgccagctccacctccggcggcggcagcggcgggagcaaggggtccccgtgcgaggagtgtggggagcagccgtggaagtaccggtgccccgggtgcggccgcctcacctgcagcctcccctgcgtgcaggcccacaagcgccgtaccgcctgcacgggcaagcgcccacgcacggaccccgtcccgctcgcccgattcgacgacaaccagctcatatccgattacaacttgctggaggaggtgaagcaggcccacgattccgcgcacaggctcatcggcggcttcggccgcaactacgggggacggggatcaggcggcgcccagctgcccagatggctgttctacctcagcaaggcggcgcaccgccgtggtgtcaagctctgctttctccccaggggcatggccaggagagagcagaatcgatcgcaacacaattacaggaaggattgcatattctggacacttgagtggaaattcaattcaactgatgttgtcctaactgatcatgggatagatgagcacacaaccttgctctctctattggaaaaacatcttattcctggcccttggaaagatcagcttacacaatatcggaacaccaaattacatgatctgaaactgttcattcaaaagtgtgccaagcaatcagagtcaccgtaccgcctactcaatatagaagagccattgcgcccacagctgaggggtatacttgttgtggagtacccaactatcaatgtatttcttccgtcagacaattgtgactttgaaatggagaaaatggtgaacagacttcctaaagatggaaaaggccctggcagcatgactgacgagccacctgtagagggcagcaagtttcatgaggaggaaatagaggaaggcgaactttcacctgaaactgagattatagatctcaaggaccatggaacttcaaatgcctgcaaaatttctccagcagatgttacaagtgaatcaaagatagttaacaatgtcgattcttctgtgctctcataccccggttgtcaagctcaagcattacatggtcagccgaaaggactgaatcaatatagcaagatatcaccaaatggtacctctgggcctgcagaaactaaatcccgcatggaagtctgtcctctggatatggagaagacaagggaaagcgggttgtcctcagagggacgcgttgtagatctgaaggggtatggaatttcatatcctgtcagcactgcagaggcaggaggtgcagctctatcgaagatagacaccaaggcaacatatcccttagtaccatcttccaccagcattgtagtatctgatggcgcgacgggtcctcagctggaacacagtcagcaaaacaaacggacgccaagctcgactcctgaagcgctgaaaaggaaatcttgcatgaaagtttatccgctggacattgacgagggattgttccccgagggacgaaccagtagatgcaacgtctgggttaccgagggacgacttggaggaaggggagattccaacattgtgaaggaagaacgtgatgcttcacaggatgttgcactcgagcggaagagtctgtgtcgtgcttttctaggacatgtcatgcgacgtaatggtagaacactcacatgtacctagcttgtatagctgcaacttgaaactatgcagcctcttttattctttatcgttttctttagtctcgctgttgtgttatgtagctctgccagagcagcaagaaattttggggttctaattttgtaagagatgatggctgtttggggatatggatgtcgaggatttctcaagctgtgcaatgatgaattgcg

SEQ ID NO: 30733 - DNA, 2064 bp, Zea Mays
agttaaaccctagtatctccccgcgtcgccgcacacatcgcccgttcgcacgcgccgtccccctggaggatcgagccaccctcctcacctggaatggaggacggcctggaggagccgccgcccgcggggagcgcggccgccaacgccagctccacctccggcggcggcagcggcgggagcaaggggtccccgtgcgaggagtgtggggagcagccgtggaagtaccggtgccccgggtgcggccgcctcacctgcagcctcccctgcgtgcaggcccacaagcgccgtaccgcctgcacgggcaagcgcccacgcacggaccccgtcccgctcgcccgattcgacgacaaccagctcatatccgattacaacttgctggaggaggtgaagcaggcccacgattccgcgcacaggctcatcggcggcttcggccgcaactacgggggacggggatcaggcggcgcccagctgcccagatggctgttctacctcagcaaggcggcgcaccgccgtggtgtcaagctctgctttctccccaggggcatggccaggagagagcagaatcgatcgcaacacaattacaggattgcatattctggacacttgagtggaaattcaattcaactgatgttgtcctaactgatcatgggatagatgagcacacaaccttgctctctctattggaaaaacatcttattcctggcccttggaaagatcagcttacacaatatcggaacaccaaattacatgatctgaaactgttcattcaaaagtgtgccaagcaatcagagtcaccgtaccgcctactcaatatagaagagccattgcgcccacagctgaggggtatacttgttgtggagtacccaactatcaatgtatttcttccgtcagacaattgtgactttgaaatggagaaaatggtgaacagacttcctaaagatggaaaaggccctggcagcatgactgacgagccacctgtagagggcagcaagtttcatgaggaggaaatagaggaaggcgaactttcacctgaaactgagattatagatctcaaggaccatggaacttcaaatgcctgcaaaatttctccagcagatgttacaagtgaatcaaagatagttaacaatgtcgattcttctgtgctctcataccccggttgtcaagctcaagcattacatggtcagccgaaaggactgaatcaatatagcaagatatcaccaaatggtacctctgggcctgcagaaactaaatcccgcatggaagtctgtcctctggatatggagaagacaagggaaagcgggttgtcctcagagggacgcgttgtagatctgaaggggtatggaatttcatatcctgtcagcactgcagaggcaggaggtgcagctctatcgaagatagacaccaaggcaacatatcccttagtaccatcttccaccagcattgtagtatctgatggcgcgacgggtcctcagctggaacacagtcagcaaaacaaacggacgccaagctcgactcctgaagcgctgaaaaggaaatcttgcatgaaagtttatccgctggacattgacgagggattgttccccgaggtacccgacttggcctttgagcaagagatgttggatacctacccagagctcttcgagaacatggatgtcgatgacttcttaagctgcgattttgcaatggtgaacagggacgaaccagtagatgcaacgtctgggttaccgagggacgacttggaggaaggggagattccaacattgtgaaggaagaacgtgatgcttcacaggatgttgcactcgagcggaagagtctgtgtcgtgcttttctaggacatgtcatgcgacgtaatggtagaacactcacatgtacctagcttgtatagctgcaacttgaaactatgcagcctcttttattctttatcgttttctttagtctcgctgttgtgttatgtagctctgccagagcagcaagaaattttggggttctaattttgtaagagatgatggctgtttggggatatggatgtcgaggatttctcaagctgtgcaatgatgaattgcg

SEQ ID NO: 30734 - DNA, 2063 bp, Zea Mays
agttaaaccctagtatctccccgcgtcgccgcacacatcgcccgttcgcacgcgccgtccccctggaggatcgagccaccctcctcacctggaatggaggacggcctggaggagccgccgcccgcggggagcgcggccgccaacgccagctccacctccggcggcggcagcggcgggagcaaggggtccccgtgcgaggagtgtggggagcagccgtggaagtaccggtgccccgggtgcggccgcctcacctgcagcctcccctgcgtgcaggcccacaagcgccgtaccgcctgcacgggcaagcgcccacgcacggaccccgtcccgctcgcccgattcgacgacaaccagctcatatccgattacaacttgctggaggaggtgaagcaggcccacgattccgcgcacaggctcatcggcggcttcggccgcaactacgggggacggggatcaggcggcgcccagctgcccagatggctgttctacctcagcaaggcggcgcaccgccgtggtgtcaagctctgctttctccccaggggcatggccaggagagagcagaatcgatcgcaacacaattacaggaaggattgcatattctggacacttgagtggaaattcaattcaactgatgttgtcctaactgatcatggatgagcacacaaccttgctctctctattggaaaaacatcttattcctggcccttggaaagatcagcttacacaatatcggaacaccaaattacatgatctgaaactgttcattcaaaagtgtgccaagcaatcagagtcaccgtaccgcctactcaatatagaagagccattgcgcccacagctgaggggtatacttgttgtggagtacccaactatcaatgtatttcttccgtcagacaattgtgactttgaaatggagaaaatggtgaacagacttcctaaagatggaaaaggccctggcagcatgactgacgagccacctgtagagggcagcaagtttcatgaggaggaaatagaggaaggcgaactttcacctgaaactgagattatagatctcaaggaccatggaacttcaaatgcctgcaaaatttctccagcagatgttacaagtgaatcaaagatagttaacaatgtcgattcttctgtgctctcataccccggttgtcaagctcaagcattacatggtcagccgaaaggactgaatcaatatagcaagatatcaccaaatggtacctctgggcctgcagaaactaaatcccgcatggaagtctgtcctctggatatggagaagacaagggaaagcgggttgtcctcagagggacgcgttgtagatctgaaggggtatggaatttcatatcctgtcagcactgcagaggcaggaggtgcagctctatcgaagatagacaccaaggcaacatatcccttagtaccatcttccaccagcattgtagtatctgatggcgcgacgggtcctcagctggaacacagtcagcaaaacaaacggacgccaagctcgactcctgaagcgctgaaaaggaaatcttgcatgaaagtttatccgctggacattgacgagggattgttccccgaggtacccgacttggcctttgagcaagagatgttggatacctacccagagctcttcgagaacatggatgtcgatgacttcttaagctgcgattttgcaatggtgaacagggacgaaccagtagatgcaacgtctgggttaccgagggacgacttggaggaaggggagattccaacattgtgaaggaagaacgtgatgcttcacaggatgttgcactcgagcggaagagtctgtgtcgtgcttttctaggacatgtcatgcgacgtaatggtagaacactcacatgtacctagcttgtatagctgcaacttgaaactatgcagcctcttttattctttatcgttttctttagtctcgctgttgtgttatgtagctctgccagagcagcaagaaattttggggttctaattttgtaagagatgatggctgtttggggatatggatgtcgaggatttctcaagctgtgcaatgatgaattgcg

SEQ ID NO: 30735 - DNA, 884 bp, Zea Mays
ctaaagtggccaggggaaaagaatctgctgaaacgcgcggcacgcgtgagttgtgaaagttgagacgcctcagaaaaacgcaacccttttttgggctttggcttttgctgcaaacaaaaggcgacgcggctgggatctagcacgctagcgagcgagagagacgcacatctatctgtcaagcgacgccgcggcctcgatcagagtcggaggcgaacacccccatggcggcggctggcggcggcgcaggagggaaggttcagcgtgcccgaggcggcgccctttaccgcggtgctcaagtacgccgcggaggagttcaaggtcccgccccagaccagcgccatcatcaccaacgatggaattggcatcaacccccagcaaagtgcaggcaacgtgtttctgaaacatggttcggagctgcgtctcatccctcgcgatagagttggagctgtagtcatgtcttccggttagaggatatatacagtccaatgcataatgagcaaaacttgagagaaataaagctttgatgttggccttgcttggctgtaggatgttgttacaaggataataagcgaaccttaccgtacatgtctcaagttgtatgctctctgtttgtatgtggagagatttctgaaagtgaatccagtatctgaatcgactcaattagccgctttctgtctgcacagagcgatatgatcctgcttcgcgctctgtcagttcaaaagtatagaaatgaggtgttcttccctaaattgccaaagatattgcgaaggatatggctataagggttagtttggacggcagcctatggcgtcacaccgcgtctaatgtgcggcggccaaaccggacgccacacctgcggcgtctaaagtgtggcacggtatggc

SEQ ID NO: 30736 - DNA, 922 bp, Zea Mays
ggggaaaagaatctgctgaaacgcgcggcacgcgtgagttgtgaaagttgagacgcctcagaaaaacgcaacccttttttgggctttggcttttgctgcaaacaaaaggcgacgcggctgggatctagcacgctagcgagcgagagagacgcacatctatctgtcaagcgacgccgcggcctcgatcagagtcggaggcgaacacccccatggcggcggctggcggcggcgcaggagggaaggtatccttcaagatcatcctcacctccgaccccaagctccctttcaaagtgttcagcgtgcccgaggcggcgccctttaccgcggtgctcaagtacgccgcggaggagttcaaggtcccgccccagaccagcgccatcatcaccaacgatggaattggcatcaacccccagcaaagtgcaggcaacgtgtttctgaaacatggttcggagctgcgtctcatccctcgcgatagagttggagctgtagtcatgtcttccggttagaggatatatacagtccaatgcataatgagcaaaacttgagagaaataaagctttgatgttggccttgcttggctgtaggatgttgttacaaggataataagcgaaccttaccgtacatgtctcaagttgtatgctctctgtttgtatgtggagagatttctgaaagtgaatccagtatctgaatcgactcaattagccgctttctgtctgcacagagcgatatgatcctgcttcgcgctctgtcagttcaaaagtatagaaatgaggtgttcttccctaaattgccaaagatattgcgaaggatatggctataagggttagtttggacggcagcctatggcgtcacaccgcgtctaatgtgcggcggccaaaccggacgccacacctgcggcgtctaaagtgtggcacggtatggc

SEQ ID NO: 30737 - DNA, 1891 bp, Zea Mays
tgtgttttttttttctttccgattttcgtttctctctcttttcctttccccccgtccctctctttctttctctcttggaattgtaattggactcaaaagtttcggcggccttctccatgaacacggtggcttcgctgcctttggcgccgcgcctgctcattaagccctccctcgcctgcttctccagaaaggacgtcggccgctatggcgggatcaaggtgtacgccgtgctcagggaagacggggccgagttcgcccggaacaacaacctggaggccctgttccaggtggacgaccccgggccgcgggcccccgtcaagaagttcctggacgtgaacgaggctctggaggtggtccgcttcgacatccagtactgcgactggagggcgcgccaggatctcctcaccatcatgcttctccacagcaaggtggtggaggtcctcaaccctctggcgagggagttcaagtccatcgggaccttgaggaaagagctcgccgagctacagcaggagctggaaaaagctcacaatcaggtccatctctcggaagccagagtctcatcggcgctcgacaagctagcgcatatggagaccctggtgagcgcaccatccacagccgagccgcccacttcttcctccctgtctgcaactgcaagcagcaccgcccgtgtccgagccaagaacaaacagccacgtcggaggcttgacgtgtccggcccagtgaagccttacaaccccagcctcaagaacttctggtacccagtcgccttctctgctgcctccttcaggatttacggtccacgcagagatagtgatggagctaccagttgaacatggactcctcctggacaatctcctggaccttgctcacgctcctttcacacacacgtccacctttgccaagggctggagtgtgccaagtttggtcaagttcctgacacccgcgtctgggctccaagggtactgggacccgtacccgatcgacatggagttccggccaccgtgcatggtcctatcgaccatcggcatctccaagcccgggaagctacaagggaagagcacgaggcagtgctccacgcacctccaccagctccacgtctgcctgccctcctcccggaacaagaccaggctgctgtaccggatgtcgctggacttcgcgccgtggctcaagcacgtgccgctcatgcacctgctgtggtcgcatttcgcagagaaggtgttgaacgaggacctacggctcgttcttggccagcaagaggggatgatcgacggcgccaacgtctggaactggccggtgtcgtacgacaaactcgggatccggtaccggctgtggagggacgccgtcgagaggggcgccgacgaccggttgccgttcagcagcacccaagctgagagtttgtcgtagcgaccggaacgggacgggacctcttcctcgtcgcatttctccgcaagacgacggacggacagccagagttaatgtgacctaggcgtacgtgcgtctctctctctctctctgcgcggttcatcgttcacctcgggctgctgcgcactgaaggattctggaagggtgaaggttgacggccggagacgatgatgggcagcatcatggtctatggtgtccacatgcatgtacactactagcgacgacggcatcatgggatgcaattgtaatctgagattgatctcttttttttttcaccctttctgtgtaaagattcagcaaattgttgcgttactcttccaaagcatgtataatcaactacggagaagtgttcatatatataaatatgagaaattgcagctattgctacagttcatctgccccgttagtcactccctttggtttgccagttcagacagttcatatgattggacaaaatgattaaaactgc

SEQ ID NO: 30738 - DNA, 2236 bp, Zea Mays
tgtgttttttttttctttccgattttcgtttctctctcttttcctttccccccgtccctctctttctttctctcttggaattgtaattggactcaaaagtttcggcggccttctccatgaacacggtggcttcgctgcctttggcgccgcgcctgctcattaagccctccctcgcctgcttctccagaaaggacgtcggccgctatggcgggatcaaggtgtacgccgtgctcagggaagacggggccgagttcgcccggaacaacaacctggaggccctgttccaggtggacgaccccgggccgcgggcccccgtcaagaagttcctggacgtgaacgaggctctggaggtggtccgcttcgacatccagtactgcgactggagggcgcgccaggatctcctcaccatcatgcttctccacagcaaggtggtggaggtcctcaaccctctggcgagggagttcaagtccatcgggaccttgaggaaagagctcgccgagctacagcaggagctggaaaaagctcacaatcaggtccatctctcggaagccagagtctcatcggcgctcgacaagctagcgcatatggagaccctggtgagcgcaccatccacagccgagccgcccacttcttcctccctgtctgcaactgcaagcagcaccgcccgtgtccgagccaagaacaaacagccacgtcggaggcttgacgtgtccggcccagtgaagccttacaaccccagcctcaagaacttctggtacccagtcgccttctccagcgatctcaaggctcctgacaccatggtgccaatcgactgcttcgaggagcagtgggtgatcttccgaggcaaagacggaaggcccgggtgtgttcagaacacatgcgcccacagggcatgcccgctgcatcttggttcagtgaacgagggcaggatccagtgcccttaccatggttgggagtactcgaccgatggcaagtgcgaaaagatgccatccacaaagatgctcgacgtgcgcatccagtcgctgccatgctttgagcaggaagggatggtctggatctggcccggggacgacccacccaaggctaccatcccttctctgctgcctccttcaggatttacggtccacgcagagtgttctctctatcttgcagatagtgatggagctaccagttgaacatggactcctcctggacaatctcctggaccttgctcacgctcctttcacacacacgtccacctttgccaagggctggagtgtgccaagtttggtcaagttcctgacacccgcgtctgggctccaagggtactgggacccgtacccgatcgacatggagttccggccaccgtgcatggtcctatcgaccatcggcatctccaagcccgggaagctacaagggaagagcacgaggcagtgctccacgcacctccaccagctccacgtctgcctgccctcctcccggaacaagaccaggctgctgtaccggatgtcgctggacttcgcgccgtggctcaagcacgtgccgctcatgcacctgctgtggtcgcatttcgcagagaaggtgttgaacgaggacctacggctcgttcttggccagcaagaggggatgatcgacggcgccaacgtctggaactggccggtgtcgtacgacaaactcgggatccggtaccggctgtggagggacgccgtcgagaggggcgccgacgaccggttgccgttcagcagcacccaagctgagagtttgtcgtagcgaccggaacgggacgggacctcttcctcgtcgcatttctccgcaagacgacggacggacagccagagttaatgtgacctaggcgtacgtgcgtctctctctctctctctgcgcggttcatcgttcacctcgggctgctgcgcactgaaggattctggaagggtgaaggttgacggccggagacgatgatgggcagcatcatggtctatggtgtccacatgcatgtacactactagcgacgacggcatcatgggatgcaattgtaatctgagattgatctcttttttttttcaccctttctgtgtaaagattcagcaaattgttgcgttactcttccaaagcatgtataatcaactacggagaagtgttcatatatataaatatgagaaattgcagctattgctacagttcatctgccccgttagtcactccctttggtttgccagttcagacagttcatatgattggacaaaatgattaaaactgc

SEQ ID NO: 30739 - DNA, 2217 bp, Zea Mays
tgtgttttttttttctttccgattttcgtttctctctcttttcctttccccccgtccctctctttctttctctcttggaattgtaattggactcaaaagtttcggcggccttctccatgaacacggtggcttcgctgcctttggcgccgcgcctgctcattaagccctccctcgcctgcttctccagaaaggacgtcggccgctatggcgggatcaaggtgtacgccgtgctcagggaagacggggccgagttcgcccggaacaacaacctggaggccctgttccaggtggacgaccccgggccgcgggcccccgtcaagaagttcctggacgtgaacgaggctctggaggtggtccgcttcgacatccagtactgcgactggagggcgcgccaggatctcctcaccatcatgcttctccacagcaaggtggtggaggtcctcaaccctctggcgagggagttcaagtccatcgggaccttgaggaaagagctcgccgagctacagcaggagctggaaaaagctcacaatcaggtccatctctcggaagccagagtctcatcggcgctcgacaagctagcgcatatggagaccctggtgagcgcaccatccacagccgagccgcccacttcttcctccctgtctgcaactgcaagcagcaccgcccgtgtccgagccaagaacaaacagccacgtcggaggcttgacgtgtccggcccagtgaagccttacaaccccagcctcaagaacttctggtacccagtcgccttctccagcgatctcaaggctcctgacaccatggtgccaatcgactgcttcgaggagcagtgggtgatcttccgaggcaaagacggaaggcccgggtgtgttcagaacacatgcgcccacagggcatgcccgctgcatcttggttcagtgaacgagggcaggatccagtgcccttaccatggttgggagtactcgaccgatggcaagtgcgaaaagatgccatccacaaagatgctcgacgtgcgcatccagtcgctgccatgctttgagcaggaagggatggtctggatctggcccggggacgacccacccaaggctaccatcccttctctgctgcctccttcaggatttacggtccacgcagagatagtgatggagctaccagttgaacatggactcctcctggacaatctcctggaccttgctcacgctcctttcacacacacgtccacctttgccaagggctggagtgtgccaagtttggtcaagttcctgacacccgcgtctgggctccaagggtactgggacccgtacccgatcgacatggagttccggccaccgtgcatggtcctatcgaccatcggcatctccaagcccgggaagctacaagggaagagcacgaggcagtgctccacgcacctccaccagctccacgtctgcctgccctcctcccggaacaagaccaggctgctgtaccggatgtcgctggacttcgcgccgtggctcaagcacgtgccgctcatgcacctgctgtggtcgcatttcgcagagaaggtgttgaacgaggacctacggctcgttcttggccagcaagaggggatgatcgacggcgccaacgtctggaactggccggtgtcgtacgacaaactcgggatccggtaccggctgtggagggacgccgtcgagaggggcgccgacgaccggttgccgttcagcagcacccaagctgagagtttgtcgtagcgaccggaacgggacgggacctcttcctcgtcgcatttctccgcaagacgacggacggacagccagagttaatgtgacctaggcgtacgtgcgtctctctctctctctctgcgcggttcatcgttcacctcgggctgctgcgcactgaaggattctggaagggtgaaggttgacggccggagacgatgatgggcagcatcatggtctatggtgtccacatgcatgtacactactagcgacgacggcatcatgggatgcaattgtaatctgagattgatctcttttttttttcaccctttctgtgtaaagattcagcaaattgttgcgttactcttccaaagcatgtataatcaactacggagaagtgttcatatatataaatatgagaaattgcagctattgctacagttcatctgccccgttagtcactccctttggtttgccagttcagacagttcatatgattggacaaaatgattaaaactgc

SEQ ID NO: 30740 - DNA, 2901 bp, Zea Mays
tgtgccgcagcgaagaaagggttcgccgttgagtgtggccgcgtcgtccagagaaaagaggcagagaagagaagaaaggaaatggagagatgagacgggaggagacggcgttgcgttcaggcgtaagagcaaaagcggcacataaagacacgggcctacctgccagaaacaccaaaagccttcctgatccgttttgaagagcaaccatgtttgagtaacccgccggcctcccaacagtgtattttgaagaacgacgactagagtgacctgttttgacaaatttctcggctgggcgtgggcgggtttctgatgttgggttgggaagagaagagatagctcgtcctcagcatccgccttcctcctcggcggccatgctgctccgcctccgcccgccgcggcacccgtccaccgcggcggccacaaccctctcttccttcctcccctccacttccttccgccgactcatccccttgccgcgctggcgcccccctccgcgccgccgcctctccgccgccgccaaggattcgatcggccggttggatccgcgccaggagcggtacgacgtcattgtggtcggaggcggccatgccggatgcgaggccgcccttgcttcggctcgcctcggcgcgcgcaccctgcttcttacgctcaacattgaccggattgcgtggcagccttgtaaccctgctgttggtggccctgcgaagtctcaacttgtccatgaggtagatgcccttggtggtgaaattggaaaaattactgataggtgctacttgcaaaagcgtgtactgaacagctcaaaaggccctgctgtacgtgcactgcgtgctcagactgataagagagagtatgcaatagagatgaagaacagtgtggaaagcacagaaaaccttttcattagagaagcaatggctacagaggttttaattggaaaaaatgacagcattgagggtgttcgcactttcttcggcatggacttttatgcaccatctgttgtacttaccaccggaacattcatgagtgtttctgggttttgaaactgaccgcttgaaaaccggtacaccaccacgaattgatcgcagaacagttgatttttctggattggaaccccagcatggtgatgaagaggtaggttggtttagttttgatcctgaatttcacgtcgagagagaacagatgtgctgctatctaacacgaactacaaaagagacgcaccaaattgttatcgacaacttagatgaaacaccaacttatggtggttgggttgaagcgaagggaccaagatactgcccgtcaattgaagacaagattgtaaggttcaaagataaagagtctcatcagatctttcttgaacctgagggtagaaatgttcctgaactatatctacagggcttttctactgggcttcctgagagattgcaattgtcccttgtgcgaactataccagggctggagaactgtctaatgctaagacctgcatatgcagttgaatatgattacttacccgcatatcaatgctcaagatcacttatgacaaagaagattgagggtttattcttctctggccagataaatggaacaacgggatacgaagaagctgcagctcagggtataatttctggaatcaatgcagctaggcattctgatgggaaatcattaattattcttgagagggaaagcagttatataggaactcttattgatgatcttgttacaaaagatcttagagagccctatcgcatgctaacaagccgttcagaacaccggctattgcttcgatcagataatgctgatagtcgtttgacccctttgggacgagagattggtttaatagatgatagacgttgggagctttatcagtcaaagcaagcccgcattaagcaagagaaagaacggttgagatctacaaaagttccaggaggtgaatttgctgctgaagttactgcagtatccaaccaacctgtaaaggattcatctacacttgaagccatattaaagaagccacacgtacaatataaactccttgacgagcatggatgcggaaatgaaaatttatctcgaattgagaaggaatgtgtagagattgatatcaagtatgaaggtttcatcgcacgacaacaaagtcaattacatcagatcgtaaaccaagaacacaggaaacttcctgaagatttggattaccactcaatgacaaatctatcacttgaagctcgtgagaaactttccaaggtgcgtccacaaacaataggtcaagctagcagaatcggcggtgtgagcccagcagacatgacagttctcctcatttggatggagagcaaccgacgcatggctacccacaggagacagcgagagcagctgggatcagttgcagtcgagtcggatggttcttcagaggaggccgtccaagccagcacggcataaacgtggggagcttctggcagctgaacaaggaacaacaaaattcggtgaggcatccagggagcctgcgcgtctgtggtacaacgatgcagggaggcgccaagtgcatgcatgtcttttcttgacgacatgaggaaatagtcggccccctggttccttcatgttgtgcctcattgtctaccagtatgtgtgcatgttgtttaggaatgctggtggaatacaggttgatatttgcagtagtagaattgagagagcagactgtaaagaacgacaacaaataggggtttaaaacatacattcgcactcacttagctaaaaaaatacactttttgtgtgttttatactttatacttaagcaaaatatagatatttttacgaaattagatgaaaagggcgtgttggatctagcccaccatgtgatacctaaggcctaggtatgacacgatgattgagctgggggtagactgtactagaccacgtgag

SEQ ID NO: 30741 - DNA, 2758 bp, Zea Mays
cacataaagacacgggcctacctgccagaaacaccaaaagccttcctgatccgttttgaagagcaaccatgtttgagtaacccgccggcctcccaacagtgtattttgaagaacgacgactagagtgacctgttttgacaaatttctcggctgggcgtgggcgggtttctgatgttgggttgggaagagaagagatagctcgtcctcagcatccgccttcctcctcggcggccatgctgctccgcctccgcccgccgcggcacccgtccaccgcggcggccacaaccctctcttccttcctcccctccacttccttccgccgactcatccccttgccgcgctggcgcccccctccgcgccgccgcctctccgccgccgccaaggattcgatcggccggttggatccgcgccaggagcggtacgacgtcattgtggtcggaggcggccatgccggatgcgaggccgcccttgcttcggctcgcctcggcgcgcgcaccctgcttcttacgctcaacattgaccggattgcgtggcagccttgtaaccctgctgttggtggccctgcgaagtctcaacttgtccatgaggtagatgcccttggtggtgaaattggaaaaattactgataggtgctacttgcaaaagcgtgtactgaacagctcaaaaggccctgctgtacgtgcactgcgtgctcagactgataagagagagtatgcaatagagatgaagaacagtgtggaaagaaaaccttttcattagagaagcaatggctacagaggttttaattggaaaaaatgacagcattgagggtgttcgcactttcttcggcatggacttttatgcaccatctgttgtacttaccaccggaacattcatgagtgtttctgggttttgaaactgaccgcttgaaaaccggtacaccaccacgaattgatcgcagaacagttgatttttctggattggaaccccagcatggtgatgaagaggtaggttggtttagttttgatcctgaatttcacgtcgagagagaacagatgtgctgctatctaacacgaactacaaaagagacgcaccaaattgttatcgacaacttagatgaaacaccaacttatggtggttgggttgaagcgaagggaccaagatactgcccgtcaattgaagacaagattgtaaggttcaaagataaagagtctcatcagatctttcttgaacctgagggtagaaatgttcctgaactatatctacagggcttttctactgggcttcctgagagattgcaattgtcccttgtgcgaactataccagggctggagaactgtctaatgctaagacctgcatatgcagttgaatatgattacttacccgcatatcaatgctcaagatcacttatgacaaagaagattgagggtttattcttctctggccagataaatggaacaacgggatacgaagaagctgcagctcagggtataatttctggaatcaatgcagctaggcattctgatgggaaatcattaattattcttgagagggaaagcagttatataggaactcttattgatgatcttgttacaaaagatcttagagagccctatcgcatgctaacaagccgttcagaacaccggctattgcttcgatcagataatgctgatagtcgtttgacccctttgggacgagagattggtttaatagatgatagacgttgggagctttatcagtcaaagcaagcccgcattaagcaagagaaagaacggttgagatctacaaaagttccaggaggtgaatttgctgctgaagttactgcagtatccaaccaacctgtaaaggattcatctacacttgaagccatattaaagaagccacacgtacaatataaactccttgacgagcatggatgcggaaatgaaaatttatctcgaattgagaaggaatgtgtagagattgatatcaagtatgaaggtttcatcgcacgacaacaaagtcaattacatcagatcgtaaaccaagaacacaggaaacttcctgaagatttggattaccactcaatgacaaatctatcacttgaagctcgtgagaaactttccaaggtgcgtccacaaacaataggtcaagctagcagaatcggcggtgtgagcccagcagacatgacagttctcctcatttggatggagagcaaccgacgcatggctacccacaggagacagcgagagcagctgggatcagttgcagtcgagtcggatggttcttcagaggaggccgtccaagccagcacggcataaacgtggggagcttctggcagctgaacaaggaacaacaaaattcggtgaggcatccagggagcctgcgcgtctgtggtacaacgatgcagggaggcgccaagtgcatgcatgtcttttcttgacgacatgaggaaatagtcggccccctggttccttcatgttgtgcctcattgtctaccagtatgtgtgcatgttgtttaggaatgctggtggaatacaggttgatatttgcagtagtagaattgagagagcagactgtaaagaacgacaacaaataggggtttaaaacatacattcgcactcacttagctaaaaaaatacactttttgtgtgttttatactttatacttaagcaaaatatagatatttttacgaaattagatgaaaagggcgtgttggatctagcccaccatgtgatacctaaggcctaggtatgacacgatgattgagctgggggtagactgtactagaccacgtgag

SEQ ID NO: 30742 - DNA, 2574 bp, Zea Mays
gaagagcaaccatgtttgagtaacccgccggcctcccaacagtgtattttgaagaacgacgactagagtgacctgttttgacaaatttctcggctgggcgtgggcgggtttctgatgttgggttgggaagagaagagatagctcgtcctcagcatccgccttcctcctcggcggccatgctgctccgcctccgcccgccgcggcacccgtccaccgcggcggccacaaccctctcttccttcctcccctccacttccttccgccgactcatccccttgccgcgctggcgcccccctccgcgccgccgcctctccgccgccgccaaggattcgatcggccggttggatccgcgccaggagcggtacgacgtcattgtggtcggaggcggccatgccggatgcgaggccgcccttgcttcggctcgcctcggcgcgcgcaccctgcttcttacgctcaacattgaccggattgcgtggcagccttgtaaccctgctgttggtggccctgcgaagtctcaacttgtccatgaggtagatgcccttggtggtgaaattggaaaaattactgataggtgctacttgcaaaagcgtgtactgaacagctcaaaaggccctgctgtacgtgcactgcgtgctcagactgataagagagagtatgcaatagagatgaagaacagtgtggaaagaaaaccttttcattagagaagcaatggctacagaggttttaattggaaaaaatgacagcattgagggtgttcgcactttcttcggcatggacttttatgcaccatctgttgtacttaccaccggaacattcatgagtgtttctgggttttgaaactgaccgcttgaaaaccggtacaccaccacgaattgatcgcagaacagttgatttttctggattggaaccccagcatggtgatgaagaggtaggttggtttagttttgatcctgaatttcacgtcgagagagaacagatgtgctgctatctaacacgaactacaaaagagacgcaccaaattgttatcgacaacttagatgaaacaccaacttatggtggttgggttgaagcgaagggaccaagatactgcccgtcaattgaagacaagattgtaaggttcaaagataaagagtctcatcagatctttcttgaacctgagggtagaaatgttcctgaactatatctacagttgaatatgattacttacccgcatatcaatgctcaagatcacttatgacaaagaagattgagggtttattcttctctggccagataaatggaacaacgggatacgaagaagctgcagctcagggtataatttctggaatcaatgcagctaggcattctgatgggaaatcattaattattcttgagagggaaagcagttatataggaactcttattgatgatcttgttacaaaagatcttagagagccctatcgcatgctaacaagccgttcagaacaccggctattgcttcgatcagataatgctgatagtcgtttgacccctttgggacgagagattggtttaatagatgatagacgttgggagctttatcagtcaaagcaagcccgcattaagcaagagaaagaacggttgagatctacaaaagttccagtatccaaccaacctgtaaaggattcatctacacttgaagccatattaaagaagccacacgtacaatataaactccttgacgagcatggatgcggaaatgaaaatttatctcgaattgagaaggaatgtgtagagattgatatcaagtatgaaggtttcatcgcacgacaacaaagtcaattacatcagatcgtaaaccaagaacacaggaaacttcctgaagatttggattaccactcaatgacaaatctatcacttgaagctcgtgagaaactttccaaggtgcgtccacaaacaataggtcaagctagcagaatcggcggtgtgagcccagcagacatgacagttctcctcatttggatggagagcaaccgacgcatggctacccacaggagacagcgagagcagctgggatcagttgcagtcgagtcggatggttcttcagaggaggccgtccaagccagcacggcataaacgtggggagcttctggcagctgaacaaggaacaacaaaattcggtgaggcatccagggagcctgcgcgtctgtggtacaacgatgcagggaggcgccaagtgcatgcatgtcttttcttgacgacatgaggaaatagtcggccccctggttccttcatgttgtgcctcattgtctaccagtatgtgtgcatgttgtttaggaatgctggtggaatacaggttgatatttgcagtagtagaattgagagagcagactgtaaagaacgacaacaaataggggtttaaaacatacattcgcactcacttagctaaaaaaatacactttttgtgtgttttatactttatacttaagcaaaatatagatatttttacgaaattagatgaaaagggcgtgttggatctagcccaccatgtgatacctaaggcctaggtatgacacgatgattgagctgggggtagactgtactagaccacgtgag

SEQ ID NO: 30743 - DNA, 2738 bp, Zea Mays
tttgaagaacgacgactagagtgacctgttttgacaaatttctcggctgggcgtgggcgggtttctgatgttgggttgggaagagaagagatagctcgtcctcagcatccgccttcctcctcggcggccatgctgctccgcctccgcccgccgcggcacccgtccaccgcggcggccacaaccctctcttccttcctcccctccacttccttccgccgactcatccccttgccgcgctggcgcccccctccgcgccgccgcctctccgccgccgccaaggattcgatcggccggttggatccgcgccaggagcggtacgacgtcattgtggtcggaggcggccatgccggatgcgaggccgcccttgcttcggctcgcctcggcgcgcgcaccctgcttcttacgctcaacattgaccggattgcgtggcagccttgtaaccctgctgttggtggccctgcgaagtctcaacttgtccatgaggtagatgcccttggtggtgaaattggaaaaattactgataggtgctacttgcaaaagcgtgtactgaacagctcaaaaggccctgctgtacgtgcactgcgtgctcagactgataagagagagtatgcaatagagatgaagaacagtgtggaaagcacagaaaaccttttcattagagaagcaatggctacagaggttttaattggaaaaaatgacagcattgagggtgttcgcactttcttcggcatggacttttatgcaccatctgttgtacttaccaccggaacattcatgagtggtaagatttgggttggtaggacatcaatgcctgctgggcgagctggagagtcagcttctcatggactaactgaaaacttgcagtttctgggttttgaaactgaccgcttgaaaaccggtacaccaccacgaattgatcgcagaacagttgatttttctggattggaaccccagcatggtgatgaagaggttggtttagttttgatcctgaatttcacgtcgagagagaacagatgtgctgctatctaacacgaactacaaaagagacgcaccaaattgttatcgacaacttagatgaaacaccaacttatggtggttgggttgaagcgaagggaccaagatactgcccgtcaattgaagacaagattgtaaggttcaaagataaagagtctcatcagatctttcttgaacctgagggtagaaatgttcctgaactatatctacagggcttttctactgggcttcctgagagattgcaattgtcccttgtgcgaactataccagggctggagaactgtctaatgctaagacctgcatatgcagttgaatatgattacttacccgcatatcaatgctcaagatcacttatgacaaagaagattgagggtttattcttctctggccagataaatggaacaacgggatacgaagaagctgcagctcagggtataatttctggaatcaatgcagctaggcattctgatgggaaatcattaattattcttgagagggaaagcagttatataggaactcttattgatgatcttgttacaaaagatcttagagagccctatcgcatgctaacaagccgttcagaacaccggctattgcttcgatcagataatgctgatagtcgtttgacccctttgggacgagagattggtttaatagatgatagacgttgggagctttatcagtcaaagcaagcccgcattaagcaagagaaagaacggttgagatctacaaaagttccaggaggtgaatttgctgctgaagttactgcagtatccaaccaacctgtaaaggattcatctacacttgaagccatattaaagaagccacacgtacaatataaactccttgacgagcatggatgcggaaatgaaaatttatctcgaattgagaaggaatgtgtagagattgatatcaagtatgaaggtttcatcgcacgacaacaaagtcaattacatcagatcgtaaaccaagaacacaggaaacttcctgaagatttggattaccactcaatgacaaatctatcacttgaagctcgtgagaaactttccaaggtgcgtccacaaacaataggtcaagctagcagaatcggcggtgtgagcccagcagacatgacagttctcctcatttggatggagagcaaccgacgcatggctacccacaggagacagcgagagcagctgggatcagttgcagtcgagtcggatggttcttcagaggaggccgtccaagccagcacggcataaacgtggggagcttctggcagctgaacaaggaacaacaaaattcggtgaggcatccagggagcctgcgcgtctgtggtacaacgatgcagggaggcgccaagtgcatgcatgtcttttcttgacgacatgaggaaatagtcggccccctggttccttcatgttgtgcctcattgtctaccagtatgtgtgcatgttgtttaggaatgctggtggaatacaggttgatatttgcagtagtagaattgagagagcagactgtaaagaacgacaacaaataggggtttaaaacatacattcgcactcacttagctaaaaaaatacactttttgtgtgttttatactttatacttaagcaaaatatagatatttttacgaaattagatgaaaagggcgtgttggatctagcccaccatgtgatacctaaggcctaggtatgacacgatgattgagctgggggtagactgtactagaccacgtgag

SEQ ID NO: 30744 - DNA, 2650 bp, Zea Mays
tttgaagaacgacgactagagtgacctgttttgacaaatttctcggctgggcgtgggcgggtttctgatgttgggttgggaagagaagagatagctcgtcctcagcatccgccttcctcctcggcggccatgctgctccgcctccgcccgccgcggcacccgtccaccgcggcggccacaaccctctcttccttcctcccctccacttccttccgccgactcatccccttgccgcgctggcgcccccctccgcgccgccgcctctccgccgccgccaaggattcgatcggccggttggatccgcgccaggagcggtacgacgtcattgtggtcggaggcggccatgccggatgcgaggccgcccttgcttcggctcgcctcggcgcgcgcaccctgcttcttacgctcaacattgaccggattgcgtggcaggtgctacttgcaaaagcgtgtactgaacagctcaaaaggccctgctgtacgtgcactgcgtgctcagactgataagagagagtatgcaatagagatgaagaacagtgtggaaagcacagaaaaccttttcattagagaagcaatggctacagaggttttaattggaaaaaatgacagcattgagggtgttcgcactttcttcggcatggacttttatgcaccatctgttgtacttaccaccggaacattcatgagtggtaagatttgggttggtaggacatcaatgcctgctgggcgagctggagagtcagcttctcatggactaactgaaaacttgcagtttctgggttttgaaactgaccgcttgaaaaccggtacaccaccacgaattgatcgcagaacagttgatttttctggattggaaccccagcatggtgatgaagaggtaggttggtttagttttgatcctgaatttcacgtcgagagagaacagatgtgctgctatctaacacgaactacaaaagagacgcaccaaattgttatcgacaacttagatgaaacaccaacttatggtggttgggttgaagcgaagggaccaagatactgcccgtcaattgaagacaagattgtaaggttcaaagataaagagtctcatcagatctttcttgaacctgagggtagaaatgttcctgaactatatctacagggcttttctactgggcttcctgagagattgcaattgtcccttgtgcgaactataccagggctggagaactgtctaatgctaagacctgcatatgcagttgaatatgattacttacccgcatatcaatgctcaagatcacttatgacaaagaagattgagggtttattcttctctggccagataaatggaacaacgggatacgaagaagctgcagctcagggtataatttctggaatcaatgcagctaggcattctgatgggaaatcattaattattcttgagagggaaagcagttatataggaactcttattgatgatcttgttacaaaagatcttagagagccctatcgcatgctaacaagccgttcagaacaccggctattgcttcgatcagataatgctgatagtcgtttgacccctttgggacgagagattggtttaatagatgatagacgttgggagctttatcagtcaaagcaagcccgcattaagcaagagaaagaacggttgagatctacaaaagttccaggaggtgaatttgctgctgaagttactgcagtatccaaccaacctgtaaaggattcatctacacttgaagccatattaaagaagccacacgtacaatataaactccttgacgagcatggatgcggaaatgaaaatttatctcgaattgagaaggaatgtgtagagattgatatcaagtatgaaggtttcatcgcacgacaacaaagtcaattacatcagatcgtaaaccaagaacacaggaaacttcctgaagatttggattaccactcaatgacaaatctatcacttgaagctcgtgagaaactttccaaggtgcgtccacaaacaataggtcaagctagcagaatcggcggtgtgagcccagcagacatgacagttctcctcatttggatggagagcaaccgacgcatggctacccacaggagacagcgagagcagctgggatcagttgcagtcgagtcggatggttcttcagaggaggccgtccaagccagcacggcataaacgtggggagcttctggcagctgaacaaggaacaacaaaattcggtgaggcatccagggagcctgcgcgtctgtggtacaacgatgcagggaggcgccaagtgcatgcatgtcttttcttgacgacatgaggaaatagtcggccccctggttccttcatgttgtgcctcattgtctaccagtatgtgtgcatgttgtttaggaatgctggtggaatacaggttgatatttgcagtagtagaattgagagagcagactgtaaagaacgacaacaaataggggtttaaaacatacattcgcactcacttagctaaaaaaatacactttttgtgtgttttatactttatacttaagcaaaatatagatatttttacgaaattagatgaaaagggcgtgttggatctagcccaccatgtgatacctaaggcctaggtatgacacgatgattgagctgggggtagactgtactagaccacgtgag

SEQ ID NO: 30745 - DNA, 2721 bp, Zea Mays
tttgaagaacgacgactagagtgacctgttttgacaaatttctcggctgggcgtgggcgggtttctgatgttgggttgggaagagaagagatagctcgtcctcagcatccgccttcctcctcggcggccatgctgctccgcctccgcccgccgcggcacccgtccaccgcggcggccacaaccctctcttccttcctcccctccacttccttccgccgactcatccccttgccgcgctggcgcccccctccgcgccgccgcctctccgccgccgccaaggattcgatcggccggttggatccgcgccaggagcggtacgacgtcattgtggtcggaggcggccatgccggatgcgaggccgcccttgcttcggctcgcctcggcgcgcgcaccctgcttcttacgctcaacattgaccggattgcgtggcagccttgtaaccctgctgttggtggccctgcgaagtctcaacttgtccatgaggtagatgcccttggtggtgaaattggaaaaattactgataggtgctacttgcaaaagcgtgtactgaacagctcaaaaggccctgctgtacgtgcactgcgtgctcagactgataagagagagtatgcaatagagatgaagaacagtgtggaaagcacagaaaaccttttcattagagaagcaatggctacagaggttttaattggaaaaaatgacagcattgagggtgttcgcactttcttcggcatggacttttatgcaccatctgttgtacttaccaccggaacattcatgagtggtaagatttgggttggtaggacatcaatgcctgctgggcgagctggagagtcagcttctcatggactaactgaaaacttgcagtttctgggttttgaaactgaccgcttgaaaaccggtacaccaccacgaattgatcgcagaacagttgatttttctggattggaaccccagcatggtgatgaagaggtaggttggtttagttttgatcctgaatttcacgtcgagagagaacagatgtgctgctatctaacacgaactacaaaagagacgcaccaaattgttatcgacaacttagatgaaacaccaacttatggtggttgggttgaagcgaagggaccaagatactgcccgtcaattgaagacaagattgtaaggttcaaagataaagagtctcatcagatctttcttgaacctgagggtagaaatgttcctgaactatatctacagggcttttctactgggcttcctgagagattgcaattgtcccttgtgcgaactataccagggctggagaactgtctaatgctaagacctgcatatgcagttgaatatgattacttacccgcatatcaatgctcaagatcacttatgacaaagaagattgagggtttattcttctctggccagataaatggaacaacgggatacgaagaagctgcagctcagggtataatttctggaatcaatgcagctaggcattctgatgggaaatcattaattattcttgagagggaaagcagttatataggaactcttattgatgatcttgttacaaaagatcttagagagccctatcgcatgctaacaagccgttcagaacaccggctattgcttcgatcagataatgctgatagtcgtttgacccctttgggacgagagattggtttaatagatgatagacgttgggagctttatcagtcaaagcaagcccgcattaagcaagagaaagaacggttgagatctacaaaagttccagttactgcagtatccaaccaacctgtaaaggattcatctacacttgaagccatattaaagaagccacacgtacaatataaactccttgacgagcatggatgcggaaatgaaaatttatctcgaattgagaaggaatgtgtagagattgatatcaagtatgaaggtttcatcgcacgacaacaaagtcaattacatcagatcgtaaaccaagaacacaggaaacttcctgaagatttggattaccactcaatgacaaatctatcacttgaagctcgtgagaaactttccaaggtgcgtccacaaacaataggtcaagctagcagaatcggcggtgtgagcccagcagacatgacagttctcctcatttggatggagagcaaccgacgcatggctacccacaggagacagcgagagcagctgggatcagttgcagtcgagtcggatggttcttcagaggaggccgtccaagccagcacggcataaacgtggggagcttctggcagctgaacaaggaacaacaaaattcggtgaggcatccagggagcctgcgcgtctgtggtacaacgatgcagggaggcgccaagtgcatgcatgtcttttcttgacgacatgaggaaatagtcggccccctggttccttcatgttgtgcctcattgtctaccagtatgtgtgcatgttgtttaggaatgctggtggaatacaggttgatatttgcagtagtagaattgagagagcagactgtaaagaacgacaacaaataggggtttaaaacatacattcgcactcacttagctaaaaaaatacactttttgtgtgttttatactttatacttaagcaaaatatagatatttttacgaaattagatgaaaagggcgtgttggatctagcccaccatgtgatacctaaggcctaggtatgacacgatgattgagctgggggtagactgtactagaccacgtgag

SEQ ID NO: 30746 - DNA, 396 bp, Zea Mays
gcagtacttgcccaccacgcacacgtaagccacagccgccaccgaccaccgctcagcagtccgtcggcgcccagccaccaaacacgcagctagccgggtttggccagcgccaggccaccatggccgcggctccaacttccaacgctgtgccccgcctggcaaccaactgcgtccaccgcctcctggctggctaggcaggatagagacagatgtctcatccagtgctccactcctccatagtataataacttcattggatttaattattgcggcatccttttctgcttgagacacctgctgaagctggaagtacatgctttcttattcctctcttttctccttatggtacaaggatgattatacttggtccagtgaggatggtaatatatgttctgg

SEQ ID NO: 30747 - DNA, 1522 bp, Zea Mays
cttgcccaccacgcacacgtaagccacagccgccaccgaccaccgctcagcagtccgtcggcgcccagccaccaaacacgcagctagccgggtttggccagcgccaggccaccatggccgcggctccaacttccaacgctgtgccccgcctggcaaccaactgcgtccaccgcctcctggctggctaggcaggatagagacagatgtctcatccagtgctccactcctccatagtataataacttcattggatttaattattgcggcatccttttctgcttgagacacctgctgaagctggaagtacatgctttcttattcctctcttttctccttatggtacaaggatgattatacttggtaaggaaatgttggttttctcatccaattcagataatctcgtttccatttgatcacacgtgcttcatacatcacatggatagtatgtatgaatcctaaaaagatctaattgaacatcgtcatttaattaatacatgtcggtcattttgcaacccttgttaacaataaccagactgatggattttctaccgccgtaaatttcaagtaaattttttgttatgatgttcaatttttcttgtcatgtgcggcggaaacataagtaggctggataaatagttttgtaatttttatgcctaaacatgttcaaacaaattgtttgtaatctaatgtatgcaactttgatgcttagctgttatgttaaatactgaatgtactataaaattatatattagatatgatttatatataaaattatatattatatatgatttagtccctctattttatttcattttagattctaaattgctaaatgcggaaactaaaacttcattttataagttgttggcttcagattaaacctagttgtttgtactgctgcaattataatatacagagattttttttttgtaagagtagtagaatttggtatagactaaacccacacgaacacgttgacgaattacgtgcttctcgcgaaaaaaaatcatatggctcatagagacggcccaaattcataatttctaggccgtgatttgtagaggttattgcaggaaaaaaaagagagaaatttttatataacattaaatgggatcgttacatgtagctgcatgcggatgtctttatttgcatctggtgtgatggggatataggctgcacctgggtgtcttcttgcatctggtattctggtggatggatgctttagaagcatatacgaacgatgtggtgcgccatccatcagtcgttttgctgcaaggatgcaatgcaacccacctatgcaagcagtaccgcgcttgccgctacaggagggagtattgtattgtggtggatactgtttgacagaggtttatcatcggaaaagaagtgaatttggatctagaatatacttgaattctccgaagtgtttgttatagcttccacgcttctctcggtctcagacctctacttggagcaattgtgattataaccttctctgattatgtaattgtgattttactcctcg

SEQ ID NO: 30748 - DNA, 1038 bp, Zea Mays
ttcggctccgtcgaggcgcacgctgaaacgtcgaggcgcacgccaccgaatttccaaagttcccatgcagcgccagggtcgcaagcttatagcagtcaacaaatactagtgcccattaccgccggatcgatcggaagccggccggcggcaaggaaggagtatcccagcgcagcaccgactccacgacttggccatcaatcatcatccatcgcagtatcgcaccgcagcaacagacaccgaccgaggatggttgttgccgtcgccgcgcggtcgtcgtcgtccgcgaccagcagcagcagcgagctggggtcgctgttcgcggcgttcgacgcggacgcggacgggcggatctcggcggccgagctgcgggagtgcgtgcgggcgacgctggggcccgacgccgcggcggtgtcggcggaggaggcggaggcgctggtggcgggcgcggacgcggacggcgacgggctgctggacgccgccgagttcgcgcggctcgtggccggcctgcacgcgggtgccgccgaggaggaccgccaccgctgcctgcgccaggccttccggatgtactcctccgacgacgacgcggcggagggccggggctcctcctgcatcacccccgacagcctgcgccgcatgctcgccaggctcggcgcgcaccaggacgtggacgactgccgcgccatgatctgcaggttcgacctcgacggcgacggcgtgctcagcttccacgagttcaaggtcatgatgggcgccgcgtgacccgatccagttccgccgccgccgctgctgctgcttagatggtccttgttcatatgtgggttgcttcattcattggttgattcattcgttgcttgtgtgtcatcaaaataataagtcattagttgcaggtagctaggattattagccatgctgtgatgtacatcattttcgtgcagcctgtgttgtgcagttgtgctccttcccccttgcgtgtgaagatgaattgctaattttttatttcatatatacatcgccatctaaaataaatattgaatctgt

SEQ ID NO: 30749 - DNA, 2959 bp, Zea Mays
ctcacactctgctcatctctgcttcgaacgttcacggagacacgaggctggaggctgcagcgctaaccctagccggcgtcggcggtggcggccagcgggaggggagctgccaaacgcctaaccctaacggctgcaggcggctgggcgcaaggcatccgtggccagcgtgccgcgcgcacgagcggacagttgcggcggcaggggcgcagggcgcgacctcggcgcggtgggcgcgggcgcaccgctgagcaggctgtagggggaggtgggattggattttttttgacgtggaagttggaatactcaagttggaaattctgctcctccactgccgccgccgctcgccacgtgctcgggtctagactcgtcggtttattcgccaggtcttcgttgtgcccttcgccggcgaccagcacgcaccagatcggcagcgtgacaaggaccgtagcaaagaccgggataaagaagcagagcgtgataaggaaagggagcggagggacagggataaggagagaagccgcaatagagacaaggacaaggataggacgcagagggaggatagggatcacgagaagtcaagggtgaagggtcgtggagaagacgaagcagatttatccaagggcgacaagggggttcagaagcagagagttgatgcctcaggggatgctgagcagcccgcagcagatgagctcagagagcgcattgcaagggcaaaggaggaaagattgaaggagaaaaaggaaggagggatactggatggtaatgacggggcttctgagatactgtcttgggtgggaaagagtcgtaaacttgatgaaaaaagacaagctgaaaaggagaaagcattacgtcttgcacgagcactggaagaacaggataatatcttggcagaaaatggcgatgacgatgatgacgataaagaggaagatacacaagtgggagatcacttatctggtgtcaaggtgcttcatggccttgataaggttttggaaggtggtgcagttgtcatgactctcaaagatcagagtattcttgccaatggggatatcaatgaagacgctgacatgcttgagaacattgagattggtgagcagaaacaaagagatgaagcttataaggcttcaaagaagaaaggaacttatgatgacaagttcaacaatgattcatcgtcaaaaaagtcgatactgtcacattatgatgaccaaatggaagatgagggcgtgacccttgatgaaggtggacgtttcactggtgaagcagaaaagaagctggaagagcttcggaaaaggattgaaggtggttatgttcagaaaaagacagaagaccttacttccaccacaaagatatcaacagactattttacccctgatgaaatgcttaaatttaaaaaaccaaagaaaaagaaatccctgaggaagaaggagaagctggatctggatgcacttgaggcagaagcaattgcttctggattgggggccgctgatcgtgggtcgaggaatgatggaaagagacagtctgctagggaggaagaacaagcggctgatgctgaaaagagaagcagtggttatcaaactgccattgcaaaggctgaagaggcatcaagagcattgcgcggggagaaaactgcacctgctaaaccagctgaagaacttgttttcggtgatgattatgaagatctgcagaaatctctagagcaagcaagaaagttggccctaaggaagcaggaagaggcttcagcttctggtcctcgttccatagtcgaactggctactgcaaccaagagccaagaggaaacagaagccacagaaggagattcagaacagaataaggttgttatcacagagatggaggaatttgtgtggggactgcaattgaatcaaggaacacgcaagccagaagacgatgtgtttatggatgaagatgatgatgccatgccttcagataatgttgcaaaagatgacactaatgggttggcagagatggaagaggatgctctgacagaaataccagccaaggtcgaagaggatgaagtcaaaccagatgaggttatacatgaagttgcagtaggaaagggtttagctggtgctttaaagattcttaaggagcgaggaagcctcaacgagggaacagattggggaggcagaacaacagacaagaaaaagagcaagcttataggtgtcgaggatggacctaaagacattcgcattgaaagaatagatgaatttggcagagtgatgacacctaaggaggcattccgtcatctttcgcacaagtttcatggcaaggggcctggtaaaatgaaacaagaaaaacgccagaagaaatatcatgatgagctgaaaaccaagcatatgaaatcttctgacacaccattattggccgcggaaaagatgagagaggctcaatctcgtaatcaaacaccatacctcattttaagtggcaatgcaaaaacaggtcaaacaagtgatagcggcggctatgctaccttggagacagagcaacctgggagcctaacgcccatgcttggggacaaaaaggtcgagcattttttgggcatcaaacgaagtgccaagcctggaagcttacctcctccagtcccaaagaaaccgaagaactgaacctggtggtagcactcagccaacgaagcaggctacaacgcatttactgtgagcagcaatcagcccacaagcttccacggctcaaccccccgccgccgcactagaaatgcaatatcctctgtatttcttctaagctgattacactaacattctggcatgttcgatggggttttgtaattcagtgatatacgtgtgcatccttgatctgccttgaacatgtaagtgatggaactaaatattgttctaacgacacaccgtttccgtttgaataaagtgtagttatgatgtgacggtttaaggttaaagcagctgtgttcaagagctacattcgttctgaaaat

SEQ ID NO: 30750 - DNA, 2847 bp, Zea Mays
atctctgcttcgaacgttcacggagacacgaggctggaggctgcagcgctaaccctagccggcgtcggcggtggcggccagcgggaggggagctgccaaacgcctaaccctaacggctgcaggcggctgggcgcaaggcatccgtggccagcgtgccgcgcgcacgagcggacagttgcggcggcaggggcgcagggcgcgacctcggcgcggtgggcgcgggcgcaccgctgagcaggctgtagggggaggtgggattggattttttttgacgtggaagttggaatactcaagttggaaattctgctcctccactgccgccgccgctcgccacgtgctcgggtctagactcgtcggtttattcgccaggtcttcgttgtgcccttcgccggcgaccagcacgcaccagttactgggtcacgcatgtcgtctgctgctgcggtggacgagatggagctggacggcattgagcggcaccgggataaggagaggagggagaggcataggagggaggagaaggatcacaatggcagtggaagaagggacagggagaaagagaaggacgaccggagaagggacaaggatgatggcaagcatagggatagggatagagatagggagagagacagggataaggatagcaagtacagagaccgggataaggagccagagcgtgaacgtaaccgtgaccgtgaccggggcaaagatcgggagcgggaaccagatcggcagcgtgacaaggaccgtagcaaagaccgggataaagaagcagagcgtgataaggaaagggagcggagggacagggataaggagagaagccgcaatagagacaaggacaaggataggacgcagagggaggatagggatcacgagaagtcaagggtgaagggtcgtggagaagacgaagcagatttatccaagggcgacaagggggttcagaagcagagagttgatgcctcaggggatgctgagcagcccgcagcagatgagctcagagagcgcattgcaagggcaaaggaggaaagattgaaggagaaaaaggaaggagggatactggatggtaatgacggggcttctgagatactgtcttgggtgggaaagagtcgtaaacttgatgaaaaaagacaagctgaaaaggagaaagcattacgtcttgcacgagcactggaagaacaggataatatcttggcagaaaatggcgatgacgatgatgacgataaagaggaagatacacaagtgggagatcacttatctggtgtcaaggtgcttcatggccttgataaggttttggaaggtggtgcagttgtcatgactctcaaagatcagagtattcttgccaatggggatatcaatgaagacgctgacatgcttgagaacattgagattggtgagcagaaacaaagagatgaagcttataaggcttcaaagaagaaaggaacttatgatgacaagttcaacaatgattcatcgtcaaaaaagtcgatactgtcacattatgatgaccaaatggaagatgagggcgtgacccttgatgaaggtggacgtttcactggtgaagcagaaaagaagctggaagagcttcggaaaaggattgaaggtggttatgttcagaaaaagacagaagaccttacttccaccacaaagatatcaacagactattttacccctgatgaaatgcttaaatttaaaaaaccaaagaaaaagaaatccctgaggaagaaggagaagctggatctggatgcacttgaggcagaagcaattgcttctggattgggggccgctgatcgtgggtcgaggaatgatggaaagagacagtctgctagggaggaagaacaagcggctgatgctgaaaagagaagcagtggttatcaaactgccattgcaaaggctgaagaggcatcaagagcattgcgcggggagaaaactgcacctgctaaaccagctgaagaacttgttttcggtgatgattatgaagatctgcagaaatctctagagcaagcaagaaagttggccctaaggaagcaggaagaggcttcagcttctggtcctcgttccatagtcgaactggctactgcaaccaagagccaagaggaaacagaagccacagaaggagattcagaacagaataaggttgttatcacagagatggaggaatttgtgtggggactgcaattgaatcaaggaacacgcaagccagaagacgatgtgtttatggatgaagatgatgatgccatgccttcagataatgttgcaaaagatgacactaatgggttggcagagatggaagaggatgctctgacagaaataccagccaaggtcgaagaggatgaagtcaaaccagatgaggttatacatgaagttgcagtaggaaagggtttagctggtgctttaaagattcttaaggagcgaggaagcctcaacgagggaacagattggggaggcagaacaacagacaagaaaaagagcaagcttataggtgtcgaggatggacctaaagacattcgcattgaaagaatagatgaatttggcagagtgatgacacctaaggaggcattccgtcatctttcgcacaagtttcatggcaaggggcctggtaaaatgaaacaagaaaaacgccagaagaaatatcatgatgagctgaaaaccaagcatatgaaatcttctgacacaccattattggccgcggaaaagatgagagaggctcaatctcgtaatcaaacaccatacctcattttaagtggcaatgcaaaaacaggacgccggagcactggagtactggacgccggtggcagacgctagacggctggagcacttggagcagagacgtcggcagaaaccagagaggac

SEQ ID NO: 30751 - DNA, 2991 bp, Zea Mays
cgcttgacctcttcacttcctgccgcgcgaaaccgagcacccgaaccctagcttaatctatttaggtacgaaaccgagcaccagaaccctagcttaatctatttaggtacgaaaccgagcaccagaaccctaacttttggttactgggtcacgcatgtcgtctgctgctgcggtggacgagatggagctggacggcattgagcggcaccgggataaggagaggagggagaggcataggagggaggagaaggatcacaatggcagtggaagaagggacagggagaaagagaaggacgaccggagaagggacaaggatgatggcaagcatagggatagggatagagatagggagagagacagggataaggatagcaagtacagagaccgggataaggagccagagcgtgaacgtaaccgtgaccgtgaccggggcaaagatcgggagcgggaaccagatcggcagcgtgacaaggaccgtagcaaagaccgggataaagaagcagagcgtgataaggaaagggagcggagggacagggataaggagagaagccgcaatagagacaaggacaaggataggacgcagagggaggatagggatcacgagaagtcaagggtgaagggtcgtggagaagacgaagcagatttatccaagggcgacaagggggttcagaagcagagagttgatgcctcaggggatgctgagcagcccgcagcagatgagctcagagagcgcattgcaagggcaaaggaggaaagattgaaggagaaaaaggaaggagggatactggatggtaatgacggggcttctgagatactgtcttgggtgggaaagagtcgtaaacttgatgaaaaaagacaagctgaaaaggagaaagcattacgtcttgcacgagcactggaagaacaggataatatcttggcagaaaatggcgatgacgatgatgacgataaagaggaagatacacaagtgggagatcacttatctggtgtcaaggtgcttcatggccttgataaggttttggaaggtggtgcagttgtcatgactctcaaagatcagagtattcttgccaatggggatatcaatgaagacgctgacatgcttgagaacattgagattggtgagcagaaacaaagagatgaagcttataaggcttcaaagaagaaaggaacttatgatgacaagttcaacaatgattcatcgtcaaaaaagtcgatactgtcacattatgatgaccaaatggaagatgagggcgtgacccttgatgaaggtggacgtttcactggtgaagcagaaaagaagctggaagagcttcggaaaaggattgaaggtggttatgttcagaaaaagacagaagaccttacttccaccacaaagatatcaacagactattttacccctgatgaaatgcttaaatttaaaaaaccaaagaaaaagaaatccctgaggaagaaggagaagctggatctggatgcacttgaggcagaagcaattgcttctggattgggggccgctgatcgtgggtcgaggaatgatggaaagagacagtctgctagggaggaagaacaagcggctgatgctgaaaagagaagcagtggttatcaaactgccattgcaaaggctgaagaggcatcaagagcattgcgcggggagaaaactgcacctgctaaaccagctgaagaacttgttttcggtgatgattatgaagatctgcagaaatctctagagcaagcaagaaagttggccctaaggaagcaggaagaggcttcagcttctggtcctcgttccatagtcgaactggctactgcaaccaagagccaagaggaaacagaagccacagaaggagattcagaacagaataaggttgttatcacagagatggaggaatttgtgtggggactgcaattgaatcaaggaacacgcaagccagaagacgatgtgtttatggatgaagatgatgatgccatgccttcagataatgttgcaaaagatgacactaatgggttggcagagatggaagaggatgctctgacagaaataccagccaaggtcgaagaggatgaagtcaaaccagatgaggttatacatgaagttgcagtaggaaagggtttagctggtgctttaaagattcttaaggagcgaggaagcctcaacgagggaacagattggggaggcagaacaacagacaagaaaaagagcaagcttataggtgtcgaggatggacctaaagacattcgcattgaaagaatagatgaatttggcagagtgatgacacctaaggaggcattccgtcatctttcgcacaagtttcatggcaaggggcctggtaaaatgaaacaagaaaaacgccagaagaaatatcatgatgagctgaaaaccaagcatatgaaatcttctgacacaccattattggccgcggaaaagatgagagaggctcaatctcgtaatcaaacaccatacctcattttaagtggcaatgcaaaaacaggtcaaacaagtgatagcggcggctatgctaccttggagacagagcaacctgggagcctaacgcccatgcttggggacaaaaaggtcgagcattttttgggcatcaaacgaagtgccaagcctggaagcttacctcctccagtcccaaagaaaccgaagaactgaacctggtggtagcactcagccaacgaagcaggctacaacgcatttactgtgagcagcaatcagcccacaagcttccacggctcaaccccccgccgccgcactagaaatgcaatatcctctgtatttcttctaagctgattacactaacattctggcatgttcgatggggttttgtaattcagtgatatacgtgtgcatccttgatctgccttgaacatgtaagtgatggaactaaatattgttctaacgacacaccgtttccgtttgaataaagtgtagttatgatgtgacggtttaaggttaaagcagctgtgttcaagagctacattcgttctgaaaat

SEQ ID NO: 30752 - DNA, 2402 bp, Zea Mays
cctttggtagtggtgacatgctacaactaattagccttaaatgccatgtatttaaatatggatggaatatctgttaaagggcaaaggaggaaagattgaaggagaaaaaggaaggagggatactggatggtaatgacggggcttctgagatactgtcttgggtgggaaagagtcgtaaacttgatgaaaaaagacaagctgaaaaggagaaagcattacgtcttgcacgagcactggaagaacaggataatatcttggcagaaaatggcgatgacgatgatgacgataaagaggaagatacacaagtgggagatcacttatctggtgtcaaggtgcttcatggccttgataaggttttggaaggtggtgcagttgtcatgactctcaaagatcagagtattcttgccaatggggatatcaatgaagacgctgacatgcttgagaacattgagattggtgagcagaaacaaagagatgaagcttataaggcttcaaagaagaaaggaacttatgatgacaagttcaacaatgattcatcgtcaaaaaagtcgatactgtcacattatgatgaccaaatggaagatgaggtaaacattctgtttagcttcatttgcttgcatttcgagatattttgtaattgtattctctttaacttatcagggcgtgacccttgatgaaggtggacgtttcactggtgaagcagaaaagaagctggaagagcttcggaaaaggattgaaggtggttatgttcagaaaaagacagaagaccttacttccaccacaaagatatcaacagactattttacccctgatgaaatgcttaaatttaaaaaaccaaagaaaaagaaatccctgaggaagaaggagaagctggatctggatgcacttgaggcagaagcaattgcttctggattgggggccgctgatcgtgggtcgaggaatgatggaaagagacagtctgctagggaggaagaacaagcggctgatgctgaaaagagaagcagtggttatcaaactgccattgcaaaggctgaagaggcatcaagagcattgcgcggggagaaaactgcacctgctaaaccagctgaagaacttgttttcggtgatgattatgaagatctgcagaaatctctagagcaagcaagaaagttggccctaaggaagcaggaagaggcttcagcttctggtcctcgttccatagtcgaactggctactgcaaccaagagccaagaggaaacagaagccacagaaggagattcagaacagaataaggttgttatcacagagatggaggaatttgtgtggggactgcaattgaatcaaggaacacgcaagccagaagacgatgtgtttatggatgaagatgatgatgccatgccttcagataatgttgcaaaagatgacactaatgggttggcagagatggaagaggatgctctgacagaaataccagccaaggtcgaagaggatgaagtcaaaccagatgaggttatacatgaagttgcagtaggaaagggtttagctggtgctttaaagattcttaaggagcgaggaagcctcaacgagggaacagattggggaggcagaacaacagacaagaaaaagagcaagcttataggtgtcgaggatggacctaaagacattcgcattgaaagaatagatgaatttggcagagtgatgacacctaaggaggcattccgtcatctttcgcacaagtttcatggcaaggggcctggtaaaatgaaacaagaaaaacgccagaagaaatatcatgatgagctgaaaaccaagcatatgaaatcttctgacacaccattattggccgcggaaaagatgagagaggctcaatctcgtaatcaaacaccatacctcattttaagtggcaatgcaaaaacaggtcaaacaagtgatagcggcggctatgctaccttggagacagagcaacctgggagcctaacgcccatgcttggggacaaaaaggtcgagcattttttgggcatcaaacgaagtgccaagcctggaagcttacctcctccagtcccaaagaaaccgaagaactgaacctggtggtagcactcagccaacgaagcaggctacaacgcatttactgtgagcagcaatcagcccacaagcttccacggctcaaccccccgccgccgcactagaaatgcaatatcctctgtatttcttctaagctgattacactaacattctggcatgttcgatggggttttgtaattcagtgatatacgtgtgcatccttgatctgccttgaacatgtaagtgatggaactaaatattgttctaacgacacaccgtttccgtttgaataaagtgtagttatgatgtgacggtttaaggttaaagcagctgtgttcaagagctacattcgttctgaaaat

SEQ ID NO: 30753 - DNA, 869 bp, Zea Mays
tacatactgaaactagaccaacctttcgtatagctctaggtactcgaccaccagagatttttattatatatagttaacaaacattgcctgctgctaatcatctatccataaaattcgaataggctaccaaacacacagctaggcagctagtagctagcaatgattagcatggaccaccagatgttcgacgaccccttcgggagcagcggcatctcgtcgctggaggcggacatcttctccgccgccgccggcagccagctgccgtcgccgccgtggccggacttcgacgacgactacgacatccccgacctctccgcgctgcccgccaacgccgccacctcctcgggcggcggctacggctccggcggatccggcggacaccgcaagctcagccacaacgcgtacgagcgtgaccgacggaagcagctcaacgacctctactcctcgctccgctccctcctcccggacgctgaccacaccaagaagctgagcatccccaccaccgtgtcccgagtcctcaagtacatcccggagctgcagaagcaggtggacaacctggagaggaggaagcgggagctgaccaacgccaactgcaagccgggagttctcaacaccagcgagatcgtaactactcccattgtttctgctacttgcctcaacgacacggagatcatggttcaggtcagcctgcacagcaatgtggcagccacggctctccctctctccaagtgcataaaggtgctggaggacgcaggccttcacctcatcagctcatcaacctactccacctttgggaacaagacattctatagcctccatcttcagagaagtcaaagaacgatgaacgaggagtgcccggcattctgcga

SEQ ID NO: 30754 - DNA, 638 bp, Zea Mays
atggcacgacgacgacggcagcagggggcagagccgcagggagaaggcgtaccgcgtcggcggcagcaggtactgctcgtgcacgcacggcgaccagctgtcgtcgccgcccagccccatgtgcctgtggtcaagatgcacctcgatgtcgtcccccttcaccagcctgtggacgtgcgttgccctgtccagctccgcggcgccgtagtagctcgcgctcatctgcatcggcggggagccgccgtgcgccgacgcgtacaggccgagcccgccggcgtcgcggagtgccacccacctgacgtccgcccgcccgccgcactccacgggggcaatgtacggcacgtgcagctcctccacgctgctctcgtacacgccgacgtgcgccgccgccttgcggtccgggtagcactcgaagggcccgcgcccgtaccacgtgacgtggctcagggacctcccggcgctgaacacgacgcccacccggggaaggggagggaggtcgctcctggggtttacctcgtagtcgagaaccacgtcgcctgacccgtggatccggcataccatcttcacccggaagagaatggactcggaggcttcgtcgtcaggcttgggcattattcttgcagatggttacattatca

SEQ ID NO: 30755 - DNA, 2141 bp, Zea Mays
catcgtttctcactcggtccaatcttgtgtgcctacatatccaacgcaacatagatctctgcgacacttagttgttggatatgtcatctcttaggaggccaacactcagtcccatataacatagcaggcctaatcgtcgtcctatagaacttgcctttcaacttctatggctctctcttgtcgcataggactcccgatgcttgacgccatttcatccaccccgctttgattctatgggagaaatttggcaaaacggatcactctacgttaccgctctactaaatgggtcgcttctcgagtcagttggaaaagagggtcactcaagttgtgtcgctcgtcgaaataggtcacagatcctttggcggacctgacaggtgggcccatagccccgttgtactgtttatgtccttacattctcacagacgccgtctctcctccatctcccgtcagaataggtcacttttccccttctccataactcttccctctgtcgcggcgtaggcgataacccgggcgaccctctcgcttctgtcgaacgtttgctgccggcgatggagacgacgacgtctcccactcccctgtgcaggtcagtcgtccatgactccttcgccatcaaggttaagcatttcatttaagtatgcttgtgccccgtgtaatttagggtttaaagtacacattcggacctgatggattgtgcaccgcacttatttttctggatgtttcgccactttgtggtttgtgccggttgtgaaatcctgtgattagcttctctggtttttggtagcaaaatcaaggtggccggctgtgaaatcttgtcataaaagcaatatgtttagcttcagtttagggttcagggggatttgcttgtccaccttgattttgcctaccaacagcgctgattgtatttagttcaaatgcctatttacttgcactagtattatagatgcagggatgtcgaagagcattgaaatcgccgacaaggcaatcatcttgatgcaggatcatgccaagcatatctatcgtatttgcaatgagaagctacccttgggtaaggggttgactgcatttgaggttaaggaacttcgagaaacacttgaggccatttgaggttaaggaacttcgagaaacacctcgttttgctaaaggtccttttacaaccgagtccatatcaacttgaggccattgtgaacgatcccttataggatagatgactctagagtatgcttctctgaacttgtgtactgaataaaaatcatgcacatagttttcaatcctttcatttctaaaactagtaatgacaactatggcatggtcacaaggcttcccagtatgctgccactccaaacaagagcactccttcgctcctagatcaacaatatgtctttcttgtttagggttgttatcaaaaacctcagcatgaccatttccagcatttacaacttttaaatgaccaagtcctctagaccttatattcaattgatgaaaactatagctggcaagatatttccacatagtttggcaccaattctcctccttttctcccaaagtaccataataagctctctaatcttgtctgctagttgaactactggcaggtctttgtgatctttgaccgagttgttgaaacactctgctaaattattgttgatgtagtcgcattttatatctggatcaaaagtactcatccacttgaacttgtgatccctatttagctaggtaatcacttcaggatcagaatgcaaaatgggcccaatatgtctatcaaattcagcttgtctatatgctctcgcagcaggatatattcctctataactatttccatggaatcgtttgatgaaattttgcatcagatgtctaaaacattatctcttatcagcatgcgggaaaactagttccacaacagtcatcaattccttgccggcatcagtgcaaatagctactttctcgatattccctatggcccttcgcagctgtgtcataaaccaaacccaattatccttgctctcagaatcatggttattaaagcggtaaaacgttatgaaccacctttttaacatttaaacgtttaaacgaacgttgaaacgtcttttcagacttgacatagaagtttaaatatagaataagttcatacataagttgag

SEQ ID NO: 30756 - DNA, 219 bp, Zea Mays
cgctctcgcgtgccaccatggagagcggggtgggtggcgatgcccgctgggatccggtggctgcgggctcggcttctcgggcggtggcgactggccgactgggaggcgaggcgacgaggaggaagaggacgcgtaactacctggaccgggagagatgtgtggggtcggcttcggctggaatctggggctcggatcgggtctgacggacctgtgcttccg

SEQ ID NO: 30757 - DNA, 3606 bp, Zea Mays
catttttatggtattaaacattttaaacgaggtattattttaattttgaggactcaaatatatgactgcagacgactccgatagtcccagtagacgactgagcacagccacgtgatcacgccatggacgccgctgtcgcgccgctcctcgcagtcgccgtccttctcttcctgggcctccggcggcgcgggggccaccgcaaccactgcccctacccgaaccccgtgctcggcaacgtggtgcccctggtccgcaacctgcaccgcttcctcgactgggccaccgaccagctcacggccgccccgtcctccaccatagaggtgcgcggcgcgctcggcctcggccgcggcgtcgccacggcggacccgggcgtcgtcaaccacatgctgcgggcgaggtttcccaactacgttaagggcgcgcgcttcgcggggcccttcggcgacctcctcggcagcggcatcttcctcgcggacggccgcctgtggagcctccagcgcaagctcgcgtcctactccttctcgtcccgctcgctgcgccgcttttcggggcgcgtcctccggggccacctgcaccgccggctccttcctcttctcgcgagtgcggctgactccggcgaggccgttgacctgcaggacgtgctcaagcgcttcgccttcgacaacatctgcggcgtcgcgttcggagtcgagggctcgacgctgctcgagctcgaggaggccggcggccggggcaggggacgaccccgccggcacgacacgttcttcgaggcgttcgacgccgccgtcgagatctccttcgcgcgcatgctccacccgaccgccgtcgtgtggaaggcgatgcagctcgctggcgtcggaagcgagaggcggctccgcgaggccatccgcatcgtcgacgagcacgtcgcggcgatcatggagtcggaggagcggtcgcgcggcgtcggcgacggaggcggctgcgacgagcagcaccttctgtcgcggttcgcggcggcgatggaggaagaggaggggagcgaactcggcgccatgttccggtcgccggaggcgaagcggcggttcctgcgggacatcgtcgtcagcttcgtgctcgccgggaaggactccacgtcctccgcgctcacatggttcttctggctcctcgccgccaacccgcgctgcgagcggcgcgtgtacgaggaggtggcgtcgctctcgctccacagatatggcgtcgacgacgaaggcggctacgacgagctcagggggctgcactacctgcacgcggcgctcaccgaggcgatgcggctgtatccgccggtgcccatcaactcgagggtggcggccgcgggggacgtgctgccggatggcacgacggtgcgcgccggctggttcgcggactactgcgcgtacgcgatggggaggatgccgcagctgtggggcgacgactgccgcgagttccgccccgagcggtggctcgatggcggaggcgagttcgtggcggtggacgcggcgaggtacccggtgttccacgccggcccgagggcgtgcctcggtaaggagatggcgtatgtgcagatgaaggccgttgtggccgccgtggtcaggaggttcgccgtggagacggtgcgggcggcaagcatggaggcgcctccgccgtacgagatgacggtgacgctgaggatgaagggcgggctgcctgtgcggataaggaggcgggagagcgacgcaggccggcactgatgatgacaggaagccgaagcagaaaaggccggctatcatgattcatgagaggaagacagagagatggagtatgcaagcaacaaagcaacacacatcgcaatggtcagccgaggaatcggagatttaaaagagacatttttcctgaaaattactgtaaaatattccccccatctatccaaaacaatgatgtaattcttacctctcaagaagccaaagtttttaaatttaaaatatggaaaaagctaacatttacgataataaatattagattaattacagaaaatatatttttagaatatttatttgtagacatcaatgatattttcaatgaaaattaagaaagtttggcttaattcaaatctagaaacatgaaattgctctacagagctccgatcaaaacaggtaatactatcactgcttgccaatgagagacatacatactgaaagttcagctaagatttggcgttaccttattgcaaattatagcatccgggggtacagtcagaaccattactgaaaatcactgcgtggcaatgatgggcaggtaaaagtgaaagaacgcagttgcatacatagatcatagatggggcgcactcttatcacatcaacactcgcccgaatgtcctccggctacgtttggcgagttgcttaaacatcctcaagaaaagccggattgatacgcctgccacccctccatgcgatactgtctcgcggtctctacagggttactggcctttataatccctcgtccgactataattatatcactacctctgtcgttgatgacctaaaagggagtgttatattgttgcccaagggcatctcctccagcagctatctgaaccccaggagtggcatggataaatgctgggcttgacggtgctggtgaccaagatgcaggattcactgatataaatcctattacaaagtcaggatgttgctcggcaatctttacagccgcagcagtgtagtctccataagcaaggttgccagctgagctcatttcagcaagcaaaagtaggccccttcctttaggcaaacccttcaatgccagaagacaacagtgactgtgagcaacgcaatgcatgagctattagcagctgcaaattaactattatctttaactcagtaattgtgtaagacctatgcatatatgtcatgaaataccttgagcttcaagccatctacaatcccaggtccaggaactatatgcgcattaataatatccgcccagtctaagatgcggaatatacctctgaaccgaagtaaagaaaatgccaactatgtcacacaaatgtatgtataagaaggaaaataaattaaatagttatagttcctttttctcacccttcagattgcatagttactgtgttcccaatgtcagcaaacttgcggtcttcaaagatcagaaagttgtgcttcccagcaatcttcaattgaaagttaagaatcagcacaatactgaatcagctatgcggtaaccagatgcagagtataacttcagcaatcggaacaggaatacacaaaacgcctctagtaatgaataaaataaaatcaagctaaaagaaccaagtaaattggcctggtatagggattttgcctttcatttatggacaacccattccgattacacataatgatactgtgtatacatgataatgaaagcaccgacatctgatttgaaacaaagtacaacttcaggactctaactgggcgattatggacactgacatccttatgatcagtaacactacaacaaaaagataaggaaactgctgtcagaagagaacatactgtgcgaaggttggccccaaaatctggtgtaaaatcagacaagatatcaacatgtgttttcagcatacaaatctctggaccaacc

SEQ ID NO: 30758 - DNA, 2529 bp, Zea Mays
gaacccatcgtctcacggacgccgaacccagaagccgccgacccctttcccgccgcacggatccaaaaccctagcccctcctcggcgtttttcccctcccggcgacggcgaggcggcggagatgatgcggcagcagcagcagcagcttccacctccgccgcagcacccgccgcccgactacgccgcacacccggcccccccgtcacagcagcagcatcagcctccttacgacgcttatggtgacagttttggtgctaaaaggatgcggaagcctgtccagcgacgaacagtggactacacaagcagtgttgtccgttatgttcaggctcgcatgtggcagcgggacgctagggatagattcacattgcagccaactccagcagctgtcctggatatgttaccttctgtcgcatatccagacaatccctcaacaagttttgctgccaaatttgtacattcgtcaatcaataagaaccggtgctctattaatcgtgtcttgtggacccctacaggccgtcgacttatcactggatcacaaagtggtgaatttacgctatggaatgggcaatcttttaactttgaaatgatacttcaggctcatgatctacctgtgagatcaatggtttggagtcacaatgaaaactggatggtgacgggagatgatggtggtgcaatcaagtattggcaaagtaacatgaacaacgtcaaagtgaataaaacagctcatagagaatcagttcgtggtttaagtttttccaggacagacttaaaattctgctcctgctccgatgaccgaacagtgaaggtttgggacttcgcaagatgccaagaggaaaaatcattaactgccaggccacggttgggatgttaaaactgtcgattggcatcctacaaagtctttactggtttcaggtggcaaagactatcttgtgaaactttgggatgcaaaaagtggcagagagctgagctcattccatggtcataaaaatattgtgcattgcgtgaagtggaatcagaatgggaactgggtactgactgcctcgaaggatcagattattaagctgtatgatattagatccatgaaagagctgcaatccttccgtgggcacaccaaggacgtcactgcattggcgtggcacccatttcatgaagaatattttgttagtgggagctttgatggagctatatttcattggttagtcggccatgaagctccacagattgaaataagtaatgcacatgacagtagtgtctgggatctttcgtggcatcctgtaggctatctactttgcagtggaggcaatgatcacgctacaaagttctggtgtagaaacaggcctggtgatcttacccgtgatagatacaacagtggccaaatgcaaggttttggtgaccaacatgctgcttttggtgctcgtggtatgggtggattccagatgcctgaacctccaataacgcctggaccatttgctcctggattgtcacgcaatgaaggtaccatccctggcattggggttgcaatgaccttggcaggccagtcttttgatggatctgatggagagcagaggccatctattccgggtcttccacctgggcaacccccgctgccaccaggtcctcatccatcacttcttgggcagcaacaacagtatcaacagatacctcagcagcaacatccccagttttcgcagccaccacctccgaacatgccccaactgcaggcaccagctcacatgctttcacattcacaaggatctcggcctactcttccccagcttccaccaatgggtggaccatcagtgccatcacaagtgaacccaccgcttccgcctatgcctcacccaacgagtcagatgatgccccaaatgccacagcacatgatgggcctaaatcagatgcatgctggttctgtgcctcctggtactgtacccccaatgggtgggttcccaagtgggatgggaaacatccaaggagcatcaggttcgtctggcgtacaaaattttcctatgggtggcatgtataatcggcctcagggacaaatggctccacaagggcaaatgacatccattcctggtctaagctcttaccagggaatgggtaatgttggccttacaccgccaccgccacagcacccgccgcctcgaggaggctcggcaacacagtgaccatccctggagcaaaacaaggattgtactgaacctaaactttctcgtgacactaaatttgtagcatgtaaatccatctcgagcaatatcagcgtgtctagactcccgcaaatcacgagggatttcttcacgattattgctcaggcagctaggatttttgctatctcgtgctgtggtttacaactgggggccttctgtcatgtgcctcatttgtactgtaattcgaatcgtgcctttacttgccggctgcttagatgttgaacatagagaattctttccctcagttttgagaagcgtgaacttcacttgtgccagttattgcatgtgtactttacgagttgttgacagacgatggcagtcaata

SEQ ID NO: 30759 - DNA, 2519 bp, Zea Mays
gaacccatcgtctcacggacgccgaacccagaagccgccgacccctttcccgccgcacggatccaaaaccctagcccctcctcggcgtttttcccctcccggcgacggcgaggcggcggagatgatgcggcagcagcagcagcagcttccacctccgccgcagcacccgccgccccaagcctcctccgccgccggtggcggcggcggtggcgagttctaccgcggcccgccgatgcggcagctgtccgcggcgtcctccaccaatctcccgcccgactacgccgcacacccggcccccccgtcacagcagcagcatcagcctccttacgacgcttatggtgacagttttggtgctaaaaggatgcggaagcctgtccagcgacgaacagtggactacacaagcagtgttgtccgttatgttcaggctcgcatgtggcagcgggacgctagggatagattcacattgcagccaactccagcagctgtcctggattggacccctacaggccgtcgacttatcactggatcacaaagtggtgaatttacgctatggaatgggcaatcttttaactttgaaatgatacttcaggctcatgatctacctgtgagatcaatggtttggagtcacaatgaaaactggatggtgacgggagatgatggtggtgcaatcaagtattggcaaagtaacatgaacaacgtcaaagtgaataaaacagctcatagagaatcagttcgtggtttaagtttttccaggacagacttaaaattctgctcctgctccgatgaccgaacagtgaaggtttgggacttcgcaagatgccaagaggaaaaatcattaactggccacggttgggatgttaaaactgtcgattggcatcctacaaagtctttactggtttcaggtggcaaagactatcttgtgaaactttgggatgcaaaaagtggcagagagctgagctcattccatggtcataaaaatattgtgcattgcgtgaagtggaatcagaatgggaactgggtactgactgcctcgaaggatcagattattaagctgtatgatattagatccatgaaagagctgcaatccttccgtgggcacaccaaggacgtcactgcattggcgtggcacccatttcatgaagaatattttgttagtgggagctttgatggagctatatttcattggttagtcggccatgaagctccacagattgaaataagtaatgcacatgacagtagtgtctgggatctttcgtggcatcctgtaggctatctactttgcagtggaggcaatgatcacgctacaaagttctggtgtagaaacaggcctggtgatcttacccgtgatagatacaacagtggccaaatgcaaggttttggtgaccaacatgctgcttttggtgctcgtggtatgggtggattccagatgcctgaacctccaataacgcctggaccatttgctcctggattgtcacgcaatgaaggtaccatccctggcattggggttgcaatgaccttggcaggccagtcttttgatggatctgatggagagcagaggccatctattccgggtcttccacctgggcaacccccgctgccaccaggtcctcatccatcacttcttgggcagcaacaacagtatcaacagatacctcagcagcaacatccccagttttcgcagccaccacctccgaacatgccccaactgcaggcaccagctcacatgctttcacattcacaaggatctcggcctactcttccccagcttccaccaatgggtggaccatcagtgccatcacaagtgaacccaccgcttccgcctatgcctcacccaacgagtcagatgatgccccaaatgccacagcacatgatgggcctaaatcagatgcatgctggttctgtgcctcctggtactgtacccccaatgggtgggttcccaagtgggatgggaaacatccaaggagcatcaggttcgtctggcgtacaaaattttcctatgggtggcatgtataatcggcctcagggacaaatggctccacaagggcaaatgacatccattcctggtctaagctcttaccagggaatgggtaatgttggccttacaccgccaccgccacagcacccgccgcctcgaggaggctcggcaacacagtgaccatccctggagcaaaacaaggattgtactgaacctaaactttctcgtgacactaaatttgtagcatgtaaatccatctcgagcaatatcagcgtgtctagactcccgcaaatcacgagggatttcttcacgattattgctcaggcagctaggatttttgctatctcgtgctgtggtttacaactgggggccttctgtcatgtgcctcatttgtactgtaattcgaatcgtgcctttacttgccggctgcttagatgttgaacatagagaattctttccctcagttttgagaagcgtgaacttcacttgtgccagttattgcatgtgtactttacgagttgttgacagacgatggcagtcaata

SEQ ID NO: 30760 - DNA, 2464 bp, Zea Mays
gaacccatcgtctcacggacgccgaacccagaagccgccgacccctttcccgccgcacggatccaaaaccctagcccctcctcggcgtttttcccctcccggcgacggcgaggcggcggagatgatgcggcagcagcagcagcagcttccacctccgccgcagcacccgccgcccgactacgccgcacacccggcccccccgtcacagcagcagcatcagcctccttacgacgcttatggtgacagttttggtgctaaaaggatgcggaagcctgtccagcgacgaacagtggactacacaagcagtgttgtccgttatgttcaggctcgcatgtggcagcgggacgctagggatagattcacattgcagccaactccagcagctgtcctggatatgttaccttctgtcgcatatccagacaatccctcaacaagttttgctgccaaatttgtacattcgtcaatcaataagaaccggtgctctattaatcgtgtcttgtggacccctacaggccgtcgacttatcactggatcacaaagtggtgaatttacgctatggaatgggcaatcttttaactttgaaatgatacttcaggctcatgatctacctgtgagatcaatggtttggagtcacaatgaaaactggatggtgacgggagatgatggtggtgcaatcaagtattggcaaagtaacatgaacaacgtcaaagtgaataaaacagctcatagagaatcagttcgtggtttaagtttttccaggacagacttaaaattctgctcctgctccgatgaccgaacagtgaaggtttgggacttcgcaagatgccaagaggaaaaatcattaactggccacggttgggatgttaaaactgtcgattggcatcctacaaagtctttactggtttcagccatggtcataaaaatattgtgcattgcgtgaagtggaatcagaatgggaactgggtactgactgcctcgaaggatcagattattaagctgtatgatattagatccatgaaagagctgcaatccttccgtgggcacaccaaggacgtcactgcattggcgtggcacccatttcatgaagaatattttgttagtgggagctttgatggagctatatttcattggttagtcggccatgaagctccacagattgaaataagtaatgcacatgacagtagtgtctgggatctttcgtggcatcctgtaggctatctactttgcagtggaggcaatgatcacgctacaaagttctggtgtagaaacaggcctggtgatcttacccgtgatagatacaacagtggccaaatgcaaggttttggtgaccaacatgctgcttttggtgctcgtggtatgggtggattccagatgcctgaacctccaataacgcctggaccatttgctcctggattgtcacgcaatgaaggtaccatccctggcattggggttgcaatgaccttggcaggccagtcttttgatggatctgatggagagcagaggccatctattccgggtcttccacctgggcaacccccgctgccaccaggtcctcatccatcacttcttgggcagcaacaacagtatcaacagatacctcagcagcaacatccccagttttcgcagccaccacctccgaacatgccccaactgcaggcaccagctcacatgctttcacattcacaaggatctcggcctactcttccccagcttccaccaatgggtggaccatcagtgccatcacaagtgaacccaccgcttccgcctatgcctcacccaacgagtcagatgatgccccaaatgccacagcacatgatgggcctaaatcagatgcatgctggttctgtgcctcctggtactgtacccccaatgggtgggttcccaagtgggatgggaaacatccaaggagcatcaggttcgtctggcgtacaaaattttcctatgggtggcatgtataatcggcctcagggacaaatggctccacaagggcaaatgacatccattcctggtctaagctcttaccagggaatgggtaatgttggccttacaccgccaccgccacagcacccgccgcctcgaggaggctcggcaacacagtgaccatccctggagcaaaacaaggattgtactgaacctaaactttctcgtgacactaaatttgtagcatgtaaatccatctcgagcaatatcagcgtgtctagactcccgcaaatcacgagggatttcttcacgattattgctcaggcagctaggatttttgctatctcgtgctgtggtttacaactgggggccttctgtcatgtgcctcatttgtactgtaattcgaatcgtgcctttacttgccggctgcttagatgttgaacatagagaattctttccctcagttttgagaagcgtgaacttcacttgtgccagttattgcatgtgtactttacgagttgttgacagacgatggcagtcaata

SEQ ID NO: 30761 - DNA, 2512 bp, Zea Mays
gaacccatcgtctcacggacgccgaacccagaagccgccgacccctttcccgccgcacggatccaaaaccctagcccctcctcggcgtttttcccctcccggcgacggcgaggcggcggagatgatgcggcagcagcagcagcagcttccacctccgccgcagcacccgccgcccgactacgccgcacacccggcccccccgtcacagcagcagcatcagcctccttacgacgcttatggtgacagttttggtgctaaaaggatgcggaagcctgtccagcgacgaacagtggactacacaagcagtgttgtccgttatgttcaggctcgcatgtggcagcgggacgctagggatagattcacattgcagccaactccagcagctgtcctggatatgttaccttctgtcgcatatccagacaatccctcaacaagttttgctgccaaatttgtacattcgtcaatcaataagaaccggtgctctattaatcgtgtcttggccgtcgacttatcactggatcacaaagtggtgaatttacgctatggaatgggcaatcttttaactttgaaatgatacttcaggctcatgatctacctgtgagatcaatggtttggagtcacaatgaaaactggatggtgacgggagatgatggtggtgcaatcaagtattggcaaagtaacatgaacaacgtcaaagtgaataaaacagctcatagagaatcagttcgtggtttaagtttttccaggacagacttaaaattctgctcctgctccgatgaccgaacagtgaaggtttgggacttcgcaagatgccaagaggaaaaatcattaactggccacggttgggatgttaaaactgtcgattggcatcctacaaagtctttactggtttcaggtggcaaagactatcttgtgaaactttgggatgcaaaaagtggcagagagctgagctcattccatggtcataaaaatattgtgcattgcgtgaagtggaatcagaatgggaactgggtactgactgcctcgaaggatcagattattaagctgtatgatattagatccatgaaagagctgcaatccttccgtgggcacaccaaggacgtcactgcattggcgtggcacccatttcatgaagaatattttgttagtgggagctttgatggagctatatttcattggttagtcggccatgaagctccacagattgaaataagtaatgcacatgacagtagtgtctgggatctttcgtggcatcctgtaggctatctactttgcagtggaggcaatgatcacgctacaaagttctggtgtagaaacaggcctggtgatcttacccgtgatagatacaacagtggccaaatgcaaggttttggtgaccaacatgctgcttttggtgctcgtggtatgggtggattccagatgcctgaacctccaataacgcctggaccatttgctcctggattgtcacgcaatgaaggtaccatccctggcattggggttgcaatgaccttggcaggccagtcttttgatggatctgatggagagcagaggccatctattccgggtcttccacctgggcaacccccgctgccaccaggtcctcatccatcacttcttgggcagcaacaacagtatcaacagatacctcagcagcaacatccccagttttcgcagccaccacctccgaacatgccccaactgcaggcaccagctcacatgctttcacattcacaaggatctcggcctactcttccccagcttccaccaatgggtggaccatcagtgccatcacaagtgaacccaccgcttccgcctatgcctcacccaacgagtcagatgatgccccaaatgccacagcacatgatgggcctaaatcagatgcatgctggttctgtgcctcctggtactgtacccccaatgggtgggttcccaagtgggatgggaaacatccaaggagcatcaggttcgtctggcgtacaaaattttcctatgggtggcatgtataatcggcctcagggacaaatggctccacaagggcaaatgacatccattcctggtctaagctcttaccagggaatgggtaatgttggccttacaccgccaccgccacagcacccgccgcctcgaggaggctcggcaacacagtgaccatccctggagcaaaacaaggattgtactgaacctaaactttctcgtgacactaaatttgtagcatgtaaatccatctcgagcaatatcagcgtgtctagactcccgcaaatcacgagggatttcttcacgattattgctcaggcagctaggatttttgctatctcgtgctgtggtttacaactgggggccttctgtcatgtgcctcatttgtactgtaattcgaatcgtgcctttacttgccggctgcttagatgttgaacatagagaattctttccctcagttttgagaagcgtgaacttcacttgtgccagttattgcatgtgtactttacgagttgttgacagacgatggcagtcaata

SEQ ID NO: 30762 - DNA, 2525 bp, Zea Mays
gaacccatcgtctcacggacgccgaacccagaagccgccgacccctttcccgccgcacggatccaaaaccctagcccctcctcggcgtttttcccctcccggcgacggcgaggcggcggagatgatgcggcagcagcagcagcagcttccacctccgccgcagcacccgccgcccgactacgccgcacacccggcccccccgtcacagcagcagcatcagcctccttacgacgcttatggtgacagttttggtgctaaaaggatgcggaagcctgtccagcgacgaacagtggactacacaagcagtgttgtccgttatgttcaggctcgcatgtggcagcgggacgctagggatagattcacattgcagccaactccagcagctgtcctggatatgttaccttctgtcgcatatccagacaatccctcaacaagttttgctgccaaatttgtacattcgtcaatcaataagaaccggtgctctattaatcgtgtcttgtggacccctacaggccgtcgacttatcactggatcacaaagtggtgaatttacgctatggaatgggcaatcttttaactttgaaatgatacttcaggctcatgatctacctgtgagatcaatggtttggagtcacaatgaaaactggatggtgacgggagatgatggtggtgcaatcaagtattggcaaagtaacatgaacaacgtcaaagtgaataaaacagctcatagagaatcagttcgtggtttaagtttttccaggacagacttaaaattctgctcctgctccgatgaccgaacagtgaaggtttgggacttcgcaagatgccaagaggaaaaatcattaactggccacggttgggatgttaaaactgtcgattggcatcctacaaagtctttactggtttcaggtggcaaagactatcttgtgaaactttgggatgcaaaaagtggcagagagctgagctcattccatggtcataaaaatattgtgcattgcgtgaagtggaatcagaatgggaactgggtactgactgcctcgaaggatcagattattaagctgtatgatattagatccatgaaagagctgcaatccttccgtgggcacaccaaggacgtcactgcattggcgtggcacccatttcatgaagaatattttgttagtgggagctttgatggagctatatttcattggttagtcggccatgaagctccacagattgaaataagtaatgcacatgacagtagtgtctgggatctttcgtggcatcctgtaggctatctactttgcagtggaggcaatgatcacgctacaaagttctggtgtagaaacaggcctggtgatcttacccgtgatagatacaacagtggccaaatgcaaggttttggtgaccaacatgctgcttttggtgctcgtggtatgggtggattccagatgcctgaacctccaataacgcctggaccatttgctcctggattgtcacgcaatgaaggtaccatccctggcattggggttgcaatgaccttggcaggccagtcttttgatggatctgatggagagcagaggccatctattccgggtcttccacctgggcaacccccgctgccaccaggtcctcatccatcacttcttgggcagcaacaacagtatcaacagatacctcagcagcaacatccccagttttcgcagccaccacctccgaacatgccccaactgcaggcaccagctcacatgctttcacattcacaaggatctcggcctactcttccccagcttccaccaatgggtggaccatcagtgccatcacaagtgaacccaccgcttccgcctatgcctcacccaacgagtcagatgatgccccaaatgccacagcacatgatgggcctaaatcagatgcatgctggttctgtgcctcctggtactgtacccccaatgggtgggttcccaagtgggatgggaaacatccaaggagcatcaggttcgtctggcgtacaaaattttcctatgggtggcatgtataatcggcctcagggacaaatggctccacaagggcaaatgacatccattcctggtctaagctcttaccagggaatgggtaatgttggccttacaccgccaccgccacagcacccgccgcctcgaggaggctcggcaacacagtgaccatccctggagcaaaacaaggattgtactgaacctaaactttctcgtgacactaaatttgtagcatgtaaatccatctcgagcaatatcagcgtgtctagactcccgcaaatcacgagggatttcttcacgattattgctcaggcagctaggatttttgctatctcgtgctgtggtttacaactgggggccttctgtcatgtgcctcatttgtactgtaattcgaatcgtgcctttacttgccggctgcttagatgttgaacatagagaattctttccctcagttttgagaagcgtgaacttcacttgtgccagttattgcatgtgtactttacgagttgttgacagacgatggcagtcaata

SEQ ID NO: 30763 - DNA, 3471 bp, Zea Mays
gaacccatcgtctcacggacgccgaacccagaagccgccgacccctttcccgccgcacggatccaaaaccctagcccctcctcggcgtttttcccctcccggcgacggcgaggcggcggagatgatgcggcagcagcagcagcagcttccacctccgccgcagcacccgccgcccgactacgccgcacacccggcccccccgtcacagcagcagcatcagcctccttacgacgcttatggtgacagttttggtgctaaaaggatgcggaagcctgtccagcgacgaacagtggactacacaagcagtgttgtccgttatgttcaggctcgcatgtggcagcgggacgctagggatagattcacattgcagccaactccagcagctgtcctggatatgttaccttctgtcgcatatccagacaatccctcaacaagttttgctgccaaatttgtacattcgtcaatcaataagaaccggtgctctattaatcgtgtcttgtggacccctacaggccgtcgacttatcactggatcacaaagtggtgaatttacgctatggaatgggcaatcttttaactttgaaatgatacttcaggctcatgatctacctgtgagatcaatggtttggagtcacaatgaaaactggatggtgacgggagatgatggtggtgcaatcaagtattggcaaagtaacatgaacaacgtcaaagtgaataaaacagctcatagagaatcagttcgtggtttaagtttttccaggacagacttaaaattctgctcctgctccgatgaccgaacagtgaaggtttgggacttcgcaagatgccaagaggaaaaatcattaactggccacggttgggatgttaaaactgtcgattggcatcctacaaagtctttactggtttcaggtggcaaagactatcttgtgaaactttgggatgcaaaaagtggcagagagctgagctcattccatggtcataaaaatattgtgcattgcgtgaagtggaatcagaatgggaactgggtactgactgcctcgaaggatcagattattaagctgtatgatattagatccatgaaagagctgcaatccttccgtgggcacaccaaggacgtcactgcattggcgtggcacccatttcatgaagaatattttgttagtgggagctttgatggagctatatttcattggttagtcggccatgaagctccacagattgaaataagtaatgcacatgacagtagtgtctgggatctttcgtggcatcctgtaggctatctactttgcagtggaggcaatgatcacgctacaaagttctggtgtagaaacaggcctggtgatcttacccgtgatagatacaacagtggccaaatgcaaggttttggtgaccaacatgctgcttttggtgctcgtggtatgggtggattccagatgcctgaacctccaataacgcctggaccatttgctcctggattgtcacgcaatgaaggtaccatccctggcattggggttgcaatgaccttggcaggccagtcttttgatggatctgatggagagcagaggccatctattccgggtcttccacctgggcaacccccgctgccaccaggtcctcatccatcacttcttgggcagcaacaacagtatcaacagatacctcagcagcaacatccccagttttcgcagccaccacctccgaacatgccccaactgcaggcaccagctcacatgctttcacattcacaaggatctcggcctactcttccccagcttccaccaatgggtggaccatcagtgccatcacaagtgaacccaccgcttccgcctatgcctcacccaacggcaatgcatggttcacagagtcagatgatgccccaaatgccacagcacatgatgggcctaaatcagatgcatgctggttctgtgcctcctggtactgtacccccaatgggtgggttcccaagtgggatgggaaacatccaaggagcatcaggttcgtctggcgtacaaaattttcctatgggtggcatgtataatcggcctcagggacaaatggctccacaagggcaaatgacatccattcctggtctaagctcttaccagggaatgggtaatgttggccttacaccgccaccgccacagcacccgccgcctcgaggaggctcggcaacacagtgaccatccctggagcaaaacaaggattgtcaaacatttgaaaggctgcatcggacgcatccatggtggcctacaccacatccatcgtcttcagtcgtgctctcagccacatccaaccgcatgggcattaccacagcttggcccacctatcaaggcttacagagtttccttaaatgggttctccccttgtgatctgggctgcgctgctaaggccggcccgtttcgtcttgtgatgctgcggggctggcgacaaccaccagcagcatcgaagacaggaggagaaaggagaggtggtggggcgatggcagcgactgcggcggagggggtggccgcgacggcgctgcgagccgtgctggggcgggcgggtatggcggcggagcggtcggggtgcgccgcggaggcggtacgggttgtggcggtggggaagaccaagcctgtttcgatgctgcggcagctatacgacgcgggccaccgctgcttcggcgagaactacgtgcaggagttcgtcaccaaggccccccagcttccgcaagatacccggtggcattttatcgggcacctgcagagcaacaaagtgaaaccactgttagctgctgttccaaatcttgatatggttgagggcgtagacaatgaaaagattgctaaccacctagatcgagctgtcaacagtttgggaaggcagcctttgaaagttttggttcaagtgaacactagtggagaagaatctaaatctggaatcgatccctccaaatgtgtcgaccttgctaagcatgtgaaactagcatgcccacacctaatattttcaggtctgatgacaataggtatgaaagactactcgtcaacaccagaaaattttaaggcattggttaattgtaagcttgaagtttgcaaggcccttgacataccaacagaacagtttgaactctccatgggaatgtctggtgactttgagcaagcgattgagatgggcagcacgaatgtgaggattggatcaaccatttttggaccaagggagtatccaaacaaaaggcagaactagtgagattcaacgcataagtgtcatctcaatacccagtcctcttgattaaccttttgcctatggggaggggggggaactctccatacaacagtacggcactgtataagaaattttgtgacatggccttgaatagaaatttcataaaaaaagttcttcctatcatccctcacctattctttccatgatgtttgacgctcacctgcagatttaaattagcattgtacttatatgcaatgagaagacatgtaattcttta

SEQ ID NO: 30764 - DNA, 3881 bp, Zea Mays
gaacccatcgtctcacggacgccgaacccagaagccgccgacccctttcccgccgcacggatccaaaaccctagcccctcctcggcgtttttcccctcccggcgacggcgaggcggcggagatgatgcggcagcagcagcagcagcttccacctccgccgcagcacccgccgcccgactacgccgcacacccggcccccccgtcacagcagcagcatcagcctccttacgacgcttatggtgacagttttggtgctaaaaggatgcggaagcctgtccagcgacgaacagtggactacacaagcagtgttgtccgttatgttcaggctcgcatgtggcagcgggacgctagggatagattcacattgcagccaactccagcagctgtcctggatatgttaccttctgtcgcatatccagacaatccctcaacaagttttgctgccaaatttgtacattcgtcaatcaataagaaccggtgctctattaatcgtgtcttgtggacccctacaggccgtcgacttatcactggatcacaaagtggtgaatttacgctatggaatgggcaatcttttaactttgaaatgatacttcaggctcatgatctacctgtgagatcaatggtttggagtcacaatgaaaactggatggtgacgggagatgatggtggtgcaatcaagtattggcaaagtaacatgaacaacgtcaaagtgaataaaacagctcatagagaatcagttcgtggtttaagtttttccaggacagacttaaaattctgctcctgctccgatgaccgaacagtgaaggtttgggacttcgcaagatgccaagaggaaaaatcattaactggccacggttgggatgttaaaactgtcgattggcatcctacaaagtctttactggtttcaggtggcaaagactatcttgtgaaactttgggatgcaaaaagtggcagagagctgagctcattccatggtcataaaaatattgtgcattgcgtgaagtggaatcagaatgggaactgggtactgactgcctcgaaggatcagattattaagctgtatgatattagatccatgaaagagctgcaatccttccgtgggcacaccaaggacgtcactgcattggcgtggcacccatttcatgaagaatattttgttagtgggagctttgatggagctatatttcattggttagtcggccatgaagctccacagattgaaataagtaatgcacatgacagtagtgtctgggatctttcgtggcatcctgtaggctatctactttgcagtggaggcaatgatcacgctacaaagttctggtgtagaaacaggcctggtgatcttacccgtgatagatacaacagtggccaaatgcaaggttttggtgaccaacatgctgcttttggtgctcgtggtatgggtggattccagatgcctgaacctccaataacgcctggaccatttgctcctggattgtcacgcaatgaaggtaccatccctggcattggggttgcaatgaccttggcaggccagtcttttgatggatctgatggagagcagaggccatctattccgggtcttccacctgggcaacccccgctgccaccaggtcctcatccatcacttcttgggcagcaacaacagtatcaacagatacctcagcagcaacatccccagttttcgcagccaccacctccgaacatgccccaactgcaggcaccagctcacatgctttcacattcacaaggatctcggcctactcttccccagcttccaccaatgggtggaccatcagtgccatcacaagtgaacccaccgcttccgcctatgcctcacccaacggcaatgcatggttcacagagtcagatgatgccccaaatgccacagcacatgatgggcctaaatcagatgcatgctggttctgtgcctcctggtactgtacccccaatgggtgggttcccaagtgggatgggaaacatccaaggagcatcaggttcgtctggcgtacaaaattttcctatgggtggcatgtataatcggcctcagggacaaatggctccacaagggcaaatgacatccattcctggtctaagctcttaccagggaatgggtaatgttggccttacaccgccaccgccacagcacccgccgcctcgaggaggctcggcaacacagtgaccatccctggagcaaaacaaggattgtcaaacatttgaaaggctgcatcggacgcatccatggtggcctacaccacatccatcgtcttcagtcgtgctctcagccacatccaaccgcatgggcattaccacagcttggcccacctatcaaggcttacagagtttccttaaatgggttctccccttgtgatctgggctgcgctgctaaggccggcccgtttcgtcttgtgatgctgcggggctggcgacaaccaccagcagcatcgaagacaggaggagaaaggagaggtggtggggcgatggcagcgactgcggcggagggggtggccgcgacggcgctgcgagccgtgctggggcgggcgggtatggcggcggagcggtcggggtgcgccgcggaggcggtacgggttgtggcggtggggaagaccaagcctgtttcgatgctgcggcagctatacgacgcgggccaccgctgcttcggcgagaactacgtgcaggagttcgtcaccaaggccccccagcttccgcaagatacccggtggcattttatcgggcacctgcagagcaacaaagtgaaaccactgttagctgctgttccaaatcttgatatggttgagggcgtagacaatgaaaagattgctaaccacctagatcgagctgtcaacagtttgggaaggcagcctttgaaagttttggttcaagtgaacactagtggagaagaatgtgagtgcataataagtattgagaaatcagaactcttatctcttgattaattttcccgaacaaagcacttgtgctatttgtttccacatttgccttgatctgatagattataattgatattctttcattttgcaaccaattgctatatcagaagtcagtttattacttcagaagcataccttaaattacaagtgacaagtttggaaaataaaaagtaaaagcgaacttatgaccaagttcaaattattatcattctgcaatgtccacattcatctttcatataattagcttaccacgcagctgcaggttcatggactaaacattttcttttgttcagctaaatctggaatcgatccctccaaatgtgtcgaccttgctaagcatgtgaaactagcatgcccacacctaatattttcaggtctgatgacaataggtatgaaagactactcgtcaacaccagaaaattttaaggcattggttaattgtaagcttgaagtttgcaaggcccttgacataccaacagaacagtttgaactctccatgggaatgtctggtgactttgagcaagcgattgagatgggcagcacgaatgtgaggattggatcaaccatttttggaccaagggagtatccaaacaaaaggcagaactagtgagattcaacgcataagtgtcatctcaatacccagtcctcttgattaaccttttgcctatgtaagcatgatgctatgtataaatgcacatgtgaataggtaacatgtacaacctcatacaacactgtttgcagggggaggggggggaactctccatacaacagtacggcactgtataagaaattttgtgacatggccttgaatagaaatttcataaaaaaagttcttcctatcatccctcacctattctttccatgatgtttgacgctcacctgcagatttaaattagcattgtacttatatgcaatgagaagacatgtaattcttta

SEQ ID NO: 30765 - DNA, 3456 bp, Zea Mays
gaacccatcgtctcacggacgccgaacccagaagccgccgacccctttcccgccgcacggatccaaaaccctagcccctcctcggcgtttttcccctcccggcgacggcgaggcggcggagatgatgcggcagcagcagcagcagcttccacctccgccgcagcacccgccgcccgactacgccgcacacccggcccccccgtcacagcagcagcatcagcctccttacgacgcttatggtgacagttttggtgctaaaaggatgcggaagcctgtccagcgacgaacagtggactacacaagcagtgttgtccgttatgttcaggctcgcatgtggcagcgggacgctagggatagattcacattgcagccaactccagcagctgtcctggatatgttaccttctgtcgcatatccagacaatccctcaacaagttttgctgccaaatttgtacattcgtcaatcaataagaaccggtgctctattaatcgtgtcttgtggacccctacaggccgtcgacttatcactggatcacaaagtggtgaatttacgctatggaatgggcaatcttttaactttgaaatgatacttcaggctcatgatctacctgtgagatcaatggtttggagtcacaatgaaaactggatggtgacgggagatgatggtggtgcaatcaagtattggcaaagtaacatgaacaacgtcaaagtgaataaaacagctcatagagaatcagttcgtggtttaagtttttccaggacagacttaaaattctgctcctgctccgatgaccgaacagtgaaggtttgggacttcgcaagatgccaagaggaaaaatcattaactggccacggttgggatgttaaaactgtcgattggcatcctacaaagtctttactggtttcaggtggcaaagactatcttgtgaaactttgggatgcaaaaagtggcagagagctgagctcattccatggtcataaaaatattgtgcattgcgtgaagtggaatcagaatgggaactgggtactgactgcctcgaaggatcagattattaagctgtatgatattagatccatgaaagagctgcaatccttccgtgggcacaccaaggacgtcactgcattggcgtggcacccatttcatgaagaatattttgttagtgggagctttgatggagctatatttcattggttagtcggccatgaagctccacagattgaaataagtaatgcacatgacagtagtgtctgggatctttcgtggcatcctgtaggctatctactttgcagtggaggcaatgatcacgctacaaagttctggtgtagaaacaggcctggtgatcttacccgtgatagatacaacagtggccaaatgcaaggttttggtgaccaacatgctgcttttggtgctcgtggtatgggtggattccagatgcctgaacctccaataacgcctggaccatttgctcctggattgtcacgcaatgaaggtaccatccctggcattggggttgcaatgaccttggcaggccagtcttttgatggatctgatggagagcagaggccatctattccgggtcttccacctgggcaacccccgctgccaccaggtcctcatccatcacttcttgggcagcaacaacagtatcaacagatacctcagcagcaacatccccagttttcgcagccaccacctccgaacatgccccaactgcaggcaccagctcacatgctttcacattcacaaggatctcggcctactcttccccagcttccaccaatgggtggaccatcagtgccatcacaagtgaacccaccgcttccgcctatgcctcacccaacggcaatgcatggttcacagagtcagatgatgccccaaatgccacagcacatgatgggcctaaatcagatgcatgctggttctgtgcctcctggtactgtacccccaatgggtgggttcccaagtgggatgggaaacatccaaggagcatcaggttcgtctggcgtacaaaattttcctatgggtggcatgtataatcggcctcagggacaaatggctccacaagggcaaatgacatccattcctggtctaagctcttaccagggaatgggtaatgttggccttacaccgccaccgccacagcacccgccgcctcgaggaggctcggcaacacagtgaccatccctggagcaaaacaaggattgtcaaacatttgaaaggctgcatcggacgcatccatggtggcctacaccacatccatcgtcttcagtcgtgctctcagccacatccaaccgcatgggcattaccacagcttggcccacctatcaaggcttacagagtttccttaaatgggttctccccttgtgatctgggctgcgctgctaaggccggcccgtttcgtcttgtgatgctgcggggctggcgacaaccaccagcagcatcgaagacaggaggagaaaggagaggtggtggggcgatggcagcgactgcggcggagggggtggccgcgacggcgctgcgagccgtgctggggcgggcgggtatggcggcggagcggtcggggtgcgccgcggaggcggtacgggttgtggcggtggggaagaccaagcctgtttcgatgctgcggcagctatacgacgcgggccaccgctgcttcggcgagaactacgtgcaggagttcgtcaccaaggccccccagcttccgcaagatacccggtggcattttatcgggcacctgcagagcaacaaagtgaaaccactgttagctgctgttccaaatcttgatatggttgagggcgtagacaatgaaaagctaaatctggaatcgatccctccaaatgtgtcgaccttgctaagcatgtgaaactagcatgcccacacctaatattttcaggtctgatgacaataggtatgaaagactactcgtcaacaccagaaaattttaaggcattggttaattgtaagcttgaagtttgcaaggcccttgacataccaacagaacagtttgaactctccatgggaatgtctggtgactttgagcaagcgattgagatgggcagcacgaatgtgaggattggatcaaccatttttggaccaagggagtatccaaacaaaaggcagaactagtgagattcaacgcataagtgtcatctcaatacccagtcctcttgattaaccttttgcctatgtaagcatgatgctatgtataaatgcacatgtgaataggtaacatgtacaacctcatacaacactgtttgcagggggaggggggggaactctccatacaacagtacggcactgtataagaaattttgtgacatggccttgaatagaaatttcataaaaaaagttcttcctatcatccctcacctattctttccatgatgtttgacgctcacctgcagatttaaattagcattgtacttatatgcaatgagaagacatgtaattcttta

SEQ ID NO: 30766 - DNA, 1308 bp, Zea Mays
cccttctccgcaaaccgtttcgcatctccgctacccccagccaagtcgctcccggtggctccgttctccgcgccttcgttccccctcggttttcctgctgtttcgcctcggtcctgcttgctggtgctgcagatctgcgttcgccggccccttctccctgctatcgcatgccagccaggcgcccacgggcacggccagcccccaccccacaggcgtggcactgcccctgtccggctgttccttgcttttgcttgcctgtgcctgctcctgttgggcttcggcacctgcacagaggagacagaggtatacagagccacgcagccaaggatttcgaattcgtgacttgttggagtttctgaatggccagcccaggggatgcggagggcatcaccatctccatgggggagctgagcgtagaagcagcgacttcgtcaggatgatgtgtgggaagatgtttcagattctcatgggcacgcgtctaccttagacagagaatggatccacaggcagaaccagtttcaaaagatgggctatcgggacggaataacacaagggcagaaggactctgcccaggaaggcttcaatgctgggttcaggcaatctgtaaacgctggctacaagtggggccttgttcgcggggttgccagtgcgctagccaatcttccagacagcttgaaagagaaactggtgccggacgtccagtgcagagggaaactacaggatctgcacagctccgtgcgagaaatatcagcagatgacgctctccagatgttccacgagagtatccgccagagtaaccctccgtcagaggggtcaggatcatatgtagtagcatcagccaccgatggagctacggaaccaaacaggatgaaaagcctaccgaaggatctcgtgttgttgctgcgtgaatgctcggatatcaaagtcagcaaggagttggcgtgggattcatgaacaaggcgactcagaaattccaaccactacaagtgtggcagaatcacactgagttcccagattactgaacgcctacctgggctgatggatgaatgtgattcggggattttgttttggaagtgactgagatactcgaaaggttcagggacctcgaatcgaatgtgtctgtagtaatgcagatttttattccatatttcccttttttttgctgcaacctgtaactagaattgtaactataaatttgcagttcttaaacaattgtaatgtttttttttctctccctgaattctgtcatcttcctgaacaatggtcttcatgtggaagtatagtattttgccacgttttgagccgaca

SEQ ID NO: 30767 - DNA, 859 bp, Zea Mays
gcgagcagcagctcgctcttgtggccctgcgcctcaaaggggtgccctacgagctcatcctggaggacctggccaacaagagcgagctgctgctggcacacaaccccgtgcacaaactcgtgcccgtgctcctccacggcgacagggccatctccgagtcgctcgtcatcctcgagtacgtcgacgaggccttcgacgggccgcctctcctccccgcggaaccccacgcgagggcggacgcgcggttctgggcccacttcatcgaccaaaagttcgcgcggccgttctggatgtcgttctggacggacgacgaggagcgcagggaggctatggcgaaggaggccaaggagaacctggctctgctcgaggcgcagctcagggggcagaggttcttcggcggcgaggccatcggcttcgtcgacatcgccgcctgtgcgctggcgcactgggtcggggtcatcgaggaggccgccggggtggtcctcgtcggcggcgaggagttcccagcgctccgcgagtgggccgacgcctacatcaacgacgccaccgtgaaggcgtgaagcagtgcttgaggagccgcgacgagctcgtcgattacttctcctccaggaaggagatgtacttgctgcgagcgagggccactccgcgcagctgatctggacccatgtttccttccgttcgcaataagccaataataaagactagtttggtaacccatttttctaaactgaaacattcagttcagtcgagctagctctcagacgccatgcgcgacacgcatttcgcattagggggagtttgaaatcagataggaagggaataagggattgatggagagttcatttcccctcagtctaga

SEQ ID NO: 30768 - DNA, 1152 bp, Zea Mays
tcaggttcttgccacttttgttacaaccatgttcttggacagagctgggcggcaaattctccttgttaattcttctactaggatgactgtaagtcttcttgtagttgctattgtattttacatcaaggataatatttcacatgactctgacttgtatgacatcttaagtatggtgtccttggttggtgtcatggcttatgtcattgccttatccttcggtatgggtgccattccttggatcataatgtctaagatcctccagttagcatcaagagtcttgcaggaagcttcgcgacccttgccaactggttgagatcctttggaataacaatgacgacaaatttgctgatcagctggagtgctagaggtacgtttacctcctacatgattgtgagtgccttcactctcgtgttcgtaatcgcttgggtgctagagacaaagggaagaaccctcgaagagatacaatggtcgtttcgctgagcaccagcatcgtcaaaatgcgaaatggttcttcgagttttgtcgctttagatactcaaatcactcgatgaaggtcacacattctttctgttcataaaaggtcttgtacatgagattgcatacaccgttgttttaactttacaccaatagacttgtaaatgcttgtgcagtaactcttatattactttttcttcaacattgtaagatagaagattgttgccaaaataaaatctgaaccttgggtccaatattccatgtaaacacgagcatgtttcctgatcaatcaaaatatcaagcatatttgttgaagtctgcctgcttttgacgtttttccagtttaaaaaggtcctcccgccttcatgcagtgttgtaacatcaatcaactctactaactgtctccactctttgtttttgttgaggaatgtattatatgacattaatcatttttcagttgaaccatataagctttctttcaggctcgactatgttgcttacatgatccatttaactgtctttggatttttttggggtaactccaatatctcacatgaggttctttctgatagctgttacttaatctgtgttgatctatgtaaatgtggcaacacttggcagtttcatgcttttactaatggagaaatccagatgttggaggaagtggctgaggagtga

SEQ ID NO: 30769 - DNA, 2117 bp, Zea Mays
taagcaaatacggcttcccaaacgcaggcccacaatgcagggactcgtagcgcaacagctagacgccgcagcttcctccccgggccccggcctccctccctggctgcgatccgtgatcgatagcaatgggaaaggaactgcctctgccttgcctctataaatacgccgcccgtcgcagaaccgaaaccgcagccgtgacggattccagccgaaccccctcgcagtggcagccccctcacgccccgcgacatgggcaagatcaggatgcccgtgccgttcctgttccgccgccgctcctccaagccgccgccgccgcagccgcagcagcaggcgcctgccgcgggcgacggcgacggcagcgggtccccggagcgggcgacggcggaggaggagatggcgcgcgtgttccgcaagttcgacgcgaacggcgacgggcggatctcgcggtcggagctggcggcgctgttcgagagcctgggccacggcgcgtcggacgacgaggtggcgcgcatgatggccgaggcggacgcggacggcgacggcttcatcagcctgcccgagttcgcggccctcaacgccacggtggccggcgacgcggccgccgtcgaggaggacctgcgccacgccttccgcgtcttcgacgccgacggcagcggcgccatctccgccgccgagctcgcgcgcgtcctccgcagcctcggcgagcccgcctccgtcgcgcagtgccgccgcatgatcgagggcgtcgaccagaacggcgacggcctcatctccttcgacgagttcaaggtcatgatggccaggggaggagcatgcttcgcaaagatcgcctaggaatattcttgcgaaggtggggaggagcttgaggaattgtcctgattgcgtacctatcaatcattggcatcatcagggcgcgatgggagctcgaatctcttcattagtttatatctactggttggaattggaagcagaacatgcggaggccttgggttgcatctgtctgctccagtatactagtagaagatacgtacgtacacctgtcataggaaatcctgtcacaggttgcgtagtattactactaaatagttgtatgttttggtagggatacttaattctagtccttagagaactgtttagcgcggctcatgggatggatgacagacagaaacagctgatgactagcgttggctgcttggctccaatccaaggaagcgtgcgtcagccactcacatgtgtgctcgtggtttacgcggtgagtatctgtgctgtgccacctggatccaatttggcaccgtgcattgcatccgattccgaaccaactctcgtcaagttcggcatcatcaattcatcatcatctctacgaacaaatatgtggctcgcgtgcctccgagttgcggtgtgttgacgcttgacgggtaccatccgcatcgttgttgacgatgccagttgggccaacaacggaagggctgatgcgcagcctgccgctgagcccagcccaaatgtacaacacggaccgggggaatggacagagatgggctgcaattagaggtgataatggatcacgattcacaaattgtttgagctattaactagttttagtttaaaaataaatagaaatcttagctcatacatcactccaccaaaacatcagtgctataagactagctcatacatcactcgtgctataagactagctccaccaaggagctctaaagggtcctgtaccctaaatttagaggacgaggtcctctactccctccaacagtgtagtctaaacggtcctctaaatttagaggacgttgttggatcctctatatataaagtttctataaacggttctctatttatttgaatactttaaacaatcggtttagtaaaactaaaatatgtacaatacatttggtagtatgacaaatacgtatgtataaaaattaaaaattaaaaaatgtctttgatataggtatttacatatagaggacgttatttagagggcattgttggagagaaaatagatataggagatagaatcttttagaaaagactgtaaaaaacggatatagatgatgtatacagaggatgttgctggagatagtgtaagaaccttaccttgtgtactg

SEQ ID NO: 30770 - DNA, 1559 bp, Zea Mays
gccggcggcgcgggagcctccgcggcagcggcgccgggcgccgtcatacccgtcaactccgtcagctacgaggtgttcctgctgctgctgcagttcctctacagcggccaggtgtccctggtgccgcagaagggggatccccggccgggctgcggcgagcgcgcgtgctggcacacgcactgcgccgccgccgtcgacctcgcgctcgacacgctcgccgccgcacgctccttcggggtcgaggagctcgcgctgctcacccagctggccggcatggtggagaaggcgtcgatcgaggacgtgatgaaggtgctgatggcgtcgcggaagcaggacctgcaccagctgtggaccacgtgctcccacctcgtggccaagtccgggctcccccctgaggtgctggacaagcacctccccatcgacgtggtggccaagatcgtggagctccgcctcaagtcctcgatgtcccgccgctcgccgttcctcgcgcaccaccacccgcaccaccacccggcggcgggcggcatggaggcctcgtccgcggccgacatcgacgagcaccacaagatccgccgcatgcgccgcgcgctcgactcctccgacgtggagctggtgaagctgatggtgatgggcgaagggctgaacctggacgaggcgctcgcgctgcactacgccgtggagaactgcagccgggaggtggtgaaggcgctgctggagctcggcgccgccgacgtgaaccacccggccggccccgccgggaagacgccgctgcacgtcgccgccgagatggtgtgcccggacatggtcgccgtgctgctagaccaccacgccgaccccaacgtgcgcaccgtggagggcgtgacgccgctggacatcctccgcacgctcacctccgacttcctgttcaagggcgccgtgccggggctggcgcacgtggagcccaacaagctccggctctgcctcgagctggtgcagtcggcggccatggtcatgtcccgcgaggacgcgcacacggcggtcaaccccgcggccgcgcccatgtacggcgagccttccggaggcggcgccgtgtacagcgcgagcggcaccagctcgagcatggtgaacctcagcctggacaacaggatggtgtatctgaacctagggatggacgcgcagttcggcaagatggacgacggcggcgacggtgatgacggcgggggcagagggcaagggggcccgccttctttgttctccccgcatggctaccattgacacaagctggccggagcggctgctgctctacgactatctctccttgtaagctttagaactaattaattacatgttgttattcatatccacattacaggagatgatgatgatggtgagataatccgtttggccctctatcatcctctgagccttttaattagcagagccgattagagagagatcacgcaaatgcatgcatgcagagtgatgcatcgtcatcacaagagtatgcatggatcttggtgagttgcctactccagttgttgtagcatgcggcgccgggggggcgttgtctgggacatttt

SEQ ID NO: 30771 - DNA, 732 bp, Zea Mays
cgcgaattgcagcttgcaggcaaggcagccccgtcccgtcccggtgtggctataagcctatacgtaccccatcatcgatcgccgagcgtgcgtgctctagctctagcaatagcagcgaggagacggtcgaggatggatcagaacaacagcaacaggcagcagcagcaggcgccgccgccaccacccgcgggctacccgacggcaggcgcggagcagcagggaggcagcggcaggaagcagggacgccgggggaagacgacctcgcgcggggagaagggcttcatcgaaggatgcatcgcggcgctctgctgctgctggatctgcgagatgtgctgcgactaggcagcccccccttccctccgccgccaggctttgagcctttgacaggaacggagagatctgctccacccatagctgcagttgtggctgcacgtacttgttgagctgttgtgttgtgtccatctcggtactttttgatttgttattagtagtagctgtgatgacgatgcatgggctgctctgtcttctgcagctctagcattacactcactactacgtgtgcgtgttgtaccgttttgtattgagtggtgacttgaaggtggcgctggtgatttgtactaccttctatatatgcatactccttggtacgcaaaataacaaaagtgacgaaagctagcgcagagaaatgcaaatgggcttgggccgtatcggcatactgggccgtgagtttct

SEQ ID NO: 30772 - DNA, 3045 bp, Zea Mays
agagtcagagacgcgttgcagcgaatggcacatcgcccaatccgccgtatcttactcgcgatcgcgacctgctaccgtcacatgaatcctacctggactaataaaactgatatacacgtcttgctccgccgcgcccatggacgacgacttgaccgcttcgccgtgcccaccgcccgcttactccactctccacactccctcgcttcctccgctcggttccatcccttcccaccccacaaaagcccccaccgccgtcgccgcaccgggccacgcgatggcgatggcgagggcggcggtggacgtggaggacctgctggtgcgcgtcaagaccggcgcggaggcggacctcgccgccgcggcgcgggaggtggccgcgctggcagcgaacggcaggctcggagaggacgacgacgaggatggcctcctcgtcgcggcgctgctcgcgcgcctcgcagccgccgccgccaccgccgacgccagggtcagcgtcatggccgcgctcaggcgcctcgcgggctgcgtcgccggcgagagcaaggagaggctggccagcaccgaggcgctgtccagcatcgtccgctccctgtccagggacgcggacgagaggagggaggccatcgcggtgctgctggacctgtcggacatcccgcaggtccgccagaggatcggcaggatcaaaggctgtgtcgtcatgctggtcaccttgaggaacgcgcacgagccaggcaccggggatgacgccgataagttgctcgccattctgtcgtccaacccgcagaacgtgctgttgatggcggaggctggttacttccgcccgttgatacagtacctcaaacaaggtaattatcatctgccatactatgtctcaaaatgaaagaaaaataaatgttttctccgaatctcgaagcccttttttaacaacacaagtatctgcaatgagccattacaattttacccaatgttattaaaaagttcagaaacttcaactcttataagaacaacagcctctcggagaaaatggaagagaaattgcaagtaaaacgatgcgagaggagtaagaattttggttccatcacttctgcacaccacttcacctatttcttatccgtcaggctacaatattctgggaaagaataattcactagattaactccagcctataaaaaaattgggaattcaatgtagaatgcaattttctccactctatctaaccataccatcacctaataagcttccgccctcctgtttcgtttgcaggttcagacatgaacaaggtcctcatggcaacggccatctcgaaaatgttcctatctgaacatatgaaatcttccctcggcgaggatggagctattgaaccgctcgtggacatgtttaaacatggaaaccttgaagccaagcactcggccttaggcgccttgtgtaatctctctagctctctacagaatgcagaactcctgataaattctggcataacaggaccgctgctccagctccttttctccgtgacgtcagcactcatggccctcagagagccggcctcggctatactcgcagctatagcacaatctgagcgtattctacttcataaggatgtagcgcctcagatgctctcgcttcttaatttatcgagtccggtgattcaacttcatctcctgagggccttgaacagcatttccgggcacgcgaatgctaaaagagccaggagtaaaatcaggcaaaatggaggagtgcagctgcttctacctttcctgacagaaaagaatgtgggtatcaaaatcgccgcgttgcacttaatgttccatttgtcgaaagactcttctcaagaattggctgagcagttcagggagacccatctggatatttttgtgaagatcatctcttcccctacttctcgagacgagaaggctgcagctgtcggtatcctgagcaacctcccagcgacagacaagaaggcaactgagattctgatgcgggcaaacttgctccctattctgatcaccttgtttgaggcaaacatggccgctgccgtgacacctcaaagaatgtggttgcttgagggcatcgctggtgtgtttatccggttcacagtcacctgggacaggaagctgcagagttcagcagttggacacggggtggttccttgccttgtgaagttgctttcagaaggatcggtggacgccaagtctaaagcggcaacatccttggcccaactgtcacagagcacgatggcgctgcgcaagtcaaaaacgccaaggtggctctgcgttcctccatcggccgaatcctactgtacagtccacagctgccagtgcacagtcaaaagcaccttctgcttagtaaaagccggcgccgtccatcctctggtccagacactggaaggcgaagagcgcggagctgatggagcggcgctggaagcgttgggcacccttatggaggacgaggtctgggagaacgggagcagggtgatagaaagggcgtcaggcatccatgctctgctgaggatcgccgaagccggagagccgagctcccaggacaaggcgatatggatgctggagaggatgttccggctcgaagcccacagggagcggtacggcgagatcgcgcaggctctgctcatcgatctcgcccagaaaggagaccctgccctgaaaccgatgatcggcaagatactggctcaccttgagctgctgcaaacacaatctagctacttttaagcgtgctggcgggcgtcgctgcagataccagatcgccagatttgtgggccgtgaagtgtgcatacctgtagctttaggagccatagcaaactgtgctgatatttggcgttggtaagttcaaatctgaactgaccatgcccaactattaaagggcacatggatcgttatttttcttgtaagtagatacagcgagttttgctccaaagaggaagaagatgcagactgtaatgaagtgtaaagtgatgatagtggttatagataagatggagtactgtgtatacaaacaaattgccatctccacagcaaactcgttcaacagattcgcctgtga

SEQ ID NO: 30773 - DNA, 1323 bp, Zea Mays
agtggcccacgaacacccccagctcctcctcccagtcccactggcccgagcgcgaccccacgttggataagccaagtagagtatcgtggcaggctacacgtgtcctacgaaaatctgccaaatccgggcggtgactggcagccagcgggccagctttgcatcgcagccaggccaggccaggcccaggcggaccgtcgccgtcgtccgtccagtgaagcttttactataaagcccctgctagaccgctagaaaccacacgtccgcccctgccagtttgcgttcgccacccgtccaaaaccccccaaccaaagcccgctccggcagcccccaccccaccatcgcgtcaatggcggcgccgcctgtccagcctgtgccaaccgcggcggcggcggcggcggctgtgaacggggacgcgttccgtctgggcttcgtcggcgcgggcaacctggccgagagcatcgcccgcggcgtggcggcgtcgggcgtcctcccggcctccgccatccgcaccgcgccccaccgccgccccgagcgcggcgaggccttcgcgtccttcggcgcgtgcttgctccaaaccaatgcccatgttgtggacgacagcgatgtgatcgtcatctccgtgaagcctcagatcgtgaagcaagttctacttcagctgaggccacggctgtcagaaaaaaagcttctcgtgtccattgctgccggcatcaagatgcaagatttgcaggattggtctggtcaacgacgtattattagagtaatgcccaacaccccttcagctgttggacaagctgcatcagtcatgtgtttgggagagatggctactcaggatgatgaaaaccgtgtaagaaaactgttcagtgccattggaaaagtctggacagctgaagagaaatattttgatgctgtaactggtctgaggttcttggtgctgcaactatggtgagccagacaggcaaacatccagggcaactgaaagatcaggttacttctccagcaggtactaccattgccgggattcaggagctcgagaagggcgcattccgtggaacgctgattagtgctgttgttgctgccgcaaagcgctgccgcgaactgtcatagagttcgaaacaaggctgcattttgttgatatacatgcgttggtatgcaaggtgcaaatcttctggaatagtagactaataatgtactgggtggcttcagaatcatgtgatatgataagtacatgctcccttctaaagcttggtgtcaccattatatggtcaaacggcaagccttaacaataaatccaaaaattggggcagatgcgatttttgtttctag

SEQ ID NO: 30774 - DNA, 456 bp, Zea Mays
agatggtcaccacgacggtgacaccataagccaccaaagttcagttggcccgcaactggttccagtccagagtatttttcatccgtcaccccagataagaggtatcgccaccctacaacattgccaatctggacatgagcttagatgtctcaaaaaaaagtattttgtaagacacagtactgtagcactgcaacacaaagggcatggaatttgttccgaacatgaggaactgttgtgacctgtatatttaaacggaaacaaaaaaaactaggcagaggacttacaagtatagagtatgcctttgccagtaacaaaggggttggatagagctctacaacagcttgtgcagcttcttctgttacttgtggtacctgcacatcgtatttatattcatttgcgatacatttgcaatcaaactgcggcatcgaatgaatcgagttacctgcataagctgac

SEQ ID NO: 30775 - DNA, 4563 bp, Zea Mays
ctcgcttctctcttctctcttctctctcagccgagctccctctctccgcgattggcgacgactgaggagcgggcagaattcaaaaaaaaaaaaaaaaaagagtgggcgaccgccgccgccgcccaacgccaggtgcccgggccgctttcgccagcaacgagcacccaccagattattgcgcctgctgggtacgagatggggatagaggattaccatgtcatcgacctcgtcggggagggctccttcggcaaggtttacaagggcaggcgcaagtacactcggcagacggtcgccatgaagttcattcttaagcacgggaagaccgataaggatatccacaaccttaggcaggagattgagatcctaaggaaactcaaacatgagaacataattgaaatgatcgatgcctttgaaacccctcaggagttttgtgttgtcacagagtttgctcagggagaactgtttgaggtgctcgaggatgataaatgccttccagaagaacaagttcaggcaattgctaagcagctggtgaaagcattgtattacttgcattccaatagaattattcaccgggatatgaaacctcagaacatccttatcgggaaaggatctattgtaaagctttgtgacttcgggtttgctcgtgctatgtcagctaacactgttgtattacgctccattaaagggacacctttatatatggctccagaactggtgagggaacagccatataaccatacagcagatttatggtcccttggggtcattttatatgaattgtttgttggacagccccccttttatacaaattcggtctatgcacttatccggcacattgtcaaggatcctgtaaaatatccagataatatgagcacaaactttaagagcttcctgaagggtttactcaacaaggtgcctcaaagtagattaacctggccagcattgttggagcacccatttgtcaaagatgattcaatgggatcggcagctgagtctcgacccgcgccttttgaagctagagggtctgaagatactcagaaagcagaagaaacacaatcaaggaaccaaccttccccagccggcccccaaagtaggattactgctaccaatagggaaaatgcttctgataaaccaaaaggaaacagaaaactggatgaccctatgcaagcaactcaggaccgccatggttcacctactggtgctgttgctgaaagctgctctccctcagagtgtacggctttggataaactggaaaaagcctcacaaacagtagaaggtgcaagcagcattgttcaagatattgaagcactgtcaaccattctcacccctatcaaaatttggcttactaatactccaagttcaaccagggaactcaacattgatggagcaaatcagtcgctcagaattattaaaaatttgattgatgctggttcatgccaatcttatgctgcaattgatataagtctgcttcttgagtttacaaatctcattatcaaaactaagctttcaaatgcttatggacttgtggtgaagtgcctggcaattgcacggaaactacttgatacaagtgatgaagttattttaaattcttatgacagacactggttatccctatatgaactttattcacagatcctggtttctacagtggattcatctggaagaatatctcgtgagtcaactgcctgccttgctttgatgttatctcgggttatctctggcttgaaagctagcatgtcatctgaagacccaaagccagtggaagaaagtcttctcaagatcattgatcatgcgaggacatcacaactactagagctcttgtgtgaatgtctgatggcttcaggttcagacacactatctggttctacgaacatggtacctgctgcttgtgaggcatgcaaggctatttggtacctagctcatgctgttgacattatgtccattggtgcacaccatttttcatttcccttagctaattcatggcgacagatacattcaatgcaagagcaaagttcaaaggcagattcaaactctaccaatctgattaacatatttgtcaaatcatttctcgcctcacgaccaattcaggttgcagtttaccactgcttgcataatggtctagaatcagctattcatgcttgtcttcaggaatccaggcagaatagcaatcagaaatgcaaactatccaaccctcatgctcttgtagtgcactgctgccttgcactagcgacaatagctgcatgtttgaaatcagagggaggatcttcagcatcacttgtcctaacaagttcccagaaaaaacagcggtcccggctctcagttcttgcacacctctcatcagttgatgatacagtgaagagttgcctgcagccacactgtgcatcagcaatgcttgcgctctcatcacttgtttctcttgaaaatggtggacaaaccagatcgtctctttgtgaaactgcccttgctttgtttcctcgtatggcaacactgcacacactgctgaagctttggttatctgatggaagcgaggcactgtgtcgatataatgctggtcttctgaatctttttggactccgcgatggaagtattggactgctggagacaaggttgaaatggggcggaccattggccattgaacaagcctgctcagttggcatcccacagctcctaattcgcttgcttactgatggtttcataaaagaggtttctgacggaaaagatggttcgacgagccgcagtgggttgtctccattgggagttgtctggactctttctgctttatctcaatgccttcctggtggagtttttcgtgaaattttgtacagaagggaacagttaaagctcttaaccgacttgttgtctgatacacatcttaaggcattggccgcctggacgggtcttggtggtgggaagaggggagttcgggaactgataaactcagtcgttgatatcttggcatttccatttgttgcagtgcagagttctccaaacatgccgtcagcatctgcatccatcaatagtggtttcctgcttaatgttgcatcacccggtgggcgcattggtactgagaataaggaaatgctcaaaactatagagcaaaacatgcctcagtacattcaagttctactagaggtctgattagttggctctaccttttcttgcctatcagtggacatttctgtgatttctctctcctcgtacaggttggaattcctggatgtatgctgcgttgtcttgactatgttgacatggaagatctaggtaggcccttggccattgtggccaaaatggcaggctacaggccacttgctttgcagcttcataaagaaggtcttctagatccaagtagagtagcagcattactcgagggtcctatagcaaaggagactttgcttgatttcctcatgattatttctgaccttgctcgcatgtcgaaggacttttatgtgcccattgataaagctggacttgttgttcttctgaagaacttcttatcaaatggagaccctgatataagggcaaaagcttgtagtgccattggcaacatgtgccgccatagctcctacttttatggcccacttgcagcaaataaggtgatccagctcgtggttgacaggtgttctgatcctgacaagcgcacacgaaagtttgcatgttttgccgttggcaatgctgcttatcataatgatatgctgtatgaagaattgagacggtccatacctcaactcaccactttacttcttggtcctgaggaggataaaaccaaaggcaacgctgcaggcgcgctcagtaatctagtgaggaactcagacatgctttgcgaagacattgtctcccaaggcgcaattcaggcgctgctgaagatggtcggcagttactctactgttgccctgagccccagcagacgagatgctctaaccgaatctccgctaagaatcgtgctcttcgccctgcgcaagatgtgcgaccacgccatctgcaggaacttcctacggtcttcggagctgctccccgtcatcgtccacctccggcagtcacctgatccaacgatctccgagtatgcttctgccatcgcgaccagagtgagccaggcctgagtgcctgacgtttctctggacaggcgcagcttaaggtgtgccaccctgggctgggcatgatcatgccacagcggcccaaatctacgatccatctgcagctgtaatgtagtgtatggtttacggatcaagcaagcttagcttgtgcatatgcataagacttctgaaaaaagagcgattccattcgctgtctgtacatacgctgatacgcaccaccagaactgaagctacatgtcatgtgtgttgatgtatgtatatgctgctagggtcgtggccatcgaatagattcatattttgcacggatgttagcactgtatcgtttttttttggctaccaacaaatacgatgatgtagcagaagcagcgttatcgtggagacatcggacgaccatgctatactgattaagtgcacgtttggatcacatgaattaaagcaaaataactaaagatttaaacaggaagagctaaaa

SEQ ID NO: 30776 - DNA, 4721 bp, Zea Mays
ctcgcttctctcttctctcttctctctcagccgagctccctctctccgcgattggcgacgactgaggagcgggcagaattcaaaaaaaaaaaaaaaaaagagtgggcgaccgccgccgccgcccaacgccaggtgcccgggccgctttcgccagcaacgagcacccaccagattattgcgcctgctgggtacgagatggggatagaggattaccatgtcatcgacctcgtcggggagggctccttcggcaaggtttacaagggcaggcgcaagtacactcggcagacggtcgccatgaagttcattcttaagcacgggaagaccgataaggatatccacaaccttaggcaggagattgagatcctaaggaaactcaaacatgagaacataattgaaatgatcgatgcctttgaaacccctcaggagttttgtgttgtcacagagtttgctcagggagaactgtttgaggtgctcgaggatgataaatgccttccagaagaacaagttcaggcaattgctaagcagctggtgaaagcattgtattacttgcattccaatagaattattcaccgggatatgaaacctcagaacatccttatcgggaaaggatctattgtaaagctttgtgacttcgggtttgctcgtgctatgtcagctaacactgttgtattacgctccattaaagggacacctttatatatggctccagaactggtgagggaacagccatataaccatacagcagatttatggtcccttggggtcattttatatgaattgtttgttggacagccccccttttatacaaattcggtctatgcacttatccggcacattgtcaaggatcctgtaaaatatccagataatatgagcacaaactttaagagcttcctgaagggtttactcaacaaggtgcctcaaagtagattaacctggccagcattgttggagcacccatttgtcaaagatgattcaatgggatcggcagctgagtctcgacccgcgccttttgaagctagagggtctgaagatactcagaaagcagaagaaacacaatcaaggaaccaaccttccccagccggcccccaaagattactgctaccaatagggaaaatgcttctgataaaccaaaaggaaacagaaaactggatgaccctatgcaagcaactcaggaccgccatggttcacctactggtgctgttgctgaaagctgctctccctcagagtgtacggctttggataaactggaaaaagcctcacaaacagtagaaggtgcaagcagcattgttcaagatattgaagcactgtcaaccattctcacccctatcaaaatttggcttactaatactccaagttcaaccagggaactcaacattgatggagcaaatcagtcgctcagaattattaaaaatttgattgatgctggttcatgccaatcttatgctgcaattgatataagtctgcttcttgagtttacaaatctcattatcaaaactaagctttcaaatgcttatggacttgtggtgaagtgcctggcaattgcacggaaactacttgatacaagtgatgaagttattttaaattcttatgacagacactggttatccctatatgaactttattcacagatcctggtttctacagtggattcatctggaagaatatctcgtgagtcaactgcctgccttgctttgatgttatctcgggttatctctggcttgaaagctagcatgtcatctgaagacccaaagccagtggaagaaagtcttctcaagatcattgatcatgcgaggacatcacaactactagagctcttgtgtgaatgtctgatggcttcaggttcagacacactatctggttctacgaacatggtacctgctgcttgtgaggcatgcaaggctatttggtacctagctcatgctgttgacattatgtccattggtgcacaccatttttcatttcccttagctaattcatggcgacagatacattcaatgcaagagcaaagttcaaaggcagattcaaactctaccaatctgattaacatatttgtcaaatcatttctcgcctcacgaccaattcaggttgcagtttaccactgcttgcataatggtctagaatcagctattcatgcttgtcttcagcttatctcaagggcctgtcttcagaatgtgactttctgtgccattatgtgtcgtccatggaattcaccatctgatgttgacgtagtagaatatggtggagatggaacaatagtatctgacatgttttccttattgtcactgtgtggatcatatttaaataaggaatccaggcagaatagcaatcagaaatgcaaactatccaaccctcatgctcttgtagtgcactgctgccttgcactagcgacaatagctgcatgtttgaaatcagagggaggatcttcagcatcacttgtcctaacaagttcccagaaaaaacagcggtcccggctctcagttcttgcacacctctcatcagttgatgatacagtgaagagttgcctgcagccacactgtgcatcagcaatgcttgcgctctcatcacttgtttctcttgaaaatggtggacaaaccagatcgtctctttgtgaaactgcccttgctttgtttcctcgtatggcaacactgcacacactgctgaagctttggttatctgatggaagcgaggcactgtgtcgatataatgctggtcttctgaatctttttggactccgcgatggaagtattggactgctggagacaaggttgaaatggggcggaccattggccattgaacaagcctgctcagttggcatcccacagctcctaattcgcttgcttactgatggtttcataaaagaggtttctgacggaaaagatggttcgacgagccgcagtgggttgtctccattgggagttgtctggactctttctgctttatctcaatgccttcctggtggagtttttcgtgaaattttgtacagaagggaacagttaaagctcttaaccgacttgttgtctgatacacatcttaaggcattggccgcctggacgggtcttggtggtgggaagaggggagttcgggaactgataaactcagtcgttgatatcttggcatttccatttgttgcagtgcagagttctccaaacatgccgtcagcatctgcatccatcaatagtggtttcctgcttaatgttgcatcacccggtgggcgcattggtactgagaataaggaaatgctcaaaactatagagcaaaacatgcctcagtacattcaagttctactagaggtctgattagttggctctaccttttcttgcctatcagtggacatttctgtgatttctctctcctcgtacaggttggaattcctggatgtatgctgcgttgtcttgactatgttgacatggaagatctaggtaggcccttggccattgtggccaaaatggcaggctacaggccacttgctttgcagcttcataaagaaggtcttctagatccaagtagagtagcagcattactcgagggtcctatagcaaaggagactttgcttgatttcctcatgattatttctgaccttgctcgcatgtcgaaggacttttatgtgcccattgataaagctggacttgttgttcttctgaagaacttcttatcaaatggagaccctgatataagggcaaaagcttgtagtgccattggcaacatgtgccgccatagctcctacttttatggcccacttgcagcaaataaggtgatccagctcgtggttgacaggtgttctgatcctgacaagcgcacacgaaagtttgcatgttttgccgttggcaatgctgcttatcataatgatatgctgtatgaagaattgagacggtccatacctcaactcaccactttacttcttggtcctgaggaggataaaaccaaaggcaacgctgcaggcgcgctcagtaatctagtgaggaactcagacatgctttgcgaagacattgtctcccaaggcgcaattcaggcgctgctgaagatggtcggcagttactctactgttgccctgagccccagcagacgagatgctctaaccgaatctccgctaagaatcgtgctcttcgccctgcgcaagatgtgcgaccacgccatctgcaggaacttcctacggtcttcggagctgctccccgtcatcgtccacctccggcagtcacctgatccaacgatctccgagtatgcttctgccatcgcgaccagagtgagccaggcctgagtgcctgacgtttctctggacaggcgcagcttaaggtgtgccaccctgggctgggcatgatcatgccacagcggcccaaatctacgatccatctgcagctgtaatgtagtgtatggtttacggatcaagcaagcttagcttgtgcatatgcataagacttctgaaaaaagagcgattccattcgctgtctgtacatacgctgatacgcaccaccagaactgaagctacatgtcatgtgtgttgatgtatgtatatgctgctagggtcgtggccatcgaatagattcatattttgcacggatgttagcactgtatcgtttttttttggctaccaacaaatacgatgatgtagcagaagcagcgttatcgtggagacatcggacgaccatgctatactgattaagtgcacgtttggatcacatgaattaaagcaaaataactaaagatttaaacaggaagagctaaaa

SEQ ID NO: 30777 - DNA, 1578 bp, Zea Mays
caaagctattgcccagccctggagtctgacgacctcgtttccctgctgtctcgcctctctttcggttctcacggcgacgactgggcgagcgccgcctcccctccctcgctccgtgaggtcctcgccggcgacgagtgccgccgcccgtttccatgttttttccgccgattagtgtccaccagatctagtgaaggctggtaacttgacgcaaggggaatatagacacagaattttttgaacattgatctgtagccagtgctgcaatggctacaaagcttgtggttctcggtatcccctgggatgttgacactgaagggttacgagagtacatggccaagtttggacccctagatgattgtgtcgtcatgaaggagcggtcttctgggcgatctcgtgggtttggctatgtaacattcgcatcagccgacgatgcaaagaatgttcttgattgcgagcatgttcttgggagccgtacattagaagtgaagatagctactccaaaggaagaaatgaaatcacaaggaacaaagaaagctacaaggatatttgttgctcgaattccacagtcagtggacgagtcgatgtttcgtaggcattttgaagcttttggagaaattcttgatctttacatgccaaagagtctgtggacagcatcatgcaagagtcacatgagcttgatggcacaacagtagttgttgatcgcgcgactccgaaggaggaagatgtaagataccccccgagtagaccatctcagggtggctatggtgcatataacgcttacatttcagctgctaccaggtatgcaactttgggtgcaccaacactgtatgatcatcctggatcagcctatggaagagggtactatggatcctctcaagcagtgggcaagaagatatttgttggtagacttccacaagaagcaaacacggatgacctaagacattactttggcagatttggtcgaatcgtagatgcgtatattccaaaggaccccaaaagaagtggccaccgaggttttgggtttgtcaccttcgctgatgagggtgtggcagaacgggtatctcgtagaagccatgaaattctgggccatgaggttgcaatagacacagctgcaccacttgagaatgattcagctggtggtggttacattgatcccatggacctttacggagcttatggttcaatgagatcttttggcaggttctgcggtggtctagattataattacggctatggccccagcagcggaagcagcagatcaaggtcggattggcgataccgaccttactgaacgtgttttagtttacctctagggaaggaaactgaggagatggagaaaagaattacctgtctaagaatgctaagtgaggggggtaccttacgcgtggaatctatcattttgtttcatgttgtgattttggatttgtcgtgattcacattattgacaagatgaaggcagtccttgtagttactgtatggaagtgctgtatgtgtaataaaaaagtatcatttgcgaaaaaagttataacgccatcagacgaggtgcctgcacgtttatatacactcgctctgttccag

SEQ ID NO: 30778 - DNA, 1633 bp, Zea Mays
caaagctattgcccagccctggagtctgacgacctcgtttccctgctgtctcgcctctctttcggttctcacggcgacgactgggcgagcgccgcctcccctccctcgctccgtgaggtcctcgccggcgacgagtgccgccgcccgtttccatgttttttccgccgattagtgtccaccagatctagtgaaggctggtaacttgacgcaaggggaatatagacacagaattttttgaacattgatctgtagccagtgctgcaatggctacaaagcttgtggttctcggtatcccctgggatgttgacactgaagggttacgagagtacatggccaagtttggacccctagatgattgtgtcgtcatgaaggagcggtcttctgggcgatctcgtgggtttggctatgtaacattcgcatcagccgacgatgcaaagaatgttcttgattgcgagcatgttcttgggagccgtacattagaagtgaagatagctactccaaaggaagaaatgaaatcacaaggaacaaagaaagctacaaggatatttgttgctcgaattccacagtcagtggacgagtcgatgtttcgtaggcattttgaagcttttggagaaattcttgatctttacatgccaaaggaacatggttcaaaggggcatcgtggaattgggtttatcacgtttcagagtgcagagtctgtggacagcatcatgcaagagtcacatgagcttgatggcacaacagtagttgttgatcgcgcgactccgaaggaggaagatgtaagataccccccgagtagaccatctcagggtggctatggtgcatataacgcttacatttcagctgctaccaggtatgcaactttgggtgcaccaacactgtatgatcatcctggatcagcctatggaagagggtactatggatcctctcaagcagtgggcaagaagatatttgttggtagacttccacaagaagcaaacacggatgacctaagacattactttggcagatttggtcgaatcgtagatgcgtatattccaaaggaccccaaaagaagtggccaccgaggttttgggtttgtcaccttcgctgatgagggtgtggcagaacgggtatctcgtagaagccatgaaattctgggccatgaggttgcaatagacacagctgcaccacttgagaatgattcagctggtggtggttacattgatcccatggacctttacggagcttatggttcaatgagatcttttggcaggttctgcggtggtctagattataattacggctatggccccagcagcggaagcagcagatcaaggtcggattggcgataccgaccttactgaacgtgttttagtttacctctagggaaggaaactgaggagatggagaaaagaattacctgtctaagaatgctaagtgaggggggtaccttacgcgtggaatctatcattttgtttcatgttgtgattttggatttgtcgtgattcacattattgacaagatgaaggcagtccttgtagttactgtatggaagtgctgtatgtgtaataaaaaagtatcatttgcgaaaaaagttataacgccatcagacgaggtgcctgcacgtttatatacactcgctctgttccag

SEQ ID NO: 30779 - DNA, 1730 bp, Zea Mays
cttctgctctgcagcacgcaccagaccgcacgagcatgtctgcccgccgctcctccgccggcagcgacgacagagaccaagcccggctgcagcagctgggatacaagcaggagctgaagcgcggtctctccgtcgtctccaacttcgccttctccttctccatgatctccgtgctggcgggcgtgacgacgacctacaacaccgggctgcgctacggcgggccggcgtccatgacgctgggctggctcgtcgtggcgctcttcaacggctgcgtggcgctgtccatggcggagatctgctcggcttacccgaccaccggcggcctctactactggagcgccaagctcgccggcaaggactggggtccactcgcctgctggatcaccggatggtttaacatcgtgggccagtgggcttgcaccacgagcgtggacttctcgctggcgcagttcgtccaagtcatcgtcctgctcgccaccgggggagccaacggcggcggttatctggcctccaaatacgtcgtgctcgccatctactgtgccatcctcgtcctgcacgggctcatcaatagcctccctatccattggctggccttcttcggccagcttggagctttctggaatcttggaggtgtgtttgtcctgacggtgttgattccggttgtcgctaaggagagggcgagcatggagttcatgttcacccactgctacacagacgatgccgtggggatccacagcaaggtctacgtactcgccattggtttgctgacgagccaatactctctcctgggatacgacacttccgcccacatgtcagaggagacgaagaacgcggagtggagtggcccgatggggatcgtcgtctcggtcgcgctgtcgagcgtcttcggatggatctacctagtggccctgacatcggcggtgaccgccgacgacgtcccgtccctcctggaccctaccaacgacgccggcgggaacgccatcgcgcaggccctgtacgccaccttccgccggaggttcggcagcggcgccggcggcgtcctgtgcctggcggccatggccgtcgccatattcctctgcggcgtcgcgtccgtgaccagcaactcgaggatggggtacgccttctccagggatggagccatgccgctgtcgcaggtgtggtaccgtgtcaacaagcaggaggtgccgttcaacgtcgtctggctctccgtctcggtggcattcgtcatggcactcacgtcgctggggagccaggtggcgttccaggcaatggtgtccatcacgacgctgggcatgtacatcgcctacgccctgcccatcttcttccgcgtcacggcggcgcggaactccttcgtcccggggccgtttcatctcggacgccgctgcagcctcgtcgtcggctgggtcgccgtcctctgggtggccctcgtcaccgtgctcttctgcttgccggtagcgtaccccgtcgccggggtcaacttcaactacacgccggtggccgtcggtggcgtgctggtgctcagcctcggcgcctgggtgctccacgcgcgcttctggttccgaggccccgtcaccaccattgacgcgtgacatgcccatggtcgatcggccctcacactaatacaaaatagctcaaagcatgtggtggaatttaattttcataggcggttttagttatcaaacatcattgttattgttaatggttatttcttaaaaaaccgccactaaaaa

SEQ ID NO: 30780 - DNA, 1631 bp, Zea Mays
ttaatttccaaacccaccagctctcagtgattcactttctctctgcgtagcgtcgtctccaacttcgccttctccttctccatgatctccgtgctggcgggcgtgacgacgacctacaacaccgggctgcgctacggcgggccggcgtccatgacgctgggctggctcgtcgtggcgctcttcaacggctgcgtggcgctgtccatggcggagatctgctcggcttacccgaccaccggcggcctctactactggagcgccaagctcgccggcaaggactggggtccactcgcctgctggatcaccggatgtgggcttgcaccacgagcgtggacttctcgctggcgcagttcgtccaagtcatcgtcctgctcgccaccgggggagccaacggcggcggttatctggcctccaaatacgtcgtgctcgccatctactgtgccatcctcgtcctgcacgggctcatcaatagcctccctatccattggctggccttcttcggccagcttggagctttctggaatcttggaggtgtgtttgtcctgacggtgttgattccggttgtcgctaaggagagggcgagcatggagttcatgttcacccactgctacacagacgatgccgtggggatccacagcaaggtctacgtactcgccattggtttgctgacgagccaatactctctcctgggatacgacacttccgcccacatgtcagaggagacgaagaacgcggagtggagtggcccgatggggatcgtcgtctcggtcgcgctgtcgagcgtcttcggatggatctacctagtggccctgacatcggcggtgaccgccgacgacgtcccgtccctcctggaccctaccaacgacgccggcgggaacgccatcgcgcaggccctgtacgccaccttccgccggaggttcggcagcggcgccggcggcgtcctgtgcctggcggccatggccgtcgccatattcctctgcggcgtcgcgtccgtgaccagcaactcgaggatggggtacgccttctccagggatggagccatgccgctgtcgcaggtgtggtaccgtgtcaacaagcaggaggtgccgttcaacgtcgtctggctctccgtctcggtggcattcgtcatggcactcacgtcgctggggagccaggtggcgttccaggcaatggtgtccatcacgacgctgggcatgtacatcgcctacgccctgcccatcttcttccgcgtcacggcggcgcggaactccttcgtcccggggccgtttcatctcggacgccgctgcagcctcgtcgtcggctgggtcgccgtcctctgggtggccctcgtcaccgtgctcttctgcttgccggtagcgtaccccgtcgccggggtcaacttcaactacacgccggtggccgtcggtggcgtgctggtgctcagcctcggcgcctgggtgctccacgcgcgcttctggttccgaggccccgtcaccaccattgacgcgtgacatgcccatggtcgatcggccctcacactaatacaaaatagctcaaagcatgtggtggaatttaattttcataggcggttttagttatcaaacatcattgttattgttaatggttatttcttaaaaaaccgccactaaaaa

SEQ ID NO: 30781 - DNA, 2141 bp, Zea Mays
gttggctcggtacatccgggctcttctgagcctggtcctcttactggaccaggctcaggctgggccagacaaccaaacacatcctacgtctcctcattcacattcatcctgtcggactgtagcgcgcacgccccggccggatcagagagatgggcaccgtcggcggcggcgagcttcccgtcgccgccccggccgccgccgacgcagaccgggcgcggctgcagcagctggggtacaagcaggagctcaagcgcggcctctccgttgtttccaacttcgccttctccttcgccatcatctccgtgctgacgggcgtgacgacgacctacaacaccgggctgcgctacggcgggccggcgtccatgacgctgggctggctcgtcgtggcgaccttcaacggctgcgtggcgctgtccatggcggagatctgctccgcctacccgacctccggcggcctctactactggagcgccaagctcgccggcaacgaatgggctccacttgcctcctgggtcaccggatggttcaacatcgtggggcaggtatacacaacattctccctccaacttcacaggatccaagaatcttcttctttctttgtttcctcctttttcttttcttttcttttttctttttgcaaaaagaggatcaataaccttcatctgcagatgcagctgcagtgcagtcataagcgtactagtgtcatgtcatctcatcaggactctgattgatcaaatcgccgtacgtgcacccgcagtgggcgtgcaccacgagcgtggacttctcgctggcgcagctgatccaggtgatcatcctgctgagcaccggtggggccaacggcggcggctacctcgcctccaagtacgtcgtgcttgccatctacaccgccatcctcgtcgtgcacggcctcatcaacagcctgcacatccagtggctctcctggttcggacagctcggagccttgtggaacgtcgcgggcgtgttcgtcctcgtcatcctggtcccgtcggttgccaaggagagggcgagcgccgagttcgtcttcacccacctcaacaccgacaacggcatgggcatccacagcaaggcctacatcctcgccgtcgggctgctcatgagccagtactccagcattggctacgacacgtcggctcacatgacggaggagacgaagaaggcggactggagcgggccgatggggatcgtgtactcggtcgctctttccagcgtgttcgggtgggtttacctgctggctctcacgtcggtggtcactgacatcccgtacctgctggacaccggcaacgacgccggcgggtacgccattgctcaggccctgtacgacacattccgccggagatacggcaccggcgccggcggcatcgcctgcttagtcatcatcgccgtcgccgtcttcctctgcggcaccgcctgcgtcaccagcaactccaggatgggctacgccttctccagggacggggcgatgccgttctcgcacctttggtaccgggtgaacaagcaggaggtgcccttcaacgtcgtctggctctctgtgtccgtggcgttcgtcatggcactcacggtgtgcatgcatgcgatgcgaaagctctttcatctcctcagcttctcaactgctcgcactactcacatctgtgcacatgcagtcgctggggagccaggtggcgttccaggccatggtgtccatcgcgacgctgggtctctacatcgcctacgcgctgcccatcttcttccgcgtgacgacggcgaggaagtcgttcgtcccagggccatttcacctcgggagatgcggcatcgctgtcggctcggtggccgtgctatgggtggccctcgtcaccgtgctcttctgcctgccggtggcgtaccccgtcgccaaggacaccttcaactacacgccggtggccgtcggcggcgtgctggtgctcagcctcgtcgcgtgggtgctccacgcccggttctggtttcgtgggcctatcacaaacgtctgacgttgtttgcaggcttcggtagttactttcgatgcattttatgtagtgtcaatctgttttaatgtcattgaacataaacatgaatatgaatatactcctatacacaggtattgtggttggaactggaaaagcttagtt

SEQ ID NO: 30782 - DNA, 905 bp, Zea Mays
gcttaataatgcacgtgtgtcatattttgtatgtttcttgctctagttgattatgatattggagtgccgtagttattaatgtctatgtcgtattcaaacttacgttgtcttggttggacttgtgtggtcggtgatgcttttgtgtgataaatagaagaactaaggaaaagccatagcaagttaaataaatgtgtatacttgtgatgtcatagttgtgttgtgtaaatatacaaaatgtggtcgtcttgttaatggtgttaatgatgaacgccgataacatacgaatagctagcgcttgcgtatagtcgttgcgatgtcttacaattaaatgttagtttgctaccatgtatttatatagcttgtgatatttttcattgtattcatacatatgcatcctgcatctcatttaggaccgagaggtgacgaccgtgcaagtgatgtggtgccaaccacaagctgcagttggtggacgtacggaaggatggtggacttaaccagtggatgctcgccaagcgagtacctcccccagcaaacactatctaagtgtcaaactaaaggcaagccccggttttatgcataaccgttatatatgctattttactacacttaatgattgtaggcttgtattgtgcacttaagtgtaggagttggttgaaaccctagttgcatgaactcaggaatcctttttgtgatggatactagtatgctaggtcgagtagctgctttattaattaggatctcggtagaagtcgagtgatttttctagcactcgcgcgaggtcaggaaattgattgtatccactttcttctcataatgatgctggttgtggacaacaatccatggggattggttgtccacgggatgaaaatttgaataaggattaaggtgtggtaccgtgagtcaag

SEQ ID NO: 30783 - DNA, 2100 bp, Zea Mays
gtcgtttagtcataacaccattaccagacgcaaccaacgataaatccacgtgacataaatagatggagcccatgagagtatggcccagaaaataagaatgtgatcagagttgaagcagagattgttggaaaaagagcatcacataagaactttcttcaactcagagaattattttatgattaatacggagattatcaggtcagagattagtacgagatgagatacgagaatgaagcactcaagagatcatgattaatgagcttttagagacatcagaaaccaaagacaacagcaacatccattgaactaaatggatatactgtgtaaggataaaatttgataaaacaacgtcatgatcctcggagaaggagtatgagaatgatcagaaatgagagacttaggcagatcaacatccgatacctgagaacgggttatagcagataacatgataacggggcagaatcattaaagggtccagggattcggatgataaagccacaacatgattcacaaggaaagagatcaccagatccatgcaaaaggagaggtaggcaaacaggatcagccaggatgattaacagaaatgcgatgaagttttaggagcaaggatttacggaaagaaacatggcttggtcatggtttgcgcaactagacaccaaacgatgttttttttaccaaaccacgtgcacaaggaagtttcggtttggcaagcggttaagctatgggggtctacaagttgtgcaggtgcaatttcaatagtgcaacacacaagggctagaaaacgccaacacaagcaaatttttttttaaaaaaaaagagggttcacttgctaagctcaaggttgtgtgggcgggggtcttttcatgagcaaacaaacaacatttttttttgcaaaaagggttgaacaatttcaataccacttagatagcaaggcaagagaagcacataacacaacctagtcgagactatcatgacacacaggataagacattttttttgcagttcatggcaatacacacattattcacaagtttttattattggaataaaggtgagagaagcattttagtgcacaagagacaattatgcgacaatcatgatgcatgctcattctagtcgtcttctcagacctaactacttttcgggtgctttctatagcatccttattaatattagtagtagcctttatggcctatataaatatagccacctagctacccatctgtttcctaaggcttcacgtcctaggtctattctgatcgtcctgacgatctatccaacattggtttctagcaagtttcactttagaaaagttggtaatcatgacttattgacttctctgtactggtattcgctccgataccagctgtggcggaaccgcccgaattattccagcttaagtgcccaagtcgcacccttaagggcagcaacacacttaaacaggaataacccgtcagtccctcggatctagtccgataaagccacttaccaggatcaaataccactagctcactcgaaggtgaggcacagagaaatacaataaagcataataccacaaatttaataagtatcattagtgattacattatcggagtttcagaaataataatcataaattttaatgcagcggagataactaacggagaaaaccgagtaacatggcgaagcctggccacgctactcctcctggtcctctcctgcggaagcagtaacccactcgaccgtctatcccggtggcagggatgaaggtcaagtcacaccaacaaccaaagcaaggaggtacctgcaaaaattgtgccacaagcaaggctgagtatactaatactcagctagacttacccggtgtgaggagtctactcctctacctctagacatgcagctgtttggctgaggggtttggtttgccaaaagcactagctgagtctaaaatcatattttagcttttcaagttttagtatgatcccttttaactagatgtgtacctagctattcatacatggtatcaaacatttttatcaaacaacatcttttgccagtcacctcatttccacttattactcaatgtagcagcatggatcaagcagtctcattagctgcgag

SEQ ID NO: 30784 - DNA, 906 bp, Zea Mays
gcttgactcacggtaccacaccttaatccttattcaaattttcatcccgtggacaaccaatccccatggattgttgtccacaaccagcatcattatgagaagaaagtggatacaatcaatttcctgacctcgcgcgagtgctagaaaaatcactcgacttctaccgagatcctaattaataaagcagctactcgacctagcatactagtatccatcacaaaaaggattcctgagttcatgcaactagggtttcaaccaactcctacacttaagtgcacaatacaagcctacaatcactaagtgtagtaaaatagcatatataacggttatgcataaaaccggggcttgcctttagtttgacacttagatagtgtttgctgggggaggtactcgcttggcgagcatccactgattaagtccaccatccttccgtacgtccaccaactgcagcttgtggttggcaccacatcacttgcacgatcgtcacctctcggtcctaaatgagatgcaggatgcatatgtatgaatacaatgaaaaatatcacaagctatataaatacatggtagcaaactaacatttaattgtaagacatcgcaacgactatacgcaagcgctagctattcgtatgttatcggcgttcatcattaacaccattaacaagacgaccacattttgtatatttacacaacacaactatgacatcacaagtatacacatttatttaacttgctatggcttttccttagttcttctatttatcacacaaaagcatcaccgaccacacaagtccaaccaagacaacgtaagtttgaatacgacatagacattaataactacggcactccaatatcataatcaactagagcaagaaacatacaaaatatgacacacgtgcattattaagc

SEQ ID NO: 30785 - DNA, 536 bp, Zea Mays
gtttaaactagtaaaacctatccttcgcatcaaacaacacatcgcacatcttcctatcgaaacgtaaaaacatccgaattcttttctacttcctttttctttcgccacaaacttcaatccataccaatgcaatttttaaacacgcaccacatcgaccaatttatacgaatcgacgaccaccaatctctaactcgaaatcatgagcacgaccatattacgacctaccgccaaaacatttcaaccacatctatataatttattaatcaagtcaatcgagagcgacatggctcaccataaacaaacccaatcggcgtttgcaagaacgacggtgattccgatttgtgcatcgctacgacatcgacgagcgtcgagcggcttgccttctccacgcaaaacacggggttctctcctcctcaaaaataaaacaaagcagcacacatacataattaatcataggaaaataatgtcgatgcggaatcgaacaaggagcgtcgcggtctcaccggggtgaacgacgtcgatgtttggggctgtgc

SEQ ID NO: 30786 - DNA, 707 bp, Zea Mays
cgagctatcacattcggggatggaaatcaatgtttggtcaaaggtcttggtaaaattgctatatctcctgaccattccatttcaaatgtttttcttgttgactcattagattacaatttgctttccgtatcccaattatgtcaaatgggctacaactgtctattcactgatgtaggtgtcactgtctttagaagaagtgacaattcaatagcatttaagggagtgttagagggtcagctatacttggtagattttgatagagctgaactcgacacttgcttaattgctaagactaacatgggttggctctggcaccgccgactagcccatgttgggatgaagaatcttcataagcttctaaagggagaacacattttaggattaacaaatgtccattttgagaaagacaggatttgtagcgcatgccaagcagggaagcaagttggtactcatcatccacacaagaacatcatgactagtgacaggccactggagctcctacacatggacctattcggcccgatcgcttacataagcatcggcgggagtaagtattgccttgtaatagtggatgattattcttgcttcacttgggtgttctttttgcagaaaaaatctcatacccaagagaccttaaagggattcttgagacgggctcaaaatgagttcggcttaaggatcaagaaaattagaagcgacaatgggac

SEQ ID NO: 30787 - DNA, 726 bp, Zea Mays
ctcaaacacaagggcatatagagtctttaacaagtcctcaggacttgttgaagtttcttgtgacgttgtgtttgacgagactaacggctctcaagtagagcaagttgatcttgatgagataggtgaagaacaggctccatgcatagcgctaaggaacatgtccattggggatgtgtgtcctaaggaatccgaaaagcctccacatgcacaagatcaaccgtcctcctccacgcaagcatctccaccaactcaaaatgaggatgaagctcaagttgatgaagtagaagatcaagcaaatgagccacctcaagatgacgacatagatcaagggggagatgcaaataatcaagaaaaggaggatgagcaagaaccaaggccgccacacccaagagtccaccaagcaatccaacgagatcaccccgttgacaccatcctcggcgacattcgtaagggggtaactactagatctcgtattgcacatttttgtgaacattactcgtttgtttcctctattgagccacacagggtagaggaagcactacaagattcggattgggtggtggcaatgcaagaggagctcaacaacttcactagaaatgaggtatggcatttagttccacgtcctaaccaaaatgtggtaggaaccaaatgggtcttccgcaacaagcaagatgagcatggtgtggtgacaaggaacaaagctcgacttgtggccaagggatactc

SEQ ID NO: 30788 - DNA, 3113 bp, Zea Mays
aaacgaagtacactcaagacattctaaacaagtttgggatgaaggatgccaagcccatcaagactcccatgggaacaaatgggcatctcgacctcgacacgggaggtaagtccgtggatcaaaaggtatatcggtcaatgattggttcattgctttatttatgtgcatctcgaccggatattatgctttccgtttgcatgtgtgcaagattccaatccgaccctaaggaatcacaccttacggccgtaaaacgaatcttgagatacttggcttatactcctaagtttgggctttggtaccctcggggatccacatttgatttaattggttattcggatgccgattgggcggggtgtaagattaacagggagagcacatcggggacttgccagttcttgggaagatacttggtgtcatgggcttcaaataaacaaaatttggtcgctctttctaccgccgaagccgagtacattgccgcaggccattgttgcgcgcaactactttggatgaggcaaaccctgcgggactacggttacaaattaaccaaagtccctttgctatgtgacaatgagagtgcaattaaaatggccgacaatcccgtcgagcatagccgcactaagcacatagccattcggtatcattttcttagggatcaccaacaaaagggagatatcgagattgcatacattaacactaaagatcaattagccgatatctttaccaagcctcttgacgaacaaacttttaccaaacttaggcatgagctaaatattcttgattctagaaatttcttttgctagtttgcacacatagcacacaagtatacctttgatcatgtctcttttgtatatactatgactaatgtgttttcaagagtatttcaaaccaagtcataggtatattgaaagggaattggagtcttcggcgaagacaaaggcttccactccgtaactcatacttcgccatcactccaagcaactctctattctttggggagaaatgaacatcaaagaaaaggacttcgtctttgggagagagtaagagcccaaagccaaaggaccggacttcgcctttggtataatcttaactcatttatttatgaccaaaggggaagatagcacttcaagggctctaatgattccgtttttggcgattcatgccaaaaagggggagaaatgagcccaaagcaaaaggaccgcaccaccaccaccgatttcaaaaatttagtgttgaatatttatcaattgattatcctattgtgttcaaaagggggagaaagtagtatttcaaaaatgatatatcaaaaccctcttgaacactaagaggaggatctcctttagggagagtttttgtttagtcaaaggaaaagcatttgaaacagggggagaaaatttcaaatcttgaaaatgctttgcaaaatcctattcatttacctttgaccatttgcaaaagaactttgaaaaggatttacaaaagagtttgcaaaaacaaaacatgtggtgcaagcgtggtccaaaatgttatctaagaaagaaacaatccatgcatatcttgcaagtattaatattggctcaattccaagcaacctttacacttacattatgcaaactagttcaattatgcacttctatatttgctttggtttgtgttggcatcaatcaccaaaaagggggagattgaaagggaattaggcttacacctagtcccaaattaattttggtggttgaattgcccaacacaaatttattggactaaccagattgcccaagtgtatagattatacaggtgtcaaaggttcacactcagccaataaaaagatcaaatttggattcaacataggagcaaaggaccaaccgaaggcacctctggtttggcgcaccggacagtgtccggtgcaccaccggacatgtccggtgcaccagaggactccaacgcaaactcgccaccttcgggaatttccagaggcactcgcgctataattcaccggactgtccggtgtacaccggacagtgtccggtgcgccaaggaggagcagcctcaggaactcgccagcttcgggaaactccaacggccgtccgctataattcaccggactgtccggtgtacaccagactgtccggtgcgactccggagcaacggctatctccgcgccaacggctctctgccgcgcatttaatacgcgctctgcgcgcgcagaagtcaggcgcgcccatactggcacaccggacagcaaacagtacctgtccggtgtgcaccggacacctaggcgggcccacaagtcagaagctccaacggtcagaatccaacggcagtgatgacgtggcagggggcaccggactgtccggtgtgcaccggactgtccggtgcgccatcgagcagacagcctcccaacggccacttttgggtggttggggctataaataccccaaccacccccaccattcattgcatccaagtttccagcttccaaccactatacaagagctagcattcattgcaaagcacaccaaaagagatcaaatcctctcccaactccacacaaagccctagtgactagtgagagtgatttgtagtgttcatttgagctcttgcgcttggatcgcttcttttctttcgcattctttcttgtgatcaaacactcacttgtaattgaggcaagaggcaccaatcgtgtggtggcccttgcgggaagtttgattcccaagtgatttgagaagagaagctcactcggtccaagggaccgattgagagagggaagggttgaaagagacccggcctttgtggcctcctcaacggggagtaggtttgcaagaaccgaacctcggtaaaacaaatctgcgtgtcacactcttcatttgcttgcgatttgttttgctccctctctcgcggactcatttatatttctaacgctaacccggcttgtagttgtgattatttttgagaatttcagtttcgccctattaaccccccctctaggcgactttcagaagtaaaatagcataaataacaggttatgcataaaaccggggcttgccttccaaagcagtggcagacaggtcctctggtgcaggctcgggtgctggatcgggggctacctcctgagcagctccttg

SEQ ID NO: 30789 - DNA, 5027 bp, Zea Mays
ccaacaagtatatttggccaactgttcacggttcttcaccagttgcgttcgtcgttcccgttctcctcctcgtatcccctggtccgtacgtcgtggccaccggcgccgcctagctcgcaccgccgacagcgtctcagactagatcgcgcctccccctcccaaatcgggttccagtcgggctcccgcaaccgccgccgtctacaccaggtgccgaggccgatcttttcgtcggcaaagatcgccgagcagatctgcccctggccgtcgccctacaccaggtgccgatatcttcgccagcgaagagcgcccagcaggtacagtgatttgggattctatactacctagctttatgattgcaagacctggttattttcacctgaggttgtgttcaacatgttagtggcatgaaaattgcctcaattgggggcaatggcatctagtacaaaatcagatttagtgtctggtagccctgatgggcatggatacttcaatgcacaacgtgggtcctatgcagctgcttcattggaaaggtcaggaagcttccgtgaaggcggtgatggctatgcgatgttttcagcatcaaactcatcaaggtcagcggcagtgaactctatcaatctagttcagtcacttgcactggacttgagaccggcaactgtggatcacaaaacatctcggttagatctaaagaaatcaataagttccatttttggaacctctgcagaagattcaacatcacttccatctctagggagaaatttaccaaatgctatcgaagagatcagacgtatgaggagtaatcttaacgacaattcaaataaggccagggaaagatctagagcttttggtggtgctatggcgaagattgataaactttgtcccaatattgtgcgaaaacgttctcgaggagacagttcatctaatgaacgatctagtgtgttatcatctggaggagttacccctaaaaatgttcctcagagccatttaaatgcagatgatatggaagctgggcttcagagagaagagaggacaaagaatgcaggacaaaataggagaatacgtacatccatggtggagatggatgcaagaacagctggtccatcaagaggccccggacctactgataggatctcagatcctggtaaagccaccaatggcagttctgcagttccagaagaaaaaatcagaggtttggcaactactatcgatggttgggaaaagccaaaaatgaagaaaaagcgttctaccattaaggcagacatgtcactggctggtgttttgaggactgttgatgtagaccgagagtcaaaacaaggcatgcagcacaagtttactaatgacggtagggcgagaatgacaagttctagtttcaggtctggaactgttgcatctggcacaaccaaagcagatttgctttctacacaaaatggtcttgttatgcgacccttaaataggagtgatcaagacaatggtttccatcctactaacaaaagggaacgtcaagctgcattagataaagaaacgcccaacccgagaaccattaacaagcctaatgaagacgacagtggatgtaacattgcatcattaccgaaggcgaatggatctgcgcggggaccccgatcaaattcagggtcaatattgaagtcatatccaaacattcatcgatcacaagctagttctgatgattgggaacatccgtctggtacaaataagttaatttctgctggtggatctggcattcataaacgtacaaaatcaacacattcattatctcctccgatccaatggggtgggcagaggcctcagaagatatcccgttcagcaaggaagtcaaatttagtccctataatcactactgatagtgcactggtaccaggttcgctggacagtcctgtcaatgaagattgtgcaggtttaccgaggcgtgcatctgtaaatagccttcaacaaacaaaacgaggagatcatgggctctcaactggacctgaaggcaatgagcctgtagttgctgagaaaaagctaagggacaagggcaaaagggctggtgaactggatgatgggcatggctctggttttcagaagattgctatgcttgggcatccttccaaaaggaataagttgcctgctgatgaggatattggagatgctttaaggagacaagcaagagttgtcccgggttttactctgaccaggcctgggactcctgtatccattgacaagcttgaaaatgctccgattacaaaacaaagaagtgtgaggacagtctcagagagaactgagagtaaatctgggagaccactgatgaagaaaatatctgagcgcaaaagtaatgcacggcctaggcatacaagtagcagtgtgcagtcagactctcctgtgcaatctgaagatgatcatgaggaacttcttgcttcagcaaatgctgccctaagatctgcttgtgcaagcacgttctggcggcaggttgaacctttcttcgcatttttgactgcagaagacatcacatatcttagtcaacagatacatttaccagatgattcctcttcaagtaggtcaatggaagggggtgaatgccaaaaatataagggtggtcttgaatacatttcacacccctcaactccagccgctagcaacaaagatgatcacgctgctcttccaaatggttttggcttgaatcagttggataatgacataggggttggctgggaggcaagctgcattgaacctatcctcgatcaacttgtccatgggattggggtaccaggatggtcttcagttggccaaagacttattcaagcattgattgatgaagataggatcgatagtattaccaacaacacttacataagcgagggctatgcatttgatacacatgaaattcattttgatggaggaggatggaagcctcactcaaataattataagttagaacctttagcgaattttgaagcttcaaggaggggcccaaatggtctgacaatggattctgactggaaatataatgatgtgtcaaatagaagtggcaatgtcatggataaaaccaaggtgtggcctgagtttcagtacagtgagatgtgcttcaatgataggattatcattgagctgagtgaagttggtgtatctattgaacctgtgcctgatcttgcacagagtgaggacgaggatattaatgctgaaatctgtaaattagaaggccaacttcgtaaagaggttgtggagaagaaaaacttgctattgaaactggatggcattgttgcaactgcaaaagagtctcagcatagggaattctcacgccttgccatggatagacttctcctgagagcatatgagaaatatatggccttctgtggtccaaatgtttcaagcagcaaaaatgtcaatagaactggcaaacatgctgctctaagttttgtcaaacgagtactagtgcgatgccaaaactacgaagaggcggggacaagttgctttgatgagcctattttcaaggacatgtttttatcagcgacgtctcacagacgcagtctagatactgcttcacaagataacaatacaacagcgagaccagtccacagggccggtgcaccagacgcttcgcgaggaagcagtcacccgacggacctgtcgtttgcaaaggaggatccctggacaaacaacgtaaagcagcgggaactgttgctggacgaggttgtaggtagcataacaggaggagctctgagaacctcctcctccgtccttggtatctccctcgtcagcaatacgaaagggaagagaagcgagagggaagggaaggggcacaaccgagacagcctcaggtccggccgtccgtcgccgtccaacgcaaagggtgaaaggaagaacaaaacaaagctcagacagaaggcagccaacatctctgctccttcaggaggtctacagcttccagcgaaaacaacgcctcccagcagtgggaacggcaaggaggagagcgcagcagcagcagcagctgctgctgccaggcatggtggtgatccggcggcgaatgcttcgaatgacgccgaaatgcccgacctggctaacctcgagctgccaggactggacgccgactttggcggctggttgaatctggacgacgacgacgccctccaggacctcgacctgatgggcctcgagatccccatggacgacatcaacgagataaacctcatgatatagccgtacattttccttcgtttctcacagtaacaaccaacagagaaaaagctcccgatagtgcgtgcacaggtaaccaccaaccctgcagttttaacaccaggcctggttattaagcttcacttagggctagtttggaaactcaaatcccttccggtattggaggtgattgaggggagaatgcaataatttcttcctcaatctcctctaattctggaggggatttgagtttccaaactagctctgataaaagagagagagagggacagacagttgatagagacctcttgacaatcccaacaaccacgtgttgtcttttttgtaccagcgtgtaatttgcctccctgccttgtaccctcccctatacgttcatctgtcgtgtagacgtcggtgtacatatctattttggcgccctagttacaaggtagggaggctagttactgcatctgttactcgctccaaaggttgtgtgtgtacagactgaggacatttctcatctcatggcagcgccgactttccccccttattgcgagcataagatcacattcttttatctcagattagattgaggctagagactattccagccaatcaatgttaacgtaaataaatgtatcattccagctggaaccatttcatagtaaacgaaatgatactatctctagcagcttacctatttctatccctatatattaaaactttactcagtattgcagtctacggcacaaaacattaacaaacgcccatcttagatatactgtgtataaacacatagcaaaactatctggaaaaatggaggaatagcatagatcaaacacgtggttacaactcgtcctgag

SEQ ID NO: 30790 - DNA, 6078 bp, Zea Mays
ccaacaagtatatttggccaactgttcacggttcttcaccagttgcgttcgtcgttcccgttctcctcctcgtatcccctggtccgtacgtcgtggccaccggcgccgcctagctcgcaccgccgacagcgtctcagactagatcgcgcctccccctcccaaatcgggttccagtcgggctcccgcaaccgccgccgtctacaccaggtgccgaggccgatcttttcgtcggcaaagatcgccgagcagatctgcccctggccgtcgccctacaccaggtgccgatatcttcgccagcgaagagcgcccagcaggtacagtgatttgggattctatactacctagctttatgattgcaagacctggttattttcacctgaggttgtgttcaacatgttagtggcatgaaaattgcctcaattgggggcaatggcatctagtacaaaatcagatttagtgtctggtagccctgatgggcatggatacttcaatgcacaacgtgggtcctatgcagctgcttcattggaaaggtcaggaagcttccgtgaaggcggtgatggctatgcgatgttttcagcatcaaactcatcaaggtcagcggcagtgaactctatcaatctagttcagtcacttgcactggacttgagaccggcaactgtggatcacaaaacatctcggttagatctaaagaaatcaataagttccatttttggaacctctgcagaagattcaacatcacttccatctctagggagaaatttaccaaatgctatcgaagagatcagacgtatgaggagtaatcttaacgacaattcaaataaggccagggaaagatctagagcttttggtggtgctatggcgaagattgataaactttgtcccaatattgtgcgaaaacgttctcgaggagacagttcatctaatgaacgatctagtgtgttatcatctggaggagttacccctaaaaatgttcctcagagccatttaaatgcagatgatatggaagctgggcttcagagagaagagaggacaaagaatgcaggacaaaataggagaatacgtacatccatggtggagatggatgcaagaacagctggtccatcaagaggccccggacctactgataggatctcagatcctggtaaagccaccaatggcagttctgcagttccagaagaaaaaatcagaggtttggcaactactatcgatggttgggaaaagccaaaaatgaagaaaaagcgttctaccattaaggcagacatgtcactggctggtgttttgaggactgttgatgtagaccgagagtcaaaacaaggcatgcagcacaagtttactaatgacggtagggcgagaatgacaagttctagtttcaggtctggaactgttgcatctggcacaaccaaagcagatttgctttctacacaaaatggtcttgttatgcgacccttaaataggagtgatcaagacaatggtttccatcctactaacaaaagggaacgtcaagctgcattagataaagaaacgcccaacccgagaaccattaacaagcctaatgaagacgacagtggatgtaacattgcatcattaccgaaggcgaatggatctgcgcggggaccccgatcaaattcagggtcaatattgaagtcatatccaaacattcatcgatcacaagctagttctgatgattgggaacatccgtctggtacaaataagttaatttctgctggtggatctggcattcataaacgtacaaaatcaacacattcattatctcctccgatccaatggggtgggcagaggcctcagaagatatcccgttcagcaaggaagtcaaatttagtccctataatcactactgatagtgcactggtaccaggttcgctggacagtcctgtcaatgaagattgtgcaggtttaccgaggcgtgcatctgtaaatagccttcaacaaacaaaacgaggagatcatgggctctcaactggacctgaaggcaatgagcctgtagttgctgagaaaaagctaagggacaagggcaaaagggctggtgaactggatgatgggcatggctctggttttcagaagattgctatgcttgggcatccttccaaaaggaataagttgcctgctgatgaggatattggagatgctttaaggagacaagcaagagttgtcccgggttttactctgaccaggcctgggactcctgtatccattgacaagcttgaaaatgctccgattacaaaacaaagaagtgtgaggacagtctcagagagaactgagagtaaatctgggagaccactgatgaagaaaatatctgagcgcaaaagtaatgcacggcctaggcatacaagtagcagtgtgcagtcagactctcctgtgcaatctgaagatgatcatgaggaacttcttgcttcagcaaatgctgccctaagatctgcttgtgcaagcacgttctggcggcaggttgaacctttcttcgcatttttgactgcagaagacatcacatatcttagtcaacagatacatttaccagatgattcctcttcaagtaggtcaatggaagggggtgaatgccaaaaatataagggtggtcttgaatacatttcacacccctcaactccagccgctagcaacaaagatgatcacgctgctcttccaaatggttttggcttgaatcagttggataatgacataggggttggctgggaggcaagctgcattgaacctatcctcgatcaacttgtccatgggattggggtaccaggatggtcttcagttggccaaagacttattcaagcattgattgatgaagataggatcgatagtattaccaacaacacttacataagcgagggctatgcatttgatacacatgaaattcattttgatggaggaggatggaagcctcactcaaataattataagttagaacctttagcgaattttgaagcttcaaggaggggcccaaatggtctgacaatggattctgactggaaatataatgatgtgtcaaatagaagtggcaatgtcatggataaaaccaaggtgtggcctgagtttcagtacagtgagatgtgcttcaatgataggattatcattgagctgagtgaagttggtgtatctattgaacctgtgcctgatcttgcacagagtgaggacgaggatattaatgctgaaatctgtaaattagaaggccaacttcgtaaagaggttgtggagaagaaaaacttgctattgaaactggatggcattgttgcaactgcaaaagagtctcagcatagggaattctcacgccttgccatggatagacttctcctgagagcatatgagaaatatatggccttctgtggtccaaatgtttcaagcagcaaaaatgtcaatagaactggcaaacatgctgctctaagttttgtcaaacgagtactagtgcgatgccaaaactacgaagaggcggggacaagttgctttgatgagcctattttcaaggacatgtttttatcagcgacgtctcacagacgcagtctagatactgcttcacaagataacaatacaacagcgagaccagtccacagggccggtgcaccagacgcttcgcgaggaagcagtcacccgacggacctgtcgtttgcaaaggaggatccctggacaaacaacgtaaagcagcgggaactgttgctggacgaggttgtaggtagcataacaggaggagctctgagaacctcctcctccgtccttggtatctccctcgtcagcaatacgaaagggaagagaagcgagagggaagggaaggggcacaaccgagacagcctcaggtccggccgtccgtcgccgtccaacgcaaagggtgaaaggaagaacaaaacaaagctcagacagaaggcagccaacatctctgctccttcaggaggtctacagcttccagcgaaaacaacgcctcccagcagtgggaacggcaaggaggagagcgcagcagcagcagcagctgctgctgccaggcatggtggtgatccggcggcgaatgcttcgaatgacgccgaaatgcccgacctggctaacctcgagctgccaggactggacgccgactttggcggctggttgaatctggacgacgacgacgccctccaggacctcgacctgatgggcctcgagatccccatggacgacatcaacgagataaacctcatgatatagccgtacattttccttcgtttctcacagtaacaaccaacagagaaaaagctcccgatagtgcgtgcacaggccaccgccggcgcccgcgcgcggaggaagtgcatgcagccaggagagagctagcatagcagctaggagaaactaaccatggccgcctctcgccgctcttccgttgagctcccagtcgccgacccggcggcggatccagaccaagtccggctgcaccagctgggatacaagcaggagctcaagcgaggcctctccgtcctttccaacttcgccttgtctttctccatcatctccgtgctgatgggcgtgacgatcacctacaacaccggcctgcgctacggcgggccggtgtccatgacgctgggctggttcctcgtctccgccctcaacgcatgcgtggcgctgtccatggcggagatctgctcggcgtacccgacctccggcggcctctactactggagcgctaagctcgccggcaaggactgggctcccctcgcttcctggctcaccggatgtgggcaggtacgacgagcgtcgacttctcgctggcgcagcttgtgcaggtgatcgtcctgcttgccaccggaggcctcaacggcggcggctacatggcatccaagtacgtcgtgctggccatctacggcgccatcctggtcatacacgggctaatgaacacctggcatggttcggccatctcggagcgttctggaacaccgcaggtacatttgctcttgtgatcatcatcccagccgttgcgacggagagggcgagcacggagttcatcttcacgcatttgaacacagacaatggcatgggcgtccacggcaaggcctacatccttgccttggggctgctgatgagccagtactcgctcatcggctatgacgcatctgcacacatgacggaggagacgaagaacgcggactggagtgggccgatggggatcgtcacctccgtcgctctgtccagcgtcttgggatgggtctacctggtggccctggcgtcgctgatgacggacatcccgtacctcctggaccccggcaacgacgccggcgggtacgccgtcgcgcaggccctctacgacgctttccgcaggaggttcggcagcggcgtcggaggcgtcgtttgcttggggatcgtcgccgtcaccaccttcctctgcggctccgcgtgcgtcaccagcaactcaaggatggggtatgccttctccagggacggagcggtgccattctcgcacgtatggtacaaggtgaacaagcaggaggtgcccttgaacgtcgtctggctctccgtgtccgtggcgttcgccatggctctcacgtcgctggggagccaggtggcattccaggcgatgctgtccgtggcgaccgtcgggccgtacatcgcctacggactgcccatcgtcttccgcgtcaccacggcccggagatccttcgtcccggggccgttccacctcgggagatacggcctcctcgtcggctgggtcgccgtcgcgtgggtggccgccgtcaccgtgctcttctccctgcccgtagcgtaccccgtcgccgaggacaccttcaactacgcgccggtcgtcgtcgtcggcgtgctgctgctcagcgtcggctcgtgggtgctccacgcccgcttctggttccaagggccaatcaccaacgttgatgtcgcctaagctagagtgtgtatgtgttgatcaaggcaagctactttgtagtcagaaatatcacacaaatgcaaatatctctaattatactctacatgaggctaattgaacaattgacatgcaacaagtaattgaaagtgattgcaagagtaagtatagtagcaaatcactagggaggataagggatgacacaagatgtatccataaggttcgat

SEQ ID NO: 30791 - DNA, 3170 bp, Zea Mays
cggttcttcaccagttgcgttcgtcgttcccgttctcctcctcgtatcccctggtccgtacgtcgtggccaccggcgccgcctagctcgcaccgccgacagcgtctcagactagatcgcgcctccccctcccaaatcgggttccagtcgggctcccgcaaccgccgccgtctacaccaggtgccgaggccgatcttttcgtcggcaaagatcgccgagcagatctgcccctggccgtcgccctacaccaggtgccgatatcttcgccagcgaagagcgcccagcagtttgtattgacaggtacagtgatttgggattctatactacctagctttatgattgcaagacctggttattttcacctgaggttgtgttcaacatgttagtggcatgaaaattgcctcaattgggggcaatggcatctagtacaaaatcagatttagtgtctggtagccctgatgggcatggatacttcaatgcacaacgtgggtcctatgcagctgcttcattggaaaggtcaggaagcttccgtgaaggcggtgatggctatgcgatgttttcagcatcaaactcatcaaggtcagcggcagtgaactctatcaatctagttcagtcacttgcactggacttgagaccggcaactgtggatcacaaaacatctcggttagatctaaagaaatcaataagttccatttttggaacctctgcagaagattcaacatcacttccatctctagggagaaatttaccaaatgctatcgaagagatcagacgtatgaggagtaatcttaacgacaattcaaataaggccagggaaagatctagagcttttggtggtgctatggcgaagattgataaactttgtcccaatattgtgcgaaaacgttctcgaggagacagttcatctaatgaacgatctagtgtgttatcatctggaggagttacccctaaaaatgttcctcagagccatttaaatgcagatgatatggaagctgggcttcagagagaagagaggacaaagaatgcaggacaaaataggagaatacgtacatccatggtggagatggatgcaagaacagctggtccatcaagaggccccggacctactgataggatctcagatcctggtaaagccaccaatggcagttctgcagttccagaagaaaaaatcagaggtttggcaactactatcgatggttgggaaaagccaaaaatgaagaaaaagcgttctaccattaaggcagacatgtcactggctggtgttttgaggactgttgatgtagaccgagagtcaaaacaaggcatgcagcacaagtttactaatgacggtagggcgagaatgacaagttctagtttcaggtctggaactgttgcatctggcacaaccaaagcagatttgctttctacacaaaatggtcttgttatgcgacccttaaataggagtgatcaagacaatggtttccatcctactaacaaaagggaacgtcaagctgcattagataaagaaacgcccaacccgagaaccattaacaagcctaatgaagacgacagtggatgtaacattgcatcattaccgaaggcgaatggatctgcgcggggaccccgatcaaattcagggtcaatattgaagtcatatccaaacattcatcgatcacaagctagttctgatgattgggaacatccgtctggtacaaataagttaatttctgctggtggatctggcattcataaacgtacaaaatcaacacattcattatctcctccgatccaatggggtgggcagaggcctcagaagatatcccgttcagcaaggaagtcaaatttagtccctataatcactactgatagtgcactggtaccaggttcgctggacagtcctgtcaatgaagattgtgcaggtttaccgaggcgtgcatctgtaaatagccttcaacaaacaaaacgaggagatcatgggctctcaactggacctgaaggcaatgagcctgtagttgctgagaaaaagctaagggacaagggcaaaagggctggtgaactggatgatgggcatggctctggttttcagaagattgctatgcttgggcatccttccaaaaggaataagttgcctgctgatgaggatattggagatgctttaaggagacaagcaagagttgtcccgggttttactctgaccaggcctgggactcctgtatccattgacaagcttgaaaatgctccgattacaaaacaaagaagtgtgaggacagtctcagagagaactgagagtaaatctgggagaccactgatgaagaaaatatctgagcgcaaaagtaatgcacggcctaggcatacaagtagcagtgtgcagtcagactctcctgtgcaatctgaagatgatcatgaggaacttcttgcttcagcaaatgctgccctaagatctgcttgtgcaagcacgttctggcggcaggttgaacctttcttcgcatttttgactgcagaagacatcacatatcttagtcaacagatacatttaccagatgattcctcttcaagtaggtcaatggaagggggtgaatgccaaaaatataagggtggtcttgaatacatttcacacccctcaactccagccgctagcaacaaagatgatcacgctgctcttccaaatggttttggcttgaatcagttggataatgacataggggttggctgggaggcaagctgcattgaacctatcctcgatcaacttgtccatgggattggggtaccaggatggtcttcagttggccaaagacttattcaagcattgattgatgaagataggatcgatagtattaccaacaacacttacataagcgagggctatgcatttgatacacatgaaattcattttgatggaggaggatggaagcctcactcaaataattataagttagaacctttagcgaattttgaagcttcaaggaggggcccaaatggtctgacaatggattctgactggaaatataatgatgtgtcaaatagaagtggcaatgtcatggataaaaccaaggtgtggcctgagtttcagtacagtgagatgtgcttcaatgataggattatcattgagctgagtgaagttggtgtatctattgaacctgtgctcagcttccgcttattggccctgtttggcatagattattttcagcttct

SEQ ID NO: 30792 - DNA, 5242 bp, Zea Mays
cggttcttcaccagttgcgttcgtcgttcccgttctcctcctcgtatcccctggtccgtacgtcgtggccaccggcgccgcctagctcgcaccgccgacagcgtctcagactagatcgcgcctccccctcccaaatcgggttccagtcgggctcccgcaaccgccgccgtctacaccaggtgccgaggccgatcttttcgtcggcaaagatcgccgagcagatctgcccctggccgtcgccctacaccaggtgccgatatcttcgccagcgaagagcgcccagcaggtacagtgatttgggattctatactacctagctttatgattgcaagacctggttattttcacctgaggttgtgttcaacatgttagtggcatgaaaattgcctcaattgggggcaatggcatctagtacaaaatcagatttagtgtctggtagccctgatgggcatggatacttcaatgcacaacgtgggtcctatgcagctgcttcattggaaaggtcaggaagcttccgtgaaggcggtgatggctatgcgatgttttcagcatcaaactcatcaaggtcagcggcagtgaactctatcaatctagttcagtcacttgcactggacttgagaccggcaactgtggatcacaaaacatctcggttagatctaaagaaatcaataagttccatttttggaacctctgcagaagattcaacatcacttccatctctagggagaaatttaccaaatgctatcgaagagatcagacgtatgaggagtaatcttaacgacaattcaaataaggccagggaaagatctagagcttttggtggtgctatggcgaagattgataaactttgtcccaatattgtgcgaaaacgttctcgaggagacagttcatctaatgaacgatctagtgtgttatcatctggaggagttacccctaaaaatgttcctcagagccatttaaatgcagatgatatggaagctgggcttcagagagaagagaggacaaagaatgcaggacaaaataggagaatacgtacatccatggtggagatggatgcaagaacagctggtccatcaagaggccccggacctactgataggatctcagatcctggtaaagccaccaatggcagttctgcagttccagaagaaaaaatcagaggtttggcaactactatcgatggttgggaaaagccaaaaatgaagaaaaagcgttctaccattaaggcagacatgtcactggctggtgttttgaggactgttgatgtagaccgagagtcaaaacaaggcatgcagcacaagtttactaatgacggtagggcgagaatgacaagttctagtttcaggtctggaactgttgcatctggcacaaccaaagcagatttgctttctacacaaaatggtcttgttatgcgacccttaaataggagtgatcaagacaatggtttccatcctactaacaaaagggaacgtcaagctgcattagataaagaaacgcccaacccgagaaccattaacaagcctaatgaagacgacagtggatgtaacattgcatcattaccgaaggcgaatggatctgcgcggggaccccgatcaaattcagggtcaatattgaagtcatatccaaacattcatcgatcacaagctagttctgatgattgggaacatccgtctggtacaaataagttaatttctgctggtggatctggcattcataaacgtacaaaatcaacacattcattatctcctccgatccaatggggtgggcagaggcctcagaagatatcccgttcagcaaggaagtcaaatttagtccctataatcactactgatagtgcactggtaccaggttcgctggacagtcctgtcaatgaagattgtgcaggtttaccgaggcgtgcatctgtaaatagccttcaacaaacaaaacgaggagatcatgggctctcaactggacctgaaggcaatgagcctgtagttgctgagaaaaagctaagggacaagggcaaaagggctggtgaactggatgatgggcatggctctggttttcagaagattgctatgcttgggcatccttccaaaaggaataagttgcctgctgatgaggatattggagatgctttaaggagacaagcaagagttgtcccgggttttactctgaccaggcctgggactcctgtatccattgacaagcttgaaaatgctccgattacaaaacaaagaagtgtgaggacagtctcagagagaactgagagtaaatctgggagaccactgatgaagaaaatatctgagcgcaaaagtaatgcacggcctaggcatacaagtagcagtgtgcagtcagactctcctgtgcaatctgaagatgatcatgaggaacttcttgcttcagcaaatgctgccctaagatctgcttgtgcaagcacgttctggcggcaggttgaacctttcttcgcatttttgactgcagaagacatcacatatcttagtcaacagatacatttaccagatgattcctcttcaagtaggtcaatggaagggggtgaatgccaaaaatataagggtggtcttgaatacatttcacacccctcaactccagccgctagcaacaaagatgatcacgctgctcttccaaatggttttggcttgaatcagttggataatgacataggggttggctgggaggcaagctgcattgaacctatcctcgatcaacttgtccatgggattggggtaccaggatggtcttcagttggccaaagacttattcaagcattgattgatgaagataggatcgatagtattaccaacaacacttacataagcgagggctatgcatttgatacacatgaaattcattttgatggaggaggatggaagcctcactcaaataattataagttagaacctttagcgaattttgaagcttcaaggaggggcccaaatggtctgacaatggattctgactggaaatataatgatgtgtcaaatagaagtggcaatgtcatggataaaaccaaggtgtggcctgagtttcagtacagtgagatgtgcttcaatgataggattatcattgagctgagtgaagttggtgtatctattgaacctgtggggacggtggtcgtggttggtctgagggcacacagcagtgagggacttagggaagtgaaaggaagcggagaggtgagcgatggcggcgcatctagaggacagagggaagcgggaatcgtggcggcagcatggggcagagcagtgcaccaagggtcagggctatttctagcgcttaatgctgtgacagctgaggtcgtcctattacagcatgagataaggatagagttccctgtctgtattaagcctgatcttgcacagagtgaggacgaggatattaatgctgaaatctgtaaattagaaggccaacttcgtaaagaggttgtggagaagaaaaacttgctattgaaactggatggcattgttgcaactgcaaaagagtctcagcatagggaattctcacgccttgccatggatagacttctcctgagagcatatgagaaatatatggccttctgtggtccaaatgtttcaagcagcaaaaatgtcaatagaactggcaaacatgctgctctaagttttgtcaaacgagtactagtgcgatgccaaaactacgaagaggcggggacaagttgctttgatgagcctattttcaaggacatgtttttatcagcgacgtctcacagacgcagtctagatactgcttcacaagataacaatacaacagcgagaccagtccacagggccggtgcaccagacgcttcgcgaggaagcagtcacccgacggacctgtcgtttgcaaaggaggatccctggacaaacaacgtaaagcagcgggaactgttgctggacgaggttgtaggtagcataacaggaggagctctgagaacctcctcctccgtccttggtatctccctcgtcagcaatacgaaagggaagagaagcgagagggaagggaaggggcacaaccgagacagcctcaggtccggccgtccgtcgccgtccaacgcaaagggtgaaaggaagaacaaaacaaagctcagacagaaggcagccaacatctctgctccttcaggaggtctacagcttccagcgaaaacaacgcctcccagcagtgggaacggcaaggaggagagcgcagcagcagcagcagctgctgctgccaggcatggtggtgatccggcggcgaatgcttcgaatgacgccgaaatgcccgacctggctaacctcgagctgccaggactggacgccgactttggcggctggttgaatctggacgacgacgacgccctccaggacctcgacctgatgggcctcgagatccccatggacgacatcaacgagataaacctcatgatatagccgtacattttccttcgtttctcacagtaacaaccaacagagaaaaagctcccgatagtgcgtgcacaggtaaccaccaaccctgcagttttaacaccaggcctggttattaagcttcacttagggctagtttggaaactcaaatcccttccggtattggaggtgattgaggggagaatgcaataatttcttcctcaatctcctctaattctggaggggatttgagtttccaaactagctctgataaaagagagagagagggacagacagttgatagagacctcttgacaatcccaacaaccacgtgttgtcttttttgtaccagcgtgtaatttgcctccctgccttgtaccctcccctatacgttcatctgtcgtgtagacgtcggtgtacatatctattttggcgccctagttacaaggtagggaggctagttactgcatctgttactcgctccaaaggttgtgtgtgtacagactgaggacatttctcatctcatggcagcgccgactttccccccttattgcgagcataagatcacattcttttatctcagattagattgaggctagagactattccagccaatcaatgttaacgtaaataaatgtatcattccagctggaaccatttcatagtaaacgaaatgatactatctctagcagcttacctatttctatccctatatattaaaactttactcagtattgcagtctacggcacaaaacattaacaaacgcccatcttagatatactgtgtataaacacatagcaaaactatctggaaaaatggaggaatagcatagatcaaacacgtggttacaactcgtcctgag

SEQ ID NO: 30793 - DNA, 5105 bp, Zea Mays
cggttcttcaccagttgcgttcgtcgttcccgttctcctcctcgtatcccctggtccgtacgtcgtggccaccggcgccgcctagctcgcaccgccgacagcgtctcagactagatcgcgcctccccctcccaaatcgggttccagtcgggctcccgcaaccgccgccgtctacaccaggtgccgaggccgatcttttcgtcggcaaagatcgccgagcagatctgcccctggccgtcgccctacaccaggtgccgatatcttcgccagcgaagagcgcccagcagtttgtattgacaggtacagtgatttgggattctatactacctagctttatgattgcaagacctggttattttcacctgaggttgtgttcaacatgttagtggcatgaaaattgcctcaattgggggcaatggcatctagtacaaaatcagatttagtgtctggtagccctgatgggcatggatacttcaatgcacaacgtgggtcctatgcagctgcttcattggaaaggtcaggaagcttccgtgaaggcggtgatggctatgcgatgttttcagcatcaaactcatcaaggtcagcggcagtgaactctatcaatctagttcagtcacttgcactggacttgagaccggcaactgtggatcacaaaacatctcggttagatctaaagaaatcaataagttccatttttggaacctctgcagaagattcaacatcacttccatctctagggagaaatttaccaaatgctatcgaagagatcagacgtatgaggagtaatcttaacgacaattcaaataaggccagggaaagatctagagcttttggtggtgctatggcgaagattgataaactttgtcccaatattgtgcgaaaacgttctcgaggagacagttcatctaatgaacgatctagtgtgttatcatctggaggagttacccctaaaaatgttcctcagagccatttaaatgcagatgatatggaagctgggcttcagagagaagagaggacaaagaatgcaggacaaaataggagaatacgtacatccatggtggagggcaagcttggtgcagtggtgagagctgtctcaccgagtctccaggtcgcaggccttatttggcaatgtggcttagttgctgtttttagcatgatggatgcaagaacagctggtccatcaagaggccccggacctactgataggatctcagatcctggtaaagccaccaatggcagttctgcagttccagaagaaaaaatcagaggtttggcaactactatcgatggttgggaaaagccaaaaatgaagaaaaagcgttctaccattaaggcagacatgtcactggctggtgttttgaggactgttgatgtagaccgagagtcaaaacaaggcatgcagcacaagtttactaatgacggtagggcgagaatgacaagttctagtttcaggtctggaactgttgcatctggcacaaccaaagcagatttgctttctacacaaaatggtcttgttatgcgacccttaaataggagtgatcaagacaatggtttccatcctactaacaaaagggaacgtcaagctgcattagataaagaaacgcccaacccgagaaccattaacaagcctaatgaagacgacagtggatgtaacattgcatcattaccgaaggcgaatggatctgcgcggggaccccgatcaaattcagggtcaatattgaagtcatatccaaacattcatcgatcacaagctagttctgatgattgggaacatccgtctggtacaaataagttaatttctgctggtggatctggcattcataaacgtacaaaatcaacacattcattatctcctccgatccaatggggtgggcagaggcctcagaagatatcccgttcagcaaggaagtcaaatttagtccctataatcactactgatagtgcactggtaccaggttcgctggacagtcctgtcaatgaagattgtgcaggtttaccgaggcgtgcatctgtaaatagccttcaacaaacaaaacgaggagatcatgggctctcaactggacctgaaggcaatgagcctgtagttgctgagaaaaagctaagggacaagggcaaaagggctggtgaactggatgatgggcatggctctggttttcagaagattgctatgcttgggcatccttccaaaaggaataagttgcctgctgatgaggatattggagatgctttaaggagacaagcaagagttgtcccgggttttactctgaccaggcctgggactcctgtatccattgacaagcttgaaaatgctccgattacaaaacaaagaagtgtgaggacagtctcagagagaactgagagtaaatctgggagaccactgatgaagaaaatatctgagcgcaaaagtaatgcacggcctaggcatacaagtagcagtgtgcagtcagactctcctgtgcaatctgaagatgatcatgaggaacttcttgcttcagcaaatgctgccctaagatctgcttgtgcaagcacgttctggcggcaggttgaacctttcttcgcatttttgactgcagaagacatcacatatcttagtcaacagatacatttaccagatgattcctcttcaagtaggtcaatggaagggggtgaatgccaaaaatataagggtggtcttgaatacatttcacacccctcaactccagccgctagcaacaaagatgatcacgctgctcttccaaatggttttggcttgaatcagttggataatgacataggggttggctgggaggcaagctgcattgaacctatcctcgatcaacttgtccatgggattggggtaccaggatggtcttcagttggccaaagacttattcaagcattgattgatgaagataggatcgatagtattaccaacaacacttacataagcgagggctatgcatttgatacacatgaaattcattttgatggaggaggatggaagcctcactcaaataattataagttagaacctttagcgaattttgaagcttcaaggaggggcccaaatggtctgacaatggattctgactggaaatataatgatgtgtcaaatagaagtggcaatgtcatggataaaaccaaggtgtggcctgagtttcagtacagtgagatgtgcttcaatgataggattatcattgagctgagtgaagttggtgtatctattgaacctgtgcctgatcttgcacagagtgaggacgaggatattaatgctgaaatctgtaaattagaaggccaacttcgtaaagaggttgtggagaagaaaaacttgctattgaaactggatggcattgttgcaactgcaaaagagtctcagcatagggaattctcacgccttgccatggatagacttctcctgagagcatatgagaaatatatggccttctgtggtccaaatgtttcaagcagcaaaaatgtcaatagaactggcaaacatgctgctctaagttttgtcaaacgagtactagtgcgatgccaaaactacgaagaggcggggacaagttgctttgatgagcctattttcaaggacatgtttttatcagcgacgtctcacagacgcagtctagatactgcttcacaagataacaatacaacagcgagaccagtccacagggccggtgcaccagacgcttcgcgaggaagcagtcacccgacggacctgtcgtttgcaaaggaggatccctggacaaacaacgtaaagcagcgggaactgttgctggacgaggttgtaggtagcataacaggaggagctctgagaacctcctcctccgtccttggtatctccctcgtcagcaatacgaaagggaagagaagcgagagggaagggaaggggcacaaccgagacagcctcaggtccggccgtccgtcgccgtccaacgcaaagggtgaaaggaagaacaaaacaaagctcagacagaaggcagccaacatctctgctccttcaggaggtctacagcttccagcgaaaacaacgcctcccagcagtgggaacggcaaggaggagagcgcagcagcagcagcagctgctgctgccaggcatggtggtgatccggcggcgaatgcttcgaatgacgccgaaatgcccgacctggctaacctcgagctgccaggactggacgccgactttggcggctggttgaatctggacgacgacgacgccctccaggacctcgacctgatgggcctcgagatccccatggacgacatcaacgagataaacctcatgatatagccgtacattttccttcgtttctcacagtaacaaccaacagagaaaaagctcccgatagtgcgtgcacaggtaaccaccaaccctgcagttttaacaccaggcctggttattaagcttcacttagggctagtttggaaactcaaatcccttccggtattggaggtgattgaggggagaatgcaataatttcttcctcaatctcctctaattctggaggggatttgagtttccaaactagctctgataaaagagagagagagggacagacagttgatagagacctcttgacaatcccaacaaccacgtgttgtcttttttgtaccagcgtgtaatttgcctccctgccttgtaccctcccctatacgttcatctgtcgtgtagacgtcggtgtacatatctattttggcgccctagttacaaggtagggaggctagttactgcatctgttactcgctccaaaggttgtgtgtgtacagactgaggacatttctcatctcatggcagcgccgactttccccccttattgcgagcataagatcacattcttttatctcagattagattgaggctagagactattccagccaatcaatgttaacgtaaataaatgtatcattccagctggaaccatttcatagtaaacgaaatgatactatctctagcagcttacctatttctatccctatatattaaaactttactcagtattgcagtctacggcacaaaacattaacaaacgcccatcttagatatactgtgtataaacacatagcaaaactatctggaaaaatggaggaatagcatagatcaaacacgtggttacaactcgtcctgag

SEQ ID NO: 30794 - DNA, 4984 bp, Zea Mays
cggttcttcaccagttgcgttcgtcgttcccgttctcctcctcgtatcccctggtccgtacgtcgtggccaccggcgccgcctagctcgcaccgccgacagcgtctcagactagatcgcgcctccccctcccaaatcgggttccagtcgggctcccgcaaccgccgccgtctacaccaggtgccgaggccgatcttttcgtcggcaaagatcgccgagcagatctgcccctggccgtcgccctacaccaggtgccgatatcttcgccagcgaagagcgcccagcaggtacagtgatttgggattctatactacctagctttatgattgcaagacctggttattttcacctgaggttgtgttcaacatgttagtggcatgaaaattgcctcaattgggggcaatggcatctagtacaaaatcagatttagtgtctggtagccctgatgggcatggatacttcaatgcacaacgtgggtcctatgcagctgcttcattggaaaggtcaggaagcttccgtgaaggcggtgatggctatgcgatgttttcagcatcaaactcatcaaggtcagcggcagtgaactctatcaatctagttcagtcacttgcactggacttgagaccggcaactgtggatcacaaaacatctcggttagatctaaagaaatcaataagttccatttttggaacctctgcagaagattcaacatcacttccatctctagggagaaatttaccaaatgctatcgaagagatcagacgtatgaggagtaatcttaacgacaattcaaataaggccagggaaagatctagagcttttggtggtgctatggcgaagattgataaactttgtcccaatattgtgcgaaaacgttctcgaggagacagttcatctaatgaacgatctagtgtgttatcatctggaggagttacccctaaaaatgttcctcagagccatttaaatgcagatgatatggaagctgggcttcagagagaagagaggacaaagaatgcaggacaaaataggagaatacgtacatccatggtggagatggatgcaagaacagctggtccatcaagaggccccggacctactgataggatctcagatcctggtaaagccaccaatggcagttctgcagttccagaagaaaaaatcagaggtttggcaactactatcgatggttgggaaaagccaaaaatgaagaaaaagcgttctaccattaaggcagacatgtcactggctggtgttttgaggactgttgatgtagaccgagagtcaaaacaaggcatgcagcacaagtttactaatgacggtagggcgagaatgacaagttctagtttcaggtctggaactgttgcatctggcacaaccaaagcagatttgctttctacacaaaatggtcttgttatgcgacccttaaataggagtgatcaagacaatggtttccatcctactaacaaaagggaacgtcaagctgcattagataaagaaacgcccaacccgagaaccattaacaagcctaatgaagacgacagtggatgtaacattgcatcattaccgaaggcgaatggatctgcgcggggaccccgatcaaattcagggtcaatattgaagtcatatccaaacattcatcgatcacaagctagttctgatgattgggaacatccgtctggtacaaataagttaatttctgctggtggatctggcattcataaacgtacaaaatcaacacattcattatctcctccgatccaatggggtgggcagaggcctcagaagatatcccgttcagcaaggaagtcaaatttagtccctataatcactactgatagtgcactggtaccaggttcgctggacagtcctgtcaatgaagattgtgcaggtttaccgaggcgtgcatctgtaaatagccttcaacaaacaaaacgaggagatcatgggctctcaactggacctgaaggcaatgagcctgtagttgctgagaaaaagctaagggacaagggcaaaagggctggtgaactggatgatgggcatggctctggttttcagaagattgctatgcttgggcatccttccaaaaggaataagttgcctgctgatgaggatattggagatgctttaaggagacaagcaagagttgtcccgggttttactctgaccaggcctgggactcctgtatccattgacaagcttgaaaatgctccgattacaaaacaaagaagtgtgaggacagtctcagagagaactgagagtaaatctgggagaccactgatgaagaaaatatctgagcgcaaaagtaatgcacggcctaggcatacaagtagcagtgtgcagtcagactctcctgtgcaatctgaagatgatcatgaggaacttcttgcttcagcaaatgctgccctaagatctgcttgtgcaagcacgttctggcggcaggttgaacctttcttcgcatttttgactgcagaagacatcacatatcttagtcaacagatacatttaccagatgattcctcttcaagtaggtcaatggaagggggtgaatgccaaaaatataagggtggtcttgaatacatttcacacccctcaactccagccgctagcaacaaagatgatcacgctgctcttccaaatggttttggcttgaatcagttggataatgacataggggttggctgggaggcaagctgcattgaacctatcctcgatcaacttgtccatgggattggggtaccaggatggtcttcagttggccaaagacttattcaagcattgattgatgaagataggatcgatagtattaccaacaacacttacataagcgagggctatgcatttgatacacatgaaattcattttgatggaggaggatggaagcctcactcaaataattataagttagaacctttagcgaattttgaagcttcaaggaggggcccaaatggtctgacaatggattctgactggaaatataatgatgtgtcaaatagaagtggcaatgtcatggataaaaccaaggtgtggcctgagtttcagtacagtgagatgtgcttcaatgataggattatcattgagctgagtgaagttggtgtatctattgaacctgtgagtgaggacgaggatattaatgctgaaatctgtaaattagaaggccaacttcgtaaagaggttgtggagaagaaaaacttgctattgaaactggatggcattgttgcaactgcaaaagagtctcagcatagggaattctcacgccttgccatggatagacttctcctgagagcatatgagaaatatatggccttctgtggtccaaatgtttcaagcagcaaaaatgtcaatagaactggcaaacatgctgctctaagttttgtcaaacgagtactagtgcgatgccaaaactacgaagaggcggggacaagttgctttgatgagcctattttcaaggacatgtttttatcagcgacgtctcacagacgcagtctagatactgcttcacaagataacaatacaacagcgagaccagtccacagggccggtgcaccagacgcttcgcgaggaagcagtcacccgacggacctgtcgtttgcaaaggaggatccctggacaaacaacgtaaagcagcgggaactgttgctggacgaggttgtaggtagcataacaggaggagctctgagaacctcctcctccgtccttggtatctccctcgtcagcaatacgaaagggaagagaagcgagagggaagggaaggggcacaaccgagacagcctcaggtccggccgtccgtcgccgtccaacgcaaagggtgaaaggaagaacaaaacaaagctcagacagaaggcagccaacatctctgctccttcaggaggtctacagcttccagcgaaaacaacgcctcccagcagtgggaacggcaaggaggagagcgcagcagcagcagcagctgctgctgccaggcatggtggtgatccggcggcgaatgcttcgaatgacgccgaaatgcccgacctggctaacctcgagctgccaggactggacgccgactttggcggctggttgaatctggacgacgacgacgccctccaggacctcgacctgatgggcctcgagatccccatggacgacatcaacgagataaacctcatgatatagccgtacattttccttcgtttctcacagtaacaaccaacagagaaaaagctcccgatagtgcgtgcacaggtaaccaccaaccctgcagttttaacaccaggcctggttattaagcttcacttagggctagtttggaaactcaaatcccttccggtattggaggtgattgaggggagaatgcaataatttcttcctcaatctcctctaattctggaggggatttgagtttccaaactagctctgataaaagagagagagagggacagacagttgatagagacctcttgacaatcccaacaaccacgtgttgtcttttttgtaccagcgtgtaatttgcctccctgccttgtaccctcccctatacgttcatctgtcgtgtagacgtcggtgtacatatctattttggcgccctagttacaaggtagggaggctagttactgcatctgttactcgctccaaaggttgtgtgtgtacagactgaggacatttctcatctcatggcagcgccgactttccccccttattgcgagcataagatcacattcttttatctcagattagattgaggctagagactattccagccaatcaatgttaacgtaaataaatgtatcattccagctggaaccatttcatagtaaacgaaatgatactatctctagcagcttacctatttctatccctatatattaaaactttactcagtattgcagtctacggcacaaaacattaacaaacgcccatcttagatatactgtgtataaacacatagcaaaactatctggaaaaatggaggaatagcatagatcaaacacgtggttacaactcgtcctgag

SEQ ID NO: 30795 - DNA, 5943 bp, Zea Mays
cggttcttcaccagttgcgttcgtcgttcccgttctcctcctcgtatcccctggtccgtacgtcgtggccaccggcgccgcctagctcgcaccgccgacagcgtctcagactagatcgcgcctccccctcccaaatcgggttccagtcgggctcccgcaaccgccgccgtctacaccaggtgccgaggccgatcttttcgtcggcaaagatcgccgagcagatctgcccctggccgtcgccctacaccaggtgccgatatcttcgccagcgaagagcgcccagcagctgcttcattggaaaggtcaggaagcttccgtgaaggcggtgatggctatgcgatgttttcagcatcaaactcatcaaggtcagcggcagtgaactctatcaatctagttcagtcacttgcactggacttgagaccggcaactgtggatcacaaaacatctcggttagatctaaagaaatcaataagttccatttttggaacctctgcagaagattcaacatcacttccatctctagggagaaatttaccaaatgctatcgaagagatcagacgtatgaggagtaatcttaacgacaattcaaataaggccagggaaagatctagagcttttggtggtgctatggcgaagattgataaactttgtcccaatattgtgcgaaaacgttctcgaggagacagttcatctaatgaacgatctagtgtgttatcatctggaggagttacccctaaaaatgttcctcagagccatttaaatgcagatgatatggaagctgggcttcagagagaagagaggacaaagaatgcaggacaaaataggagaatacgtacatccatggtggagggcaagcttggtgcagtggtgagagctgtctcaccgagtctccaggtcgcaggccttatttggcaatgtggcttagttgctgtttttagcatgatggatgcaagaacagctggtccatcaagaggccccggacctactgataggatctcagatcctggtaaagccaccaatggcagttctgcagttccagaagaaaaaatcagaggtttggcaactactatcgatggttgggaaaagccaaaaatgaagaaaaagcgttctaccattaaggcagacatgtcactggctggtgttttgaggactgttgatgtagaccgagagtcaaaacaaggcatgcagcacaagtttactaatgacggtagggcgagaatgacaagttctagtttcaggtctggaactgttgcatctggcacaaccaaagcagatttgctttctacacaaaatggtcttgttatgcgacccttaaataggagtgatcaagacaatggtttccatcctactaacaaaagggaacgtcaagctgcattagataaagaaacgcccaacccgagaaccattaacaagcctaatgaagacgacagtggatgtaacattgcatcattaccgaaggcgaatggatctgcgcggggaccccgatcaaattcagggtcaatattgaagtcatatccaaacattcatcgatcacaagctagttctgatgattgggaacatccgtctggtacaaataagttaatttctgctggtggatctggcattcataaacgtacaaaatcaacacattcattatctcctccgatccaatggggtgggcagaggcctcagaagatatcccgttcagcaaggaagtcaaatttagtccctataatcactactgatagtgcactggtaccaggttcgctggacagtcctgtcaatgaagattgtgcaggtttaccgaggcgtgcatctgtaaatagccttcaacaaacaaaacgaggagatcatgggctctcaactggacctgaaggcaatgagcctgtagttgctgagaaaaagctaagggacaagggcaaaagggctggtgaactggatgatgggcatggctctggttttcagaagattgctatgcttgggcatccttccaaaaggaataagttgcctgctgatgaggatattggagatgctttaaggagacaagcaagagttgtcccgggttttactctgaccaggcctgggactcctgtatccattgacaagcttgaaaatgctccgattacaaaacaaagaagtgtgaggacagtctcagagagaactgagagtaaatctgggagaccactgatgaagaaaatatctgagcgcaaaagtaatgcacggcctaggcatacaagtagcagtgtgcagtcagactctcctgtgcaatctgaagatgatcatgaggaacttcttgcttcagcaaatgctgccctaagatctgcttgtgcaagcacgttctggcggcaggttgaacctttcttcgcatttttgactgcagaagacatcacatatcttagtcaacagatacatttaccagatgattcctcttcaagtaggtcaatggaagggggtgaatgccaaaaatataagggtggtcttgaatacatttcacacccctcaactccagccgctagcaacaaagatgatcacgctgctcttccaaatggttttggcttgaatcagttggataatgacataggggttggctgggaggcaagctgcattgaacctatcctcgatcaacttgtccatgggattggggtaccaggatggtcttcagttggccaaagacttattcaagcattgattgatgaagataggatcgatagtattaccaacaacacttacataagcgagggctatgcatttgatacacatgaaattcattttgatggaggaggatggaagcctcactcaaataattataagttagaacctttagcgaattttgaagcttcaaggaggggcccaaatggtctgacaatggattctgactggaaatataatgatgtgtcaaatagaagtggcaatgtcatggataaaaccaaggtgtggcctgagtttcagtacagtgagatgtgcttcaatgataggattatcattgagctgagtgaagttggtgtatctattgaacctgtgcctgatcttgcacagagtgaggacgaggatattaatgctgaaatctgtaaattagaaggccaacttcgtaaagaggttgtggagaagaaaaacttgctattgaaactggatggcattgttgcaactgcaaaagagtctcagcatagggaattctcacgccttgccatggatagacttctcctgagagcatatgagaaatatatggccttctgtggtccaaatgtttcaagcagcaaaaatgtcaatagaactggcaaacatgctgctctaagttttgtcaaacgagtactagtgcgatgccaaaactacgaagaggcggggacaagttgctttgatgagcctattttcaaggacatgtttttatcagcgacgtctcacagacgcagtctagatactgcttcacaagataacaatacaacagcgagaccagtccacagggccggtgcaccagacgcttcgcgaggaagcagtcacccgacggacctgtcgtttgcaaaggaggatccctggacaaacaacgtaaagcagcgggaactgttgctggacgaggttgtaggtagcataacaggaggagctctgagaacctcctcctccgtccttggtatctccctcgtcagcaatacgaaagggaagagaagcgagagggaagggaaggggcacaaccgagacagcctcaggtccggccgtccgtcgccgtccaacgcaaagggtgaaaggaagaacaaaacaaagctcagacagaaggcagccaacatctctgctccttcaggaggtctacagcttccagcgaaaacaacgcctcccagcagtgggaacggcaaggaggagagcgcagcagcagcagcagctgctgctgccaggcatggtggtgatccggcggcgaatgcttcgaatgacgccgaaatgcccgacctggctaacctcgagctgccaggactggacgccgactttggcggctggttgaatctggacgacgacgacgccctccaggacctcgacctgatgggcctcgagatccccatggacgacatcaacgagataaacctcatgatatagccgtacattttccttcgtttctcacagtaacaaccaacagagaaaaagctcccgatagtgcgtgcacaggccaccgccggcgcccgcgcgcggaggaagtgcatgcagccaggagagagctagcatagcagctaggagaaactaaccatggccgcctctcgccgctcttccgttgagctcccagtcgccgacccggcggcggatccagaccaagtccggctgcaccagctgggatacaagcaggagctcaagcgaggcctctccgtcctttccaacttcgccttgtctttctccatcatctccgtgctgatgggcgtgacgatcacctacaacaccggcctgcgctacggcgggccggtgtccatgacgctgggctggttcctcgtctccgccctcaacgcatgcgtggcgctgtccatggcggagatctgctcggcgtacccgacctccggcggcctctactactggagcgctaagctcgccggcaaggactgggctcccctcgcttcctggctcaccggatgtgggcaggtacgacgagcgtcgacttctcgctggcgcagcttgtgcaggtgatcgtcctgcttgccaccggaggcctcaacggcggcggctacatggcatccaagtacgtcgtgctggccatctacggcgccatcctggtcatacacgggctaatgaacacctggcatggttcggccatctcggagcgttctggaacaccgcaggtacatttgctcttgtgatcatcatcccagccgttgcgacggagagggcgagcacggagttcatcttcacgcatttgaacacagacaatggcatgggcgtccacggcaaggcctacatccttgccttggggctgctgatgagccagtactcgctcatcggctatgacgcatctgcacacatgacggaggagacgaagaacgcggactggagtgggccgatggggatcgtcacctccgtcgctctgtccagcgtcttgggatgggtctacctggtggccctggcgtcgctgatgacggacatcccgtacctcctggaccccggcaacgacgccggcgggtacgccgtcgcgcaggccctctacgacgctttccgcaggaggttcggcagcggcgtcggaggcgtcgtttgcttggggatcgtcgccgtcaccaccttcctctgcggctccgcgtgcgtcaccagcaactcaaggatggggtatgccttctccagggacggagcggtgccattctcgcacgtatggtacaaggtgaacaagcaggaggtgcccttgaacgtcgtctggctctccgtgtccgtggcgttcgccatggctctcacgtcgctggggagccaggtggcattccaggcgatgctgtccgtggcgaccgtcgggccgtacatcgcctacggactgcccatcgtcttccgcgtcaccacggcccggagatccttcgtcccggggccgttccacctcgggagatacggcctcctcgtcggctgggtcgccgtcgcgtgggtggccgccgtcaccgtgctcttctccctgcccgtagcgtaccccgtcgccgaggacaccttcaactacgcgccggtcgtcgtcgtcggcgtgctgctgctcagcgtcggctcgtgggtgctccacgcccgcttctggttccaagggccaatcaccaacgttgatgtcgcctaagctagagtgtgtatgtgttgatcaaggcaagctactttgtagtcagaaatatcacacaaatgcaaatatctctaattatactctacatgaggctaattgaacaattgacatgcaacaagtaattgaaagtgattgcaagagtaagtatagtagcaaatcactagggaggataagggatgacacaagatgtatccataaggttcgat

SEQ ID NO: 30796 - DNA, 6612 bp, Zea Mays
cggttcttcaccagttgcgttcgtcgttcccgttctcctcctcgtatcccctggtccgtacgtcgtggccaccggcgccgcctagctcgcaccgccgacagcgtctcagactagatcgcgcctccccctcccaaatcgggttccagtcgggctcccgcaaccgccgccgtctacaccaggtgccgaggccgatcttttcgtcggcaaagatcgccgagcagatctgcccctggccgtcgccctacaccaggtgccgatatcttcgccagcgaagagcgcccagcagctgcttcattggaaaggtcaggaagcttccgtgaaggcggtgatggctatgcgatgttttcagcatcaaactcatcaaggtcagcggcagtgaactctatcaatctagttcagtcacttgcactggacttgagaccggcaactgtggatcacaaaacatctcggttagatctaaagaaatcaataagttccatttttggaacctctgcagaagattcaacatcacttccatctctagggagaaatttaccaaatgctatcgaagagatcagacgtatgaggagtaatcttaacgacaattcaaataaggccagggaaagatctagagcttttggtggtgctatggcgaagattgataaactttgtcccaatattgtgcgaaaacgttctcgaggagacagttcatctaatgaacgatctagtgtgttatcatctggaggagttacccctaaaaatgttcctcagagccatttaaatgcagatgatatggaagctgggcttcagagagaagagaggacaaagaatgcaggacaaaataggagaatacgtacatccatggtggagggcaagcttggtgcagtggtgagagctgtctcaccgagtctccaggtcgcaggccttatttggcaatgtggcttagttgctgtttttagcatgatggatgcaagaacagctggtccatcaagaggccccggacctactgataggatctcagatcctggtaaagccaccaatggcagttctgcagttccagaagaaaaaatcagaggtttggcaactactatcgatggttgggaaaagccaaaaatgaagaaaaagcgttctaccattaaggcagacatgtcactggctggtgttttgaggactgttgatgtagaccgagagtcaaaacaaggcatgcagcacaagtttactaatgacggtagggcgagaatgacaagttctagtttcaggtctggaactgttgcatctggcacaaccaaagcagatttgctttctacacaaaatggtcttgttatgcgacccttaaataggagtgatcaagacaatggtttccatcctactaacaaaagggaacgtcaagctgcattagataaagaaacgcccaacccgagaaccattaacaagcctaatgaagacgacagtggatgtaacattgcatcattaccgaaggcgaatggatctgcgcggggaccccgatcaaattcagggtcaatattgaagtcatatccaaacattcatcgatcacaagctagttctgatgattgggaacatccgtctggtacaaataagttaatttctgctggtggatctggcattcataaacgtacaaaatcaacacattcattatctcctccgatccaatggggtgggcagaggcctcagaagatatcccgttcagcaaggaagtcaaatttagtccctataatcactactgatagtgcactggtaccaggttcgctggacagtcctgtcaatgaagattgtgcaggtttaccgaggcgtgcatctgtaaatagccttcaacaaacaaaacgaggagatcatgggctctcaactggacctgaaggcaatgagcctgtagttgctgagaaaaagctaagggacaagggcaaaagggctggtgaactggatgatgggcatggctctggttttcagaagattgctatgcttgggcatccttccaaaaggaataagttgcctgctgatgaggatattggagatgctttaaggagacaagcaagagttgtcccgggttttactctgaccaggcctgggactcctgtatccattgacaagcttgaaaatgctccgattacaaaacaaagaagtgtgaggacagtctcagagagaactgagagtaaatctgggagaccactgatgaagaaaatatctgagcgcaaaagtaatgcacggcctaggcatacaagtagcagtgtgcagtcagactctcctgtgcaatctgaagatgatcatgaggaacttcttgcttcagcaaatgctgccctaagatctgcttgtgcaagcacgttctggcggcaggttgaacctttcttcgcatttttgactgcagaagacatcacatatcttagtcaacagatacatttaccagatgattcctcttcaagtaggtcaatggaagggggtgaatgccaaaaatataagggtggtcttgaatacatttcacacccctcaactccagccgctagcaacaaagatgatcacgctgctcttccaaatggttttggcttgaatcagttggataatgacataggggttggctgggaggcaagctgcattgaacctatcctcgatcaacttgtccatgggattggggtaccaggatggtcttcagttggccaaagacttattcaagcattgattgatgaagataggatcgatagtattaccaacaacacttacataagcgagggctatgcatttgatacacatgaaattcattttgatggaggaggatggaagcctcactcaaataattataagttagaacctttagcgaattttgaagcttcaaggaggggcccaaatggtctgacaatggattctgactggaaatataatgatgtgtcaaatagaagtggcaatgtcatggataaaaccaaggtgtggcctgagtttcagtacagtgagatgtgcttcaatgataggattatcattgagctgagtgaagttggtgtatctattgaacctgtgcctgatcttgcacagagtgaggacgaggatattaatgctgaaatctgtaaattagaaggccaacttcgtaaagaggttgtggagaagaaaaacttgctattgaaactggatggcattgttgcaactgcaaaagagtctcagcatagggaattctcacgccttgccatggatagacttctcctgagagcatatgagaaatatatggccttctgtggtccaaatgtttcaagcagcaaaaatgtcaatagaactggcaaacatgctgctctaagttttgtcaaacgagtactagtgcgatgccaaaactacgaagaggcggggacaagttgctttgatgagcctattttcaaggacatgtttttatcagcgacgtctcacagacgcagtctagatactgcttcacaagataacaatacaacagcgagaccagtccacagggccggtgcaccagacgcttcgcgaggaagcagtcacccgacggacctgtcgtttgcaaaggaggatccctggacaaacaacgtaaagcagcgggaactgttgctggacgaggttgtaggtagcataacaggaggagctctgagaacctcctcctccgtccttggtatctccctcgtcagcaatacgaaagggaagagaagcgagagggaagggaaggggcacaaccgagacagcctcaggtccggccgtccgtcgccgtccaacgcaaagggtgaaaggaagaacaaaacaaagctcagacagaaggcagccaacatctctgctccttcaggaggtctacagcttccagcgaaaacaacgcctcccagcagtgggaacggcaaggaggagagcgcagcagcagcagcagctgctgctgccaggcatggtggtgatccggcggcgaatgcttcgaatgacgccgaaatgcccgacctggctaacctcgagctgccaggactggacgccgactttggcggctggttgaatctggacgacgacgacgccctccaggacctcgacctgatgggcctcgagatccccatggacgacatcaacgagataaacctcatgatatagccgtacattttccttcgtttctcacagtaacaaccaacagagaaaaagctcccgatagtgcgtgcacaggccaccgccggcgcccgcgcgcggaggaagtgcatgcagccaggagagagctagcatagcagctaggagaaactaaccatggccgcctctcgccgctcttccgttgagctcccagtcgccgacccggcggcggatccagaccaagtccggctgcaccagctgggatacaagcaggagctcaagcgaggcctctccgtcctttccaacttcgccttgtctttctccatcatctccgtgctgatgggcgtgacgatcacctacaacaccggcctgcgctacggcgggccggtgtccatgacgctgggctggttcctcgtctccgccctcaacgcatgcgtggcgctgtccatggcggagatctgctcggcgtacccgacctccggcggcctctactactggagcgctaagctcgccggcaaggactgggctcccctcgcttcctggctcaccggatggttcaacatcgtgggacaggtacgtacgtcgtacgccggcctgatcaatcttgcttcacagattcatgcgtgcatagctgactagctagctgcaacacatatagtatacactgcgtattttcatccatgctgaaattaaaatattcttcataatctagtcaagtacttccataatacgcaatacattacacataggttctttgaaatcgagagccaaatttagaaatttctgtcttatattacaaacataagagcaagtataacgagaggtggtaagcaggctaaatgccgatgcagaagagagagagaggagtggagaggagacatagggaaaacggactgcagctgggttagacacaagaaccaaaaaaaactttacaagagatggtaagtgctggttttgcaaaaaatattgaagagctaactataattatacggatgaactgagagagactgcaaatagactcagtcggctatattattaaacttttttccaattaatgcggtgtaaaaaaaatgagagtactagctagctagccagccagagtactccacagtccacactacatacctggttttgcgtgctttgggcacagtcagctctggcggcgaagggcagagtctgcacccgatgatagtcttgttgattaaactatgtcacacacacagtgggcaggtacgacgagcgtcgacttctcgctggcgcagcttgtgcaggtgatcgtcctgcttgccaccggaggcctcaacggcggcggctacatggcatccaagtacgtcgtgctggccatctacggcgccatcctggtcatacacgggctaatgaacacctggcatggttcggccatctcggagcgttctggaacaccgcaggtacatttgctcttgtgatcatcatcccagccgttgcgacggagagggcgagcacggagttcatcttcacgcatttgaacacagacaatggcatgggcgtccacggcaaggcctacatccttgccttggggctgctgatgagccagtactcgctcatcggctatgacgcatctgcacacatgacggaggagacgaagaacgcggactggagtgggccgatggggatcgtcacctccgtcgctctgtccagcgtcttgggatgggtctacctggtggccctggcgtcgctgatgacggacatcccgtacctcctggaccccggcaacgacgccggcgggtacgccgtcgcgcaggccctctacgacgctttccgcaggaggttcggcagcggcgtcggaggcgtcgtttgcttggggatcgtcgccgtcaccaccttcctctgcggctccgcgtgcgtcaccagcaactcaaggatggggtatgccttctccagggacggagcggtgccattctcgcacgtatggtacaaggtgaacaagcaggaggtgcccttgaacgtcgtctggctctccgtgtccgtggcgttcgccatggctctcacgtcgctggggagccaggtggcattccaggcgatgctgtccgtggcgaccgtcgggccgtacatcgcctacggactgcccatcgtcttccgcgtcaccacggcccggagatccttcgtcccggggccgttccacctcgggagatacggcctcctcgtcggctgggtcgccgtcgcgtgggtggccgccgtcaccgtgctcttctccctgcccgtagcgtaccccgtcgccgaggacaccttcaactacgcgccggtcgtcgtcgtcggcgtgctgctgctcagcgtcggctcgtgggtgctccacgcccgcttctggttccaagggccaatcaccaacgttgatgtcgcctaagctagagtgtgtatgtgttgatcaaggcaagctactttgtagtcagaaatatcacacaaatgcaaatatctctaattatactctacatgaggctaattgaacaattgacatgcaacaagtaattgaaagtgattgcaagagtaagtatagtagcaaatcactagggaggataagggatgacacaagatgtatccataaggttcgat

SEQ ID NO: 30797 - DNA, 4938 bp, Zea Mays
attctatactacctagctttatgattgcaagacctggttattttcacctgaggttgtgttcaacatgttagtggcatgaaaattgcctcaattgggggcaatggcatctagtacaaaatcagatttagtgtctggtagccctgatgggcatggatacttcaatgcacaacgtgggtcctatgcagctgcttcattggaaaggtcaggaagcttccgtgaaggcggtgatggctatgcgatgttttcagcatcaaactcatcaaggtcagcggcagtgaactctatcaatctagttcagtcacttgcactggacttgagaccggcaactgtggatcacaaaacatctcggttagatctaaagaaatcaataagttccatttttggaacctctgcagaagattcaacatcacttccatctctagggagaaatttaccaaatgctatcgaagagatcagacgtatgaggagtaatcttaacgacaattcaaataaggccagggaaagatctagagcttttggtggtgctatggcgaagattgataaactttgtcccaatattgtgcgaaaacgttctcgaggagacagttcatctaatgaacgatctagtgtgttatcatctggaggagttacccctaaaaatgttcctcagagccatttaaatgcagatgatatggaagctgggcttcagagagaagagaggacaaagaatgcaggacaaaataggagaatacgtacatccatggtggagggcaagcttggtgcagtggtgagagctgtctcaccgagtctccaggtcgcaggccttatttggcaatgtggcttagttgctgtttttagcatgatggatgcaagaacagctggtccatcaagaggccccggacctactgataggatctcagatcctggtaaagccaccaatggcagttctgcagttccagaagaaaaaatcagaggtttggcaactactatcgatggttgggaaaagccaaaaatgaagaaaaagcgttctaccattaaggcagacatgtcactggctggtgttttgaggactgttgatgtagaccgagagtcaaaacaaggcatgcagcacaagtttactaatgacggtagggcgagaatgacaagttctagtttcaggtctggaactgttgcatctggcacaaccaaagcagatttgctttctacacaaaatggtcttgttatgcgacccttaaataggagtgatcaagacaatggtttccatcctactaacaaaagggaacgtcaagctgcattagataaagaaacgcccaacccgagaaccattaacaagcctaatgaagacgacagtggatgtaacattgcatcattaccgaaggcgaatggatctgcgcggggaccccgatcaaattcagggtcaatattgaagtcatatccaaacattcatcgatcacaagctagttctgatgattgggaacatccgtctggtacaaataagttaatttctgctggtggatctggcattcataaacgtacaaaatcaacacattcattatctcctccgatccaatggggtgggcagaggcctcagaagatatcccgttcagcaaggaagtcaaatttagtccctataatcactactgatagtgcactggtaccaggttcgctggacagtcctgtcaatgaagattgtgcaggtttaccgaggcgtgcatctgtaaatagccttcaacaaacaaaacgaggagatcatgggctctcaactggacctgaaggcaatgagcctgtagttgctgagaaaaagctaagggacaagggcaaaagggctggtgaactggatgatgggcatggctctggttttcagaagattgctatgcttgggcatccttccaaaaggaataagttgcctgctgatgaggatattggagatgctttaaggagacaagcaagagttgtcccgggttttactctgaccaggcctgggactcctgtatccattgacaagcttgaaaatgctccgattacaaaacaaagaagtgtgaggacagtctcagagagaactgagagtaaatctgggagaccactgatgaagaaaatatctgagcgcaaaagtaatgcacggcctaggcatacaagtagcagtgtgcagtcagactctcctgtgcaatctgaagatgatcatgaggaacttcttgcttcagcaaatgctgccctaagatctgcttgtgcaagcacgttctggcggcaggttgaacctttcttcgcatttttgactgcagaagacatcacatatcttagtcaacagatacatttaccagatgattcctcttcaagtaggtcaatggaagggggtgaatgccaaaaatataagggtggtcttgaatacatttcacacccctcaactccagccgctagcaacaaagatgatcacgctgctcttccaaatggttttggcttgaatcagttggataatgacataggggttggctgggaggcaagctgcattgaacctatcctcgatcaacttgtccatgggattggggtaccaggatggtcttcagttggccaaagacttattcaagcattgattgatgaagataggatcgatagtattaccaacaacacttacataagcgagggctatgcatttgatacacatgaaattcattttgatggaggaggatggaagcctcactcaaataattataagttagaacctttagcgaattttgaagcttcaaggaggggcccaaatggtctgacaatggattctgactggaaatataatgatgtgtcaaatagaagtggcaatgtcatggataaaaccaaggtgtggcctgagtttcagtacagtgagatgtgcttcaatgataggattatcattgagctgagtgaagttggtgtatctattgaacctgtgagtgaggacgaggatattaatgctgaaatctgtaaattagaaggccaacttcgtaaagaggttgtggagaagaaaaacttgctattgaaactggatggcattgttgcaactgcaaaagagtctcagcatagggaattctcacgccttgccatggatagacttctcctgagagcatatgagaaatatatggaagggtgcagcattagcgtcagcatgtggtccagagtggttggtgataggacctcaagctgtgtggtgtccgtctcctctagaacctgcaaatgggagagggagagtagcctcatcaaatccatctaccggcggaagtccacggatgggatgtggtcagtggccttctgtggtccaaatgtttcaagcagcaaaaatgtcaatagaactggcaaacatgctgctctaagttttgtcaaacgagtactagtgcgatgccaaaactacgaagaggcggggacaagttgctttgatgagcctattttcaaggacatgtttttatcagcgacgtctcacagacgcagtctagatactgcttcacaagataacaatacaacagcgagaccagtccacagggccggtgcaccagacgcttcgcgaggaagcagtcacccgacggacctgtcgtttgcaaaggaggatccctggacaaacaacgtaaagcagcgggaactgttgctggacgaggttgtaggtagcataacaggaggagctctgagaacctcctcctccgtccttggtatctccctcgtcagcaatacgaaagggaagagaagcgagagggaagggaaggggcacaaccgagacagcctcaggtccggccgtccgtcgccgtccaacgcaaagggtgaaaggaagaacaaaacaaagctcagacagaaggcagccaacatctctgctccttcaggaggtctacagcttccagcgaaaacaacgcctcccagcagtgggaacggcaaggaggagagcgcagcagcagcagcagctgctgctgccaggcatggtggtgatccggcggcgaatgcttcgaatgacgccgaaatgcccgacctggctaacctcgagctgccaggactggacgccgactttggcggctggttgaatctggacgacgacgacgccctccaggacctcgacctgatgggcctcgagatccccatggacgacatcaacgagataaacctcatgatatagccgtacattttccttcgtttctcacagtaacaaccaacagagaaaaagctcccgatagtgcgtgcacaggtaaccaccaaccctgcagttttaacaccaggcctggttattaagcttcacttagggctagtttggaaactcaaatcccttccggtattggaggtgattgaggggagaatgcaataatttcttcctcaatctcctctaattctggaggggatttgagtttccaaactagctctgataaaagagagagagagggacagacagttgatagagacctcttgacaatcccaacaaccacgtgttgtcttttttgtaccagcgtgtaatttgcctccctgccttgtaccctcccctatacgttcatctgtcgtgtagacgtcggtgtacatatctattttggcgccctagttacaaggtagggaggctagttactgcatctgttactcgctccaaaggttgtgtgtgtacagactgaggacatttctcatctcatggcagcgccgactttccccccttattgcgagcataagatcacattcttttatctcagattagattgaggctagagactattccagccaatcaatgttaacgtaaataaatgtatcattccagctggaaccatttcatagtaaacgaaatgatactatctctagcagcttacctatttctatccctatatattaaaactttactcagtattgcagtctacggcacaaaacattaacaaacgcccatcttagatatactgtgtataaacacatagcaaaactatctggaaaaatggaggaatagcatagatcaaacacgtggttacaactcgtcctgag

SEQ ID NO: 30798 - DNA, 4903 bp, Zea Mays
atggcatctagtacaaaatcagatttagtgtctggtagccctgatgggcatggatacttcaatgcacaacgtgggtcctatgcagctgcttcattggaaaggtcaggaagcttccgtgaaggcggtgatggctatgcgatgttttcagcatcaaactcatcaaggtcagcggcagtgaactctatcaatctagttcagtcacttgcactggacttgagaccggcaactgtggatcacaaaacatctcggttagatctaaagaaatcaataagttccatttttggaacctctgcagaagattcaacatcacttccatctctagggagaaatttaccaaatgctatcgaagagatcagacgtatgaggagtaatcttaacgacaattcaaataaggccagggaaagatctagagcttttggtggtgctatggcgaagattgataaactttgtcccaatattgtgcgaaaacgttctcgaggagacagttcatctaatgaacgatctagtgtgttatcatctggaggagttacccctaaaaatgttcctcagagccatttaaatgcagatgatatggaagctgggcttcagagagaagagaggacaaagaatgcaggacaaaataggagaatacgtacatccatggtggagggcaagcttggtgcagtggtgagagctgtctcaccgagtctccaggtcgcaggccttatttggcaatgtggcttagttgctgtttttagcatgatggatgcaagaacagctggtccatcaagaggccccggacctactgataggatctcagatcctggtaaagccaccaatggcagttctgcagttccagaagaaaaaatcagaggtttggcaactactatcgatggttgggaaaagccaaaaatgaagaaaaagcgttctaccattaaggcagacatgtcactggctggtgttttgaggactgttgatgtagaccgagagtcaaaacaaggcatgcagcacaagtttactaatgacggtctggaactgttgcatctggcacaaccaaagcagatttgctttctacacaaaatggtcttgttatgcgacccttaaataggagtgatcaagacaatggtttccatcctactaacaaaagggaacgtcaagctgcattagataaagaaacgcccaacccgagaaccattaacaagcctaatgaagacgacagtggatgtaacattgcatcattaccgaaggcgaatggatctgcgcggggaccccgatcaaattcagggtcaatattgaagtcatatccaaacattcatcgatcacaagctagttctgatgattgggaacatccgtctggtacaaataagttaatttctgctggtggatctggcattcataaacgtacaaaatcaacacattcattatctcctccgatccaatggggtgggcagaggcctcagaagatatcccgttcagcaaggaagtcaaatttagtccctataatcactactgatagtgcactggtaccaggttcgctggacagtcctgtcaatgaagattgtgcaggtttaccgaggcgtgcatctgtaaatagccttcaacaaacaaaacgaggagatcatgggctctcaactggacctgaaggcaatgagcctgtagttgctgagaaaaagctaagggacaagggcaaaagggctggtgaactggatgatgggcatggctctggttttcagaagattgctatgcttgggcatccttccaaaaggaataagttgcctgctgatgaggatattggagatgctttaaggagacaagcaagagttgtcccgggttttactctgaccaggcctgggactcctgtatccattgacaagcttgaaaatgctccgattacaaaacaaagaagtgtgaggacagtctcagagagaactgagagtaaatctgggagaccactgatgaagaaaatatctgagcgcaaaagtaatgcacggcctaggcatacaagtagcagtgtgcagtcagactctcctgtgcaatctgaagatgatcatgaggaacttcttgcttcagcaaatgctgccctaagatctgcttgtgcaagcacgttctggcggcaggttgaacctttcttcgcatttttgactgcagaagacatcacatatcttagtcaacagatacatttaccagatgattcctcttcaagtaggtcaatggaagggggtgaatgccaaaaatataagggtggtcttgaatacatttcacacccctcaactccagccgctagcaacaaagatgatcacgctgctcttccaaatggttttggcttgaatcagttggataatgacataggggttggctgggaggcaagctgcattgaacctatcctcgatcaacttgtccatgggattggggtaccaggatggtcttcagttggccaaagacttattcaagcattgattgatgaagataggatcgatagtattaccaacaacacttacataagcgagggctatgcatttgatacacatgaaattcattttgatggaggaggatggaagcctcactcaaataattataagttagaacctttagcgaattttgaagcttcaaggaggggcccaaatggtctgacaatggattctgactggaaatataatgatgtgtcaaatagaagtggcaatgtcatggataaaaccaaggtgtggcctgagtttcagtacagtgagatgtgcttcaatgataggattatcattgagctgagtgaagttggtgtatctattgaacctgtggggacggtggtcgtggttggtctgagggcacacagcagtgagggacttagggaagtgaaaggaagcggagaggtgagcgatggcggcgcatctagaggacagagggaagcgggaatcgtggcggcagcatggggcagagcagtgcaccaagggtcagggctatttctagcgcttaatgctgtgacagctgaggtcgtcctattacagcatgagataaggatagagttccctgtctgtattaagcctgatcttgcacagagtgaggacgaggatattaatgctgaaatctgtaaattagaaggccaacttcgtaaagaggttgtggagaagaaaaacttgctattgaaactggatggcattgttgcaactgcaaaagagtctcagcatagggaattctcacgccttgccatggatagacttctcctgagagcatatgagaaatatatggccttctgtggtccaaatgtttcaagcagcaaaaatgtcaatagaactggcaaacatgctgctctaagttttgtcaaacgagtactagtgcgatgccaaaactacgaagaggcggggacaagttgctttgatgagcctattttcaaggacatgtttttatcagcgacgtctcacagacgcagtctagatactgcttcacaagataacaatacaacagcgagaccagtccacagggccggtgcaccagacgcttcgcgaggaagcagtcacccgacggacctgtcgtttgcaaaggaggatccctggacaaacaacgtaaagcagcgggaactgttgctggacgaggttgtaggtagcataacaggaggagctctgagaacctcctcctccgtccttggtatctccctcgtcagcaatacgaaagggaagagaagcgagagggaagggaaggggcacaaccgagacagcctcaggtccggccgtccgtcgccgtccaacgcaaagggtgaaaggaagaacaaaacaaagctcagacagaaggcagccaacatctctgctccttcaggaggtctacagcttccagcgaaaacaacgcctcccagcagtgggaacggcaaggaggagagcgcagcagcagcagcagctgctgctgccaggcatggtggtgatccggcggcgaatgcttcgaatgacgccgaaatgcccgacctggctaacctcgagctgccaggactggacgccgactttggcggctggttgaatctggacgacgacgacgccctccaggacctcgacctgatgggcctcgagatccccatggacgacatcaacgagataaacctcatgatatagccgtacattttccttcgtttctcacagtaacaaccaacagagaaaaagctcccgatagtgcgtgcacaggtaaccaccaaccctgcagttttaacaccaggcctggttattaagcttcacttagggctagtttggaaactcaaatcccttccggtattggaggtgattgaggggagaatgcaataatttcttcctcaatctcctctaattctggaggggatttgagtttccaaactagctctgataaaagagagagagagggacagacagttgatagagacctcttgacaatcccaacaaccacgtgttgtcttttttgtaccagcgtgtaatttgcctccctgccttgtaccctcccctatacgttcatctgtcgtgtagacgtcggtgtacatatctattttggcgccctagttacaaggtagggaggctagttactgcatctgttactcgctccaaaggttgtgtgtgtacagactgaggacatttctcatctcatggcagcgccgactttccccccttattgcgagcataagatcacattcttttatctcagattagattgaggctagagactattccagccaatcaatgttaacgtaaataaatgtatcattccagctggaaccatttcatagtaaacgaaatgatactatctctagcagcttacctatttctatccctatatattaaaactttactcagtattgcagtctacggcacaaaacattaacaaacgcccatcttagatatactgtgtataaacacatagcaaaactatctggaaaaatggaggaatagcatagatcaaacacgtggttacaactcgtcctgag

SEQ ID NO: 30799 - DNA, 2430 bp, Zea Mays
atccaccacaccactcgagcgcgcgcgcggcccaccgctccgccgctgcccgcccgccgccatgcgagggatcctctcctcttcctccgctctcctccggcgagccggcgcccagctctcgcgcacggactgcagtagcccctcagcgtccgcgacctctcctctccgccgctcccctcttcaggtatgatgaccgcgtatctcgctgccgctccctcgatcgcgggctcgtggcttgttgccgtgtgctagggactgtaacttccttttgcaatagaggattttcagtcggactggtaagtcctctttgctagttaatgttgttaaactgcccttgacctttgttgggttagattggctgaaacagctgatatctgcaacggtttgaccatgagcgtacaagttctgctttgctggctcctgctcatgtgcacaagctactaaaacatagaagagtgagattcggagaaatatgcattatgggctgtaatgctgtacaatagtgctattcccacgtcagccttttcccactaggggagaactgtggcttttggtttcaaatggtgtatgtgctgctttactgtttcgttctcactggctttaataccttcataagtgaagtatcgagttcacaatgcctacttgctcatatttcaagagatctgcgcaaattgctgataatctttcttccctgtgatgtcatttgctagaatgggaaaagagacacattttgttcgctttggttcaaaggtcgttcggtatcaaccacagttgatatgcagttagactatgagagtgatccccctcttgacgatacaaaagctattgagaaggagtcatcacttaatgttgctgtttctcaactcgcaattgacttcgatagagactctaatttatgtttggagcgattttcccgtgcaaggaaagcatctgtagtctctactggttctcttaagcttgacctcgctctcggcgttggaggattaccgaagaatggtggagatatatgggaaagaagcatctgggaagacaacactcgcgcttcatgttattaaggaagctcaaaagaatggaggttattgtgcttatattgatgcagaaaatgccttcaacccttcatttgctgaatctattggcgtagacagtgaaaggctcttgatagcccaacctgattctgctgaaaattctctaagcattgtggcagcacttattcccaaatgtgaaattgaaggtgaaatatacacaaattgtggagacatccaatcccatttgatgactcgggcccttagaaaaattcagtacactttatgtcgatctgaaacacttattatttttgtgaatcaggttagaacaaagaggacatcaagtaatcctgggatctacaaggaggtgccttgcggtggtaatgcactaggattctatgctgcagtcagaatgaggacttcaaggagagaactgcgctatagtgaagatgaggctaccggcgtaggtatatcagtgcagatcatcaagaacaaattggctccagcgaacctgaagaaggaagccggcatcgacatcacattcggtaaggggatctgccacgagtcggagatcctggagacggcttcctccgtcggagtgatcctgaaagacgggtgtgggtattggatcaacaacgagttcctggcaggcaaggtggaagcggagaagttcctgcgtgaaaacgctgcagtggcagatgagatctgcaataccgtgaggaacgagttcttgcaaaggtgacatagggcgaccgattagagaggctaatgcattgttagtcggaaatgttgtaccgtcatgtattcatagaagaagatttatgtaggatgttgctgtgcctgtcgtgtaactttgactcgcaacagttcattgagtttaccagggccattccctcccagatcatatcgttaggttcttctatgttgctggttgaattcagggctgacttgtcatcacacggcttgagggacggccaagaattccaaactgtgcgccgtgcgcggatacgtgttctgtccacagcaagcgaagtggcgtgcaagcgcccctgggaagggattgggtgcgtggacaaagctccacccttgattctgtaaccgcgtgttttgtccctgctcttctctgtcagcgaagcggaggaagcagtcatcggtgcggcaaatgacaaagaaggtttggctgcaacagcaggagatgggccgtgtcgggccaaaaggctgaggaagtgcaacccaaaggtctttgggccggcgtggctaaacagcacaaagtaatccagccgattattaaataagggttcggcggcgcgtagggtttttaggctgtaacagaactctagactctagttcttcttcctttccaagtactatctcaactactctgttctccgtctctgcattctccaga

SEQ ID NO: 30800 - DNA, 2477 bp, Zea Mays
atccaccacaccactcgagcgcgcgcgcggcccaccgctccgccgctgcccgcccgccgccatgcgagggatcctctcctcttcctccgctctcctccggcgagccggcgcccagctctcgcgcacggactgcagtagcccctcagcgtccgcgacctctcctctccgccgctcccctcttcagaatgggaaaagagacacattttgttcgctttggttcaaaggtcgttcggtatcaaccacaggtataaccatttacccaataggtatactttttttgctactctttttactgtcagtgttctgcaatagaaaattccaactttaaaaactcggccggggaccgccttcccggtattatattaagaagagaccgaaaacaatggtcccggccgagaaaatctccgaactcaggccccccatcactaacaggccggcgtcaactgtccactctgcaacggcccaaccggaggatggcgcacaagacatcgtaacccgagagcggatggggcacagcgaggggatttttttaaccaagcctgaaaattcgctcccgaggggaatcgaacccaggacttggaggtgctactcggaagtccttaaccactaggctagaggccctttcgcaaattccaactttaatgttcctgcaagaactaacttttgaagtagttcccaaagttatacagttgttattcttggcattctgtattcacgctaccttatgagttgctatgttactcaggaatctgtacaaatttccagttgatatgcagttagactatgagagtgatccccctcttgacgatacaaaagctattgagaaggagtcatcacttaatgttgctgtttctcaactcgcaattgacttcgatagagactctaatttatgtttggagcgattttcccgtgcaaggaaagcatctgtagtctctactggttctcttaagcttgacctcgctctcggcgttggaggattaccgaagggtagaatggtggagatatatgggaaagaagcatctgggaagacaacactcgcgcttcatgttattaaggaagctcaaaagaatggaggttattgtgcttatattgatgcagaaaatgccttcaacccttcatttgctgaatctattggcgtagacagtgaaaggctcttgatagcccaacctgattctgctgaaaattctctaagcattgtaaacactcttgttggtggttctgttgctgttgttgttgtggacagtgtggcagcacttattcccaaatgtgaaattgaaggtgaaatatacacaaattgtggagacatccaatcccatttgatgactcgggcccttagaaaaattcagtacactttatgtcgatctgaaacacttattatttttgtgaatcaggttagaacaaagaggacatcaagtaatcctgggatctacaaggaggtgccttgcggtggtaatgcactaggattctatgctgcagtcagaatgaggacttcaaggagagaactgcgctatagtgaagatgaggctaccggcgtaggtatatcagtgcagatcatcaagaacaaattggctccagcgaacctgaagaaggaagccggcatcgacatcacattcggtaaggggatctgccacgagtcggagatcctggagacggcttcctccgtcggagtgatcctgaaagacgggtgtgggtattggatcaacaacgagttcctggcaggcaaggtggaagcggagaagttcctgcgtgaaaacgctgcagtggcagatgagatctgcaataccgtgaggaacgagttcttgcaaaggtgacatagggcgaccgattagagaggctaatgcattgttagtcggaaatgttgtaccgtcatgtattcatagaagaagatttatgtaggatgttgctgtgcctgtcgtgtaactttgactcgcaacagttcattgagtttaccagggccattccctcccagatcatatcgttaggttcttctatgttgctggttgaattcagggctgacttgtcatcacacggcttgagggacggccaagaattccaaactgtgcgccgtgcgcggatacgtgttctgtccacagcaagcgaagtggcgtgcaagcgcccctgggaagggattgggtgcgtggacaaagctccacccttgattctgtaaccgcgtgttttgtccctgctcttctctgtcagcgaagcggaggaagcagtcatcggtgcggcaaatgacaaagaaggtttggctgcaacagcaggagatgggccgtgtcgggccaaaaggctgaggaagtgcaacccaaaggtctttgggccggcgtggctaaacagcacaaagtaatccagccgattattaaataagggttcggcggcgcgtagggtttttaggctgtaacagaactctagactctagttcttcttcctttccaagtactatctcaactactctgttctccgtctctgcattctccaga

SEQ ID NO: 30801 - DNA, 2262 bp, Zea Mays
atccaccacaccactcgagcgcgcgcgcggcccaccgctccgccgctgcccgcccgccgccatgcgagggatcctctcctcttcctccgctctcctccggcgagccggcgcccagctctcgcgcacggactgcagtagcccctcagcgtccgcgacctctcctctccgccgctcccctcttcaggtatgatgaccgcgtatctcgctgccgctccctcgatcgcgggctcgtggcttgttgccgtgtgctagggactgtaacttccttttgcaatagaggattttcagtcggactggtaagtcctctttgctagttaatgttgttaaactgcccttgacctttgttgggttagattggctgaaacagctgatatctgcaacggtttgaccatgagcgtacaagttctgctttgctggctcctgctcatgtgcacaagctactaaaacatagaagagtgagattcggagaaatatgcattatgggctgtaatgctgtacaatagtgctattcccacgtcagccttttcccactaggggagaactgtggcttttggtttcaaatggtgtatgtgctgctttactgtttcgttctcactggctttaataccttcataagtgaagtatcgagttcacaatgcctacttgctcatatttcaagagatctgcgcaaattgctgataatctttcttccctgtgatgtcatttgctagaatgggaaaagagacacattttgttcgctttggttcaaaggtcgttcggtatcaaccacagggtagaatggtggagatatatgggaaagaagcatctgggaagacaacactcgcgcttcatgttattaaggaagctcaaaagaatggaggttattgtgcttatattgatgcagaaaatgccttcaacccttcatttgctgaatctattggcgtagacagtgaaaggctcttgatagcccaacctgattctgctgaaaattctctaagcattgtaaacactcttgttggtggttctgttgctgttgttgttgtggacagtgtggcagcacttattcccaaatgtgaaattgaaggtgaaatatacacaaattgtggagacatccaatcccatttgatgactcgggcccttagaaaaattcagtacactttatgtcgatctgaaacacttattatttttgtgaatcaggttagaacaaagaggacatcaagtaatcctgggatctacaaggaggtgccttgcggtggtaatgcactaggattctatgctgcagtcagaatgaggacttcaaggagagaactgcgctatagtgaagatgaggctaccggcgtaggtatatcagtgcagatcatcaagaacaaattggctccagcgaacctgaagaaggaagccggcatcgacatcacattcggtaaggggatctgccacgagtcggagatcctggagacggcttcctccgtcggagtgatcctgaaagacgggtgtgggtattggatcaacaacgagttcctggcaggcaaggtggaagcggagaagttcctgcgtgaaaacgctgcagtggcagatgagatctgcaataccgtgaggaacgagttcttgcaaaggtgacatagggcgaccgattagagaggctaatgcattgttagtcggaaatgttgtaccgtcatgtattcatagaagaagatttatgtaggatgttgctgtgcctgtcgtgtaactttgactcgcaacagttcattgagtttaccagggccattccctcccagatcatatcgttaggttcttctatgttgctggttgaattcagggctgacttgtcatcacacggcttgagggacggccaagaattccaaactgtgcgccgtgcgcggatacgtgttctgtccacagcaagcgaagtggcgtgcaagcgcccctgggaagggattgggtgcgtggacaaagctccacccttgattctgtaaccgcgtgttttgtccctgctcttctctgtcagcgaagcggaggaagcagtcatcggtgcggcaaatgacaaagaaggtttggctgcaacagcaggagatgggccgtgtcgggccaaaaggctgaggaagtgcaacccaaaggtctttgggccggcgtggctaaacagcacaaagtaatccagccgattattaaataagggttcggcggcgcgtagggtttttaggctgtaacagaactctagactctagttcttcttcctttccaagtactatctcaactactctgttctccgtctctgcattctccaga

SEQ ID NO: 30802 - DNA, 2214 bp, Zea Mays
atccaccacaccactcgagcgcgcgcgcggcccaccgctccgccgctgcccgcccgccgccatgcgagggatcctctcctcttcctccgctctcctccggcgagccggcgcccagctctcgcgcacggactgcagtagcccctcagcgtccgcgacctctcctctccgccgctcccctcttcaggtatgatgaccgcgtatctcgctgccgctccctcgatcgcgggctcgtggcttgttgccgtgtgctagggactgtaacttccttttgcaatagaggattttcagtcggactggtaagtcctctttgctagttaatgttgttaaactgcccttgacctttgttgggttagattggctgaaacagctgatatctgcaacggtttgaccatgagcgtacaagttctgctttgctggctcctgctcatgtgcacaagctactaaaacatagaagagtgagattcggagaaatatgcattatgggctgtaatgctgtacaatagtgctattcccacgtcagccttttcccactaggggagaactgtggcttttggtttcaaatggtgtatgtgctgctttactgtttcgttctcactggctttaataccttcataagtgaagtatcgagttcacaatgcctacttgctcatatttcaagagatctgcgcaaattgctgataatctttcttccctgtgatgtcatttgctagaatgggaaaagagacacattttgttcgctttggttcaaaggtcgttcggtatcaaccacagggtagaatggtggagatatatgggaaagaagcatctgggaagacaacactcgcgcttcatgttattaaggaagctcaaaagaatggaggttattgtgcttatattgatgcagaaaatgccttcaacccttcatttgctgaatctattggcgtagacagtgaaaggctcttgatagcccaacctgattctgctgaaaattctctaagcattgtggcagcacttattcccaaatgtgaaattgaaggtgaaatatacacaaattgtggagacatccaatcccatttgatgactcgggcccttagaaaaattcagtacactttatgtcgatctgaaacacttattatttttgtgaatcaggttagaacaaagaggacatcaagtaatcctgggatctacaaggaggtgccttgcggtggtaatgcactaggattctatgctgcagtcagaatgaggacttcaaggagagaactgcgctatagtgaagatgaggctaccggcgtaggtatatcagtgcagatcatcaagaacaaattggctccagcgaacctgaagaaggaagccggcatcgacatcacattcggtaaggggatctgccacgagtcggagatcctggagacggcttcctccgtcggagtgatcctgaaagacgggtgtgggtattggatcaacaacgagttcctggcaggcaaggtggaagcggagaagttcctgcgtgaaaacgctgcagtggcagatgagatctgcaataccgtgaggaacgagttcttgcaaaggtgacatagggcgaccgattagagaggctaatgcattgttagtcggaaatgttgtaccgtcatgtattcatagaagaagatttatgtaggatgttgctgtgcctgtcgtgtaactttgactcgcaacagttcattgagtttaccagggccattccctcccagatcatatcgttaggttcttctatgttgctggttgaattcagggctgacttgtcatcacacggcttgagggacggccaagaattccaaactgtgcgccgtgcgcggatacgtgttctgtccacagcaagcgaagtggcgtgcaagcgcccctgggaagggattgggtgcgtggacaaagctccacccttgattctgtaaccgcgtgttttgtccctgctcttctctgtcagcgaagcggaggaagcagtcatcggtgcggcaaatgacaaagaaggtttggctgcaacagcaggagatgggccgtgtcgggccaaaaggctgaggaagtgcaacccaaaggtctttgggccggcgtggctaaacagcacaaagtaatccagccgattattaaataagggttcggcggcgcgtagggtttttaggctgtaacagaactctagactctagttcttcttcctttccaagtactatctcaactactctgttctccgtctctgcattctccaga

SEQ ID NO: 30803 - DNA, 1982 bp, Zea Mays
atccaccacaccactcgagcgcgcgcgcggcccaccgctccgccgctgcccgcccgccgccatgcgagggatcctctcctcttcctccgctctcctccggcgagccggcgcccagctctcgcgcacggactgcagtagcccctcagcgtccgcgacctctcctctccgccgctcccctcttcagaatgggaaaagagacacattttgttcgctttggttcaaaggtcgttcggtatcaaccacagttgatatgcagttagactatgagagtgatccccctcttgacgatacaaaagctattgagaaggagtcatcacttaatgttgctgtttctcaactcgcaattgacttcgatagagactctaatttatgtttggagcgattttcccgtgcaaggaaagcatctgtagtctctactggttctcttaagcttgacctcgctctcggcgttggaggattaccgaagattactgattaaagtagctcaacagggtagaatggtggagatatatgggaaagaagcatctgggaagacaacactcgcgcttcatgttattaaggaagctcaaaagaatggaggttattgtgcttatattgatgcagaaaatgccttcaacccttcatttgctgaatctattggcgtagacagtgaaaggctcttgatagcccaacctgattctgctgaaaattctctaagcattgtaaacactcttgttggtggttctgttgctgttgttgttgtggacagtgtggcagcacttattcccaaatgtgaaattgaaggtgaaatatacacaaattgtggagacatccaatcccatttgatgactcgggcccttagaaaaattcagtacactttatgtcgatctgaaacacttattatttttgtgaatcaggttagaacaaagaggacatcaagtaatcctgggatctacaaggaggtgccttgcggtggtaatgcactaggattctatgctgcagtcagaatgaggacttcaaggagagaactgcgctatagtgaagatgaggctaccggcgtaggtatatcagtgcagatcatcaagaacaaattggctccagcgaacctgaagaaggaagccggcatcgacatcacattcggtaaggggatctgccacgagtcggagatcctggagacggcttcctccgtcggagtgatcctgaaagacgggtgtgggtattggatcaacaacgagttcctggcaggcaaggtggaagcggagaagttcctgcgtgaaaacgctgcagtggcagatgagatctgcaataccgtgaggaacgagttcttgcaaaggtgacatagggcgaccgattagagaggctaatgcattgttagtcggaaatgttgtaccgtcatgtattcatagaagaagatttatgtaggatgttgctgtgcctgtcgtgtaactttgactcgcaacagttcattgagtttaccagggccattccctcccagatcatatcgttaggttcttctatgttgctggttgaattcagggctgacttgtcatcacacggcttgagggacggccaagaattccaaactgtgcgccgtgcgcggatacgtgttctgtccacagcaagcgaagtggcgtgcaagcgcccctgggaagggattgggtgcgtggacaaagctccacccttgattctgtaaccgcgtgttttgtccctgctcttctctgtcagcgaagcggaggaagcagtcatcggtgcggcaaatgacaaagaaggtttggctgcaacagcaggagatgggccgtgtcgggccaaaaggctgaggaagtgcaacccaaaggtctttgggccggcgtggctaaacagcacaaagtaatccagccgattattaaataagggttcggcggcgcgtagggtttttaggctgtaacagaactctagactctagttcttcttcctttccaagtactatctcaactactctgttctccgtctctgcattctccaga

SEQ ID NO: 30804 - DNA, 1761 bp, Zea Mays
atccaccacaccactcgagcgcgcgcgcggcccaccgctccgccgctgcccgcccgccgccatgcgagggatcctctcctcttcctccgctctcctccggcgagccggcgcccagctctcgcgcacggactgcagtagcccctcagcgtccgcgacctctcctctccgccgctcccctcttcagaatgggaaaagagacacattttgttcgctttggttcaaaggtcgttcggtatcaaccacagattactgattaaagtagctcaacagggtagaatggtggagatatatgggaaagaagcatctgggaagacaacactcgcgcttcatgttattaaggaagctcaaaagaatggaggttattgtgcttatattgatgcagaaaatgccttcaacccttcatttgctgaatctattggcgtagacagtgaaaggctcttgatagcccaacctgattctgctgaaaattctctaagcattgtaaacactcttgttggtggttctgttgctgttgttgttgtggacagtgtggcagcacttattcccaaatgtgaaattgaaggtgaaatatacacaaattgtggagacatccaatcccatttgatgactcgggcccttagaaaaattcagtacactttatgtcgatctgaaacacttattatttttgtgaatcaggttagaacaaagaggacatcaagtaatcctgggatctacaaggaggtgccttgcggtggtaatgcactaggattctatgctgcagtcagaatgaggacttcaaggagagaactgcgctatagtgaagatgaggctaccggcgtaggtatatcagtgcagatcatcaagaacaaattggctccagcgaacctgaagaaggaagccggcatcgacatcacattcggtaaggggatctgccacgagtcggagatcctggagacggcttcctccgtcggagtgatcctgaaagacgggtgtgggtattggatcaacaacgagttcctggcaggcaaggtggaagcggagaagttcctgcgtgaaaacgctgcagtggcagatgagatctgcaataccgtgaggaacgagttcttgcaaaggtgacatagggcgaccgattagagaggctaatgcattgttagtcggaaatgttgtaccgtcatgtattcatagaagaagatttatgtaggatgttgctgtgcctgtcgtgtaactttgactcgcaacagttcattgagtttaccagggccattccctcccagatcatatcgttaggttcttctatgttgctggttgaattcagggctgacttgtcatcacacggcttgagggacggccaagaattccaaactgtgcgccgtgcgcggatacgtgttctgtccacagcaagcgaagtggcgtgcaagcgcccctgggaagggattgggtgcgtggacaaagctccacccttgattctgtaaccgcgtgttttgtccctgctcttctctgtcagcgaagcggaggaagcagtcatcggtgcggcaaatgacaaagaaggtttggctgcaacagcaggagatgggccgtgtcgggccaaaaggctgaggaagtgcaacccaaaggtctttgggccggcgtggctaaacagcacaaagtaatccagccgattattaaataagggttcggcggcgcgtagggtttttaggctgtaacagaactctagactctagttcttcttcctttccaagtactatctcaactactctgttctccgtctctgcattctccaga

SEQ ID NO: 30805 - DNA, 1736 bp, Zea Mays
atccaccacaccactcgagcgcgcgcgcggcccaccgctccgccgctgcccgcccgccgccatgcgagggatcctctcctcttcctccgctctcctccggcgagccggcgcccagctctcgcgcacggactgcagtagcccctcagcgtccgcgacctctcctctccgccgctcccctcttcagaatgggaaaagagacacattttgttcgctttggttcaaaggtcgttcggtatcaaccacagggtagaatggtggagatatatgggaaagaagcatctgggaagacaacactcgcgcttcatgttattaaggaagctcaaaagaatggaggttattgtgcttatattgatgcagaaaatgccttcaacccttcatttgctgaatctattggcgtagacagtgaaaggctcttgatagcccaacctgattctgctgaaaattctctaagcattgtaaacactcttgttggtggttctgttgctgttgttgttgtggacagtgtggcagcacttattcccaaatgtgaaattgaaggtgaaatatacacaaattgtggagacatccaatcccatttgatgactcgggcccttagaaaaattcagtacactttatgtcgatctgaaacacttattatttttgtgaatcaggttagaacaaagaggacatcaagtaatcctgggatctacaaggaggtgccttgcggtggtaatgcactaggattctatgctgcagtcagaatgaggacttcaaggagagaactgcgctatagtgaagatgaggctaccggcgtaggtatatcagtgcagatcatcaagaacaaattggctccagcgaacctgaagaaggaagccggcatcgacatcacattcggtaaggggatctgccacgagtcggagatcctggagacggcttcctccgtcggagtgatcctgaaagacgggtgtgggtattggatcaacaacgagttcctggcaggcaaggtggaagcggagaagttcctgcgtgaaaacgctgcagtggcagatgagatctgcaataccgtgaggaacgagttcttgcaaaggtgacatagggcgaccgattagagaggctaatgcattgttagtcggaaatgttgtaccgtcatgtattcatagaagaagatttatgtaggatgttgctgtgcctgtcgtgtaactttgactcgcaacagttcattgagtttaccagggccattccctcccagatcatatcgttaggttcttctatgttgctggttgaattcagggctgacttgtcatcacacggcttgagggacggccaagaattccaaactgtgcgccgtgcgcggatacgtgttctgtccacagcaagcgaagtggcgtgcaagcgcccctgggaagggattgggtgcgtggacaaagctccacccttgattctgtaaccgcgtgttttgtccctgctcttctctgtcagcgaagcggaggaagcagtcatcggtgcggcaaatgacaaagaaggtttggctgcaacagcaggagatgggccgtgtcgggccaaaaggctgaggaagtgcaacccaaaggtctttgggccggcgtggctaaacagcacaaagtaatccagccgattattaaataagggttcggcggcgcgtagggtttttaggctgtaacagaactctagactctagttcttcttcctttccaagtactatctcaactactctgttctccgtctctgcattctccaga

SEQ ID NO: 30806 - DNA, 1977 bp, Zea Mays
atccaccacaccactcgagcgcgcgcgcggcccaccgctccgccgctgcccgcccgccgccatgcgagggatcctctcctcttcctccgctctcctccggcgagccggcgcccagctctcgcgcacggactgcagtagcccctcagcgtccgcgacctctcctctccgccgctcccctcttcagaatgggaaaagagacacattttgttcgctttggttcaaaggtcgttcggtatcaaccacaggaatctgtacaaatttccagttgatatgcagttagactatgagagtgatccccctcttgacgatacaaaagctattgagaaggagtcatcacttaatgttgctgtttctcaactcgcaattgacttcgatagagactctaatttatgtttggagcgattttcccgtgcaaggaaagcatctgtagtctctactggttctcttaagcttgacctcgctctcggcgttggaggattaccgaagggtagaatggtggagatatatgggaaagaagcatctgggaagacaacactcgcgcttcatgttattaaggaagctcaaaagaatggaggttattgtgcttatattgatgcagaaaatgccttcaacccttcatttgctgaatctattggcgtagacagtgaaaggctcttgatagcccaacctgattctgctgaaaattctctaagcattgtaaacactcttgttggtggttctgttgctgttgttgttgtggacagtgtggcagcacttattcccaaatgtgaaattgaaggtgaaatatacacaaattgtggagacatccaatcccatttgatgactcgggcccttagaaaaattcagtacactttatgtcgatctgaaacacttattatttttgtgaatcaggttagaacaaagaggacatcaagtaatcctgggatctacaaggaggtgccttgcggtggtaatgcactaggattctatgctgcagtcagaatgaggacttcaaggagagaactgcgctatagtgaagatgaggctaccggcgtaggtatatcagtgcagatcatcaagaacaaattggctccagcgaacctgaagaaggaagccggcatcgacatcacattcggtaaggggatctgccacgagtcggagatcctggagacggcttcctccgtcggagtgatcctgaaagacgggtgtgggtattggatcaacaacgagttcctggcaggcaaggtggaagcggagaagttcctgcgtgaaaacgctgcagtggcagatgagatctgcaataccgtgaggaacgagttcttgcaaaggtgacatagggcgaccgattagagaggctaatgcattgttagtcggaaatgttgtaccgtcatgtattcatagaagaagatttatgtaggatgttgctgtgcctgtcgtgtaactttgactcgcaacagttcattgagtttaccagggccattccctcccagatcatatcgttaggttcttctatgttgctggttgaattcagggctgacttgtcatcacacggcttgagggacggccaagaattccaaactgtgcgccgtgcgcggatacgtgttctgtccacagcaagcgaagtggcgtgcaagcgcccctgggaagggattgggtgcgtggacaaagctccacccttgattctgtaaccgcgtgttttgtccctgctcttctctgtcagcgaagcggaggaagcagtcatcggtgcggcaaatgacaaagaaggtttggctgcaacagcaggagatgggccgtgtcgggccaaaaggctgaggaagtgcaacccaaaggtctttgggccggcgtggctaaacagcacaaagtaatccagccgattattaaataagggttcggcggcgcgtagggtttttaggctgtaacagaactctagactctagttcttcttcctttccaagtactatctcaactactctgttctccgtctctgcattctccaga

SEQ ID NO: 30807 - DNA, 3609 bp, Zea Mays
atccaccacaccactcgagcgcgcgcgcggcccaccgctccgccgctgcccgcccgccgccatgcgagggatcctctcctcttcctccgctctcctccggcgagccggcgcccagctctcgcgcacggactgcagtagcccctcagcgtccgcgacctctcctctccgccgctcccctcttcaggtatgatgaccgcgtatctcgctgccgctccctcgatcgcgggctcgtggcttgttgccgtgtgctagggactgtaacttccttttgcaatagaggattttcagtcggactggtaagtcctctttgctagttaatgttgttaaactgcccttgacctttgttgggttagattggctgaaacagctgatatctgcaacggtttgaccatgagcgtacaagttctgctttgctggctcctgctcatgtgcacaagctactaaaacatagaagagtgagattcggagaaatatgcattatgggctgtaatgctgtacaatagtgctattcccacgtcagccttttcccactaggggagaactgtggcttttggtttcaaatggtgtatgtgctgctttactgtttcgttctcactggctttaataccttcataagtgaagtatcgagttcacaatgcctacttgctcatatttcaagagatctgcgcaaattgctgataatctttcttccctgtgatgtcatttgctagaatgggaaaagagacacattttgttcgctttggttcaaaggtcgttcggtatcaaccacaggtataaccatttacccaataggtatactttttttgctactctttttactgtcagtgttctgcaatagaaaattccaactttaaaaactcggccggggaccgccttcccggtattatattaagaagagaccgaaaacaatggtcccggccgagaaaatctccgaactcaggccccccatcactaacaggccggcgtcaactgtccactctgcaacggcccaaccggaggatggcgcacaagacatcgtaacccgagagcggatggggcacagcgaggggatttttttaaccaagcctgaaaattcgctcccgaggggaatcgaacccaggacttggaggtgctactcggaagtccttaaccactaggctagaggccctttcgcaaattccaactttaatgttcctgcaagaactaacttttgaagtagttcccaaagttatacagttgttattcttggcattctgtattcacgctaccttatgagttgctatgttactcaggaatctgtacaaatttccagttgatatgcagttagactatgagagtgatccccctcttgacgatacaaaagctattgagaaggagtcatcacttaatgttgctgtttctcaactcgcaattgacttcgatagagactctaatttatgtttggagcgattttcccgtgcaaggaaagcatctgtagtctctactggttctcttaagcttgacctcgctctcggcgttggaggattaccgaaggttgcattgtgttcataccattttatttgttcacataatatactttattattattttatatacctggaatatttacttgattttatatatcctattgatattacccacaagaaacaaaagttcatacttttacaagtacctccgtgttcctgtcaacactagcaaatccaaaattaagtaggccatgtgttttcatcttttggtgcctatctactctacgtgtcaatctaatcaccatcaaggtctgaactactttatcgagtggcgaatgtccttgttttgtgattggtaagcattctagtttagttataattcacatccattaaagtgcatttcaccttcaaaatctctgcttacaaaagatacacataagaacacatttgtggtcatctcttgcctaaaaattccattttgagagaatatattccctagaaatgctcccaccataggtgtccatgtcttccaatctttctttttctggtcactgcatatgttgaatagcaacatttccttgagaaatttgatccatggcaatagactggacttatgttttattactgtgctttgaccatatttggcagattactgattaaagtagctcaacagggtagaatggtggagatatatgggaaagaagcatctgggaagacaacactcgcgcttcatgttattaaggaagctcaaaagaatggaggttattgtgcttatattgatgcagaaaatgccttcaacccttcatttgctgaatctattggcgtagacagtgaaaggctcttgatagcccaacctgattctgctgaaaattctctaagcattgtaaacactcttgttggtggttctgttgctgttgttgttgtggacagtgtggcagcacttattcccaaatgtgaaattgaaggtgaaatatacacaaattgtggagacatccaatcccatttgatgactcgggcccttagaaaaattcagtacactttatgtcgatctgaaacacttattatttttgtgaatcaggttagaacaaagaggacatcaagtaatcctgggatctacaaggaggtgccttgcggtggtaatgcactaggattctatgctgcagtcagaatgaggacttcaaggagagaactgcgctatagtgaagatgaggctaccggcgtaggtatatcagtgcagatcatcaagaacaaattggctccagcgaacctgaagaaggaagccggcatcgacatcacattcggtaaggggatctgccacgagtcggagatcctggagacggcttcctccgtcggagtgatcctgaaagacgggtgtgggtattggatcaacaacgagttcctggcaggcaaggtggaagcggagaagttcctgcgtgaaaacgctgcagtggcagatgagatctgcaataccgtgaggaacgagttcttgcaaaggtgacatagggcgaccgattagagaggctaatgcattgttagtcggaaatgttgtaccgtcatgtattcatagaagaagatttatgtaggatgttgctgtgcctgtcgtgtaactttgactcgcaacagttcattgagtttaccagggccattccctcccagatcatatcgttaggttcttctatgttgctggttgaattcagggctgacttgtcatcacacggcttgagggacggccaagaattccaaactgtgcgccgtgcgcggatacgtgttctgtccacagcaagcgaagtggcgtgcaagcgcccctgggaagggattgggtgcgtggacaaagctccacccttgattctgtaaccgcgtgttttgtccctgctcttctctgtcagcgaagcggaggaagcagtcatcggtgcggcaaatgacaaagaaggtttggctgcaacagcaggagatgggccgtgtcgggccaaaaggctgaggaagtgcaacccaaaggtctttgggccggcgtggctaaacagcacaaagtaatccagccgattattaaataagggttcggcggcgcgtagggtttttaggctgtaacagaactctagactctagttcttcttcctttccaagtactatctcaactactctgttctccgtctctgcattctccaga

SEQ ID NO: 30808 - DNA, 1978 bp, Zea Mays
atccaccacaccactcgagcgcgcgcgcggcccaccgctccgccgctgcccgcccgccgccatgcgagggatcctctcctcttcctccgctctcctccggcgagccggcgcccagctctcgcgcacggactgcagtagcccctcagcgtccgcgacctctcctctccgccgctcccctcttcagaatgggaaaagagacacattttgttcgctttggttcaaaggtcgttcggtatcaaccacaggtataaccatttacccaatagttgatatgcagttagactatgagagtgatccccctcttgacgatacaaaagctattgagaaggagtcatcacttaatgttgctgtttctcaactcgcaattgacttcgatagagactctaatttatgtttggagcgattttcccgtgcaaggaaagcatctgtagtctctactggttctcttaagcttgacctcgctctcggcgttggaggattaccgaagggtagaatggtggagatatatgggaaagaagcatctgggaagacaacactcgcgcttcatgttattaaggaagctcaaaagaatggaggttattgtgcttatattgatgcagaaaatgccttcaacccttcatttgctgaatctattggcgtagacagtgaaaggctcttgatagcccaacctgattctgctgaaaattctctaagcattgtaaacactcttgttggtggttctgttgctgttgttgttgtggacagtgtggcagcacttattcccaaatgtgaaattgaaggtgaaatatacacaaattgtggagacatccaatcccatttgatgactcgggcccttagaaaaattcagtacactttatgtcgatctgaaacacttattatttttgtgaatcaggttagaacaaagaggacatcaagtaatcctgggatctacaaggaggtgccttgcggtggtaatgcactaggattctatgctgcagtcagaatgaggacttcaaggagagaactgcgctatagtgaagatgaggctaccggcgtaggtatatcagtgcagatcatcaagaacaaattggctccagcgaacctgaagaaggaagccggcatcgacatcacattcggtaaggggatctgccacgagtcggagatcctggagacggcttcctccgtcggagtgatcctgaaagacgggtgtgggtattggatcaacaacgagttcctggcaggcaaggtggaagcggagaagttcctgcgtgaaaacgctgcagtggcagatgagatctgcaataccgtgaggaacgagttcttgcaaaggtgacatagggcgaccgattagagaggctaatgcattgttagtcggaaatgttgtaccgtcatgtattcatagaagaagatttatgtaggatgttgctgtgcctgtcgtgtaactttgactcgcaacagttcattgagtttaccagggccattccctcccagatcatatcgttaggttcttctatgttgctggttgaattcagggctgacttgtcatcacacggcttgagggacggccaagaattccaaactgtgcgccgtgcgcggatacgtgttctgtccacagcaagcgaagtggcgtgcaagcgcccctgggaagggattgggtgcgtggacaaagctccacccttgattctgtaaccgcgtgttttgtccctgctcttctctgtcagcgaagcggaggaagcagtcatcggtgcggcaaatgacaaagaaggtttggctgcaacagcaggagatgggccgtgtcgggccaaaaggctgaggaagtgcaacccaaaggtctttgggccggcgtggctaaacagcacaaagtaatccagccgattattaaataagggttcggcggcgcgtagggtttttaggctgtaacagaactctagactctagttcttcttcctttccaagtactatctcaactactctgttctccgtctctgcattctccaga

SEQ ID NO: 30809 - DNA, 2502 bp, Zea Mays
atccaccacaccactcgagcgcgcgcgcggcccaccgctccgccgctgcccgcccgccgccatgcgagggatcctctcctcttcctccgctctcctccggcgagccggcgcccagctctcgcgcacggactgcagtagcccctcagcgtccgcgacctctcctctccgccgctcccctcttcagttgatatgcagttagactatgagagtgatccccctcttgacgatacaaaagctattgagaaggagtcatcacttaatgttgctgtttctcaactcgcaattgacttcgatagagactctaatttatgtttggagcgattttcccgtgcaaggaaagcatctgtagtctctactggttctcttaagcttgacctcgctctcggcgttggaggattaccgaaggttgcattgtgttcataccattttatttgttcacataatatactttattattattttatatacctggaatatttacttgattttatatatcctattgatattacccacaagaaacaaaagttcatacttttacaagtacctccgtgttcctgtcaacactagcaaatccaaaattaagtaggccatgtgttttcatcttttggtgcctatctactctacgtgtcaatctaatcaccatcaaggtctgaactactttatcgagtggcgaatgtccttgttttgtgattggtaagcattctagtttagttataattcacatccattaaagtgcatttcaccttcaaaatctctgcttacaaaagatacacataagaacacatttgtggtcatctcttgcctaaaaattccattttgagagaatatattccctagaaatgctcccaccataggtgtccatgtcttccaatctttctttttctggtcactgcatatgttgaatagcaacatttccttgagaaatttgatccatggcaatagactggacttatgttttattactgtgctttgaccatatttggcagattactgattaaagtagctcaacagggtagaatggtggagatatatgggaaagaagcatctgggaagacaacactcgcgcttcatgttattaaggaagctcaaaagaatggaggttattgtgcttatattgatgcagaaaatgccttcaacccttcatttgctgaatctattggcgtagacagtgaaaggctcttgatagcccaacctgattctgctgaaaattctctaagcattgtaaacactcttgttggtggttctgttgctgttgttgttgtggacagtgtggcagcacttattcccaaatgtgaaattgaaggtgaaatatacacaaattgtggagacatccaatcccatttgatgactcgggcccttagaaaaattcagtacactttatgtcgatctgaaacacttattatttttgtgaatcaggttagaacaaagaggacatcaagtaatcctgggatctacaaggaggtgccttgcggtggtaatgcactaggattctatgctgcagtcagaatgaggacttcaaggagagaactgcgctatagtgaagatgaggctaccggcgtaggtatatcagtgcagatcatcaagaacaaattggctccagcgaacctgaagaaggaagccggcatcgacatcacattcggtaaggggatctgccacgagtcggagatcctggagacggcttcctccgtcggagtgatcctgaaagacgggtgtgggtattggatcaacaacgagttcctggcaggcaaggtggaagcggagaagttcctgcgtgaaaacgctgcagtggcagatgagatctgcaataccgtgaggaacgagttcttgcaaaggtgacatagggcgaccgattagagaggctaatgcattgttagtcggaaatgttgtaccgtcatgtattcatagaagaagatttatgtaggatgttgctgtgcctgtcgtgtaactttgactcgcaacagttcattgagtttaccagggccattccctcccagatcatatcgttaggttcttctatgttgctggttgaattcagggctgacttgtcatcacacggcttgagggacggccaagaattccaaactgtgcgccgtgcgcggatacgtgttctgtccacagcaagcgaagtggcgtgcaagcgcccctgggaagggattgggtgcgtggacaaagctccacccttgattctgtaaccgcgtgttttgtccctgctcttctctgtcagcgaagcggaggaagcagtcatcggtgcggcaaatgacaaagaaggtttggctgcaacagcaggagatgggccgtgtcgggccaaaaggctgaggaagtgcaacccaaaggtctttgggccggcgtggctaaacagcacaaagtaatccagccgattattaaataagggttcggcggcgcgtagggtttttaggctgtaacagaactctagactctagttcttcttcctttccaagtactatctcaactactctgttctccgtctctgcattctccaga

SEQ ID NO: 30810 - DNA, 1454 bp, Zea Mays
tccttggacatattcctgttgaccaccaaaaagaaaatccttttttttgtggttattgtgcttatattgatgcagaaaatgccttcaacccttcatttgctgaatctattggcgtagacagtgaaaggctcttgatagcccaacctgattctgctgaaaattctctaagcattgtaaacactcttgttggtggttctgttgctgttgttgttgtggacagtgtggcagcacttattcccaaatgtgaaattgaaggtgaaatatacacaaattgtggagacatccaatcccatttgatgactcgggcccttagaaaaattcagtacactttatgtcgatctgaaacacttattatttttgtgaatcaggttagaacaaagaggacatcaagtaatcctgggatctacaaggaggtgccttgcggtggtaatgcactaggattctatgctgcagtcagaatgaggacttcaaggagagaactgcgctatagtgaagatgaggctaccggcgtaggtatatcagtgcagatcatcaagaacaaattggctccagcgaacctgaagaaggaagccggcatcgacatcacattcggtaaggggatctgccacgagtcggagatcctggagacggcttcctccgtcggagtgatcctgaaagacgggtgtgggtattggatcaacaacgagttcctggcaggcaaggtggaagcggagaagttcctgcgtgaaaacgctgcagtggcagatgagatctgcaataccgtgaggaacgagttcttgcaaaggtgacatagggcgaccgattagagaggctaatgcattgttagtcggaaatgttgtaccgtcatgtattcatagaagaagatttatgtaggatgttgctgtgcctgtcgtgtaactttgactcgcaacagttcattgagtttaccagggccattccctcccagatcatatcgttaggttcttctatgttgctggttgaattcagggctgacttgtcatcacacggcttgagggacggccaagaattccaaactgtgcgccgtgcgcggatacgtgttctgtccacagcaagcgaagtggcgtgcaagcgcccctgggaagggattgggtgcgtggacaaagctccacccttgattctgtaaccgcgtgttttgtccctgctcttctctgtcagcgaagcggaggaagcagtcatcggtgcggcaaatgacaaagaaggtttggctgcaacagcaggagatgggccgtgtcgggccaaaaggctgaggaagtgcaacccaaaggtctttgggccggcgtggctaaacagcacaaagtaatccagccgattattaaataagggttcggcggcgcgtagggtttttaggctgtaacagaactctagactctagttcttcttcctttccaagtactatctcaactactctgttctccgtctctgcattctccaga

SEQ ID NO: 30811 - DNA, 1437 bp, Zea Mays
gccagtcttccacggcccgtgctcccaacgccagggccagccgtcacgtcacgtctcgctcccactgtactatcccgcacctccctccgactccgagcgtggggcttcaccagaccaagaacacgccaagcccgacgctcccaggaccacgccgcccaagccgtcgagcaaatccgcgatgcacaagtggtggcgcagccccgggcccgccctgctcgccgccgcactggcgatcgtggtggccgcgctgcggccggcgacggagcacgcggccgccaaggggcgaccgccgctgcggttcgggccaggaggagcgttcaaggtggccctgttcgcggacctgcattacggcgaggacgcgtggacggactgggggcccgcgcaggacgccgcgtccgaccgcgtcatggccgccgtcctcgacgccgagaacccagacttggtggtgtacctcggcgacctggtgacggccaacaacctcccggtcccgaacgcgagcctgtactgggaccgcgccgtctccgccgcccgaggccggggcgtgccgtgggcgacggtgttcggcaaccacgacgacatggccttcgagtggccgcccgagtggttctcccccgacggcgtcccgccgctgcgctggccgccgggtccaggatcagggtgcggcttccgtgggactccccggacggacctcatggcggcggagaccggcgcgaaccggctgctgtcctactcgtccagcgggcccagggagctgtggcccggcgtctccaactacgtcctgcaggtgctctcgcggggacggcgggcccgcggcgacggtcacgaccacgacccggctctgctcatgtacttcctcgactcgggcggcgggtcgtacaccgaggtggtgtccagcgcgcaggtcaggtggttccacacccagtctcagttcctgaatccagatggaaggatccccgagctcatcttctggcacataccgagcacggcgtacgccaaggtagctccgaaggccaagtctgagataaggaagccctgcgtcggctccatcaacgaggaggaagtggcgccgcaggcacagcgacgttacactaacctcctgaatccatctgcctgcttgattctcttgtacaatgtacagtatagaggatatttctttatatatataaacaacgtatataaatataacaacaccaaaaataagagcaccggaggacatagtatatggcccccggtagtttcttaaagggctagtttgaaagccacgaaatcgaagaaaatttggagcggctaaaattctctctttattcaaaattaaaattaaataaagaaagaattttagccccttcaattctctatggattttagactctcaaactagacctaaaatatttacttgtttttgtagaaattttggctcgtcttcacaatgctatttcg

SEQ ID NO: 30812 - DNA, 2285 bp, Zea Mays
ggcgcgtaataaaacgggcaaggccagcgccaggccacgctcttccctttcgcttgcccctgcccctctcccctatttctctatttctttccccctctcgcctcgccgcgcctccccttctctctctctcccccctttcccccactactagccgcccctccctcctcctcccttcaacacccccgctcggcgccgcttcgcgccggtctcattcgcccgccattccgccgcgcgccgccgccagggcgccgcgtcccgggcacgcgcgcgtgcggtgcgggcgctggcgcgggcgccaggagagagagggagggaggtagcgaccgcccctgcccccggccccccggggatgctgccgtgatcgccgccgtgcgcctggagccggggggatggggcgggtcgggctcggcgtggcggcgggctgcgcggccgccacgtgcgcgatcgccgccgcgctggtggcgcgccgggcggcggcgcggtcgcggtggcgccgcgccgtcgcgctgctcagggagttcgaggacggctgcgccacgccgccgccgcgcctgcgccaggtcgtcgacgccatggtcgtcgagatgcacgccggcctcgcgtccgacggcggcagcaagctcaagatgctgctcaccttcgtcgacgcgctccccgccggaaatgaagaaggcacatattattccatagatctcggaggaacaaactttagagtgctgaaagttgaagttggtgatgggtctgtggtcactcgccgtaaggtcgagcttcccatccctgaggaattgattaagggagttattcaactttgttgccgtgaccctaaaggagttcgtagaagcagaagatggtaaagacgaacaaagggcacttggtttcacattttctttcccagtcagacaaacatcagtatcttcagggtccttaattaggtggaccaaagggtttttgattgaagatgtggttgggaaagatgtggctcaatgcttaaatgaagctcttgctaggagtggactaaatgtgcgagttactgcactggtgaatgacactgtggggacgttagctctaggtcattatcacgatgaggatacagtggctgctgtgataatcggtgctggcaccaatgcttgctatatcgaacgcactgatgcaattattaaatgtcagggtcttcttacaaactctggtggcatggttgtaaacatggaatggggcaatttctggtcatcacatttgccaagaactccttatgacatctcccttgatgatgagacgcaaaatcgcaatgatcaggggtttgaaaaaatgatatctgggatttatcttggggaaattgcaaggctggtgctgcatcgaatggctctagaatcagatgtctttggtgatgccgctgataatctatccacccccttcacattgagcacaccacttctggctgcaattcgcaaggacgattcaccagatctgagcgaagtcagaaggatattgcaagaccatctgaagataccggacactcctctgaaaactcggaggctagtcgtcaaagtctgcgacatcgtcacccggagagctgcccgcctagccgccgctggcattgttgggatactgaaaaagctgggtcgggatgggagcggcattgcctcaagcgggagaacgcgagggcagctgaggcggacggtggtggcgatcgagggtggcctatatgagggctacccggagttcagggagtacctagatgaagccctggtggagatcttgggggaggaggtggcgcggacggtgacactggaggtgacagtggatgggtctggggccggcgctgccctcctcgccgccgtacattcgtcgaatagacagcaaggttccatatagggagaagggaagatggtgatacagcccctctgtgcaaatgtaaaaagggatattatttgatatctatattcatatatataaaatctggtcttgtgcagagaaatacctgttctcctatctcaagctcttatcactcttctgccttgctcttgtggatgtaggcgttgctgtgtactaggtttacctttttttttcagtgtggaagggaattatgattctttgtaagtccgagttgctgatgaactgatcttgtgaccaaaatggcaaaatgtcatgagtcatgacaagctgagataaccattttttttttctaatgttggacgcagcaatggacatcacattggtccttgaggttgaaggatcatctactgagtcatttactaagagatcagagatcaaacattcatcagatg

SEQ ID NO: 30813 - DNA, 2059 bp, Zea Mays
aaaacgggcaaggccagcgccaggccacgctcttccctttcgcttgcccctgcccctctcccctatttctctatttctttccccctctcgcctcgccgcgcctccccttctctctctctcccccctttcccccactactagccgcccctccctcctcctcccttcaacacccccgctcggcgccgcttcgcgccggtctcattcgcccgccattccgccgcgcgccgccgccagggcgccgcgtcccgggcacgcgcgcgtgcggtgcgggcgctggcgcgggcgccaggagagagagggagggaggtagcgaccgcccctgcccccggccccccggggatgctgccgtgatcgccgccgtgcgcctggagccggggggatggggcgggtcgggctcggcgtggcggcgggctgcgcggccgccacgtgcgcgatcgccgccgcgctggtggcgcgccgggcggcggcgcggtcgcggtggcgccgcgccgtcgcgctgctcagggagttcgaggacggctgcgccacgccgccgccgcgcctgcgccaggtcgtcgacgccatggtcgtcgagatgcacgccggcctcgcgtccgacggcggcagcaagctcaagatgctgctcaccttcgtcgacgcgctccccgccggaaatgaagaaggcacatattattccatagatctcggaggaacaaactttagagtgctgaaagttgaagttggtgatgggtctgtggtcactcgccgtaaggtcgagcttcccatccctgaggaattgattaagggtacaattgaggagttattcaactttgttgccgtgaccctaaaggagttcgtagaagcagaagatggtaaagacgaacaaagggcacttggtttcacattttctttcccagtcagacaaacatcagtatcttcagggtccttaattaggtggaccaaagggtttttgattgaagatgtggttgggaaagatgtggctcaatgcttaaatgaagctcttgctaggagtggactaaatgtgcgagttactgcactggtgaatgacactgtggggacgttagctctaggtcattatcacgatgaggatacagtggctgctgtgataatcggtgctggcaccaatgcttgctatatcgaacgcactgatgcaattattaaatgtcagggtcttcttacaaactctggtggcatggttgtaaacatggaatggggcaatttctggtcatcacatttgccaagaactccttatgacatctcccttgatgatgagacgcaaaatcgcaatgatcaggggtttgaaaaaatgatatctgggatttatcttggggaaattgcaaggctggtgctgcatcgaatggctctagaatcagatgtctttggtgatgccgctgataatctatccacccccttcacattgagcacaccacttctggctgcaattcgcaaggacgattcaccagatctgagcgaagtcagaaggatattgcaagaccatctgaagataccggacactcctctgaaaactcggaggctagtcgtcaaagtctgcgacatcgtcacccggagagctgcccgcctagccgccgctggcattgttgggatactgaaaaagctgggtcgggatgggagcggcattgcctcaagcgggagaacgcgagggcagctgaggcggacggtggtggcgatcgagggtggcctatatgagggctacccggagttcagggagtacctagatgaagccctggtggagatcttgggggaggaggtggcgcggacggtgacactggaggtgacagtggatgggtctggggccggcgctgccctcctcgccgccgtacattcgtcgaatagacagcaaggttccatatagggagaagggaagatggtgatacagcccctctgtgcaaatgcgttgctgtgtactaggtttacctttttttttcagtgtggaagggaattatgattctttcaatggacatcacattggtccttgaggttgaaggatcatctactgagtcatttactaagagatcagagatcaaacattcatcagatg

SEQ ID NO: 30814 - DNA, 2671 bp, Zea Mays
ttcccccactactagccgcccctccctcctcctcccttcaacacccccgctcggcgccgcttcgcgccggtctcattcgcccgccattccgccgcgcgccgccgccagggcgccgcgtcccgggcacgcgcgcgtgcggtgcgggcgctggcgcgggcgccaggagagagagggagggaggtagcgaccgcccctgcccccggccccccggggatgctgccgtgatcgccgccgtgcgcctggagccggggggatggggcgggtcgggctcggcgtggcggcgggctgcgcggccgccacgtgcgcgatcgccgccgcgctggtggcgcgccgggcggcggcgcggtcgcggtggcgccgcgccgtcgcgctgctcagggagttcgaggacggctgcgccacgccgccgccgcgcctgcgccaggtcgtcgacgccatggtcgtcgagatgcacgccggcctcgcgtccgacggcggcagcaagctcaagatgctgctcaccttcgtcgacgcgctccccgccggaaatgaagaaggcacatattattccatagatctcggaggaacaaactttagagtgctgaaagttgaagttggtgatgggtctgtggtcactcgccgtaaggtcgagcttcccatccctgaggaattgattaagggtacaattgaggagttattcaactttgttgccgtgaccctaaaggagttcgtagaagcagaagatggtaaagacgaacaaagggcacttggtttcacattttctttcccagtcagacaaacatcagtatcttcagggtccttaattaggtggaccaaagggtttttgattgaagatgtggttgggaaagatgtggctcaatgcttaaatgaagctcttgctaggagtggactaaatgtgcgagttactgcactggtgaatgacactgtggggacgttagctctaggtcattatcacgatgaggatacagtggctgctgtgataatcggtgctggcaccaatgcttgctatatcgaacgcactgatgcaattattaaatgtcagggtcttcttacaaactctggtggcatggttgtaaacatggaatggggcaatttctggtcatcacatttgccaagaactccttatgacatctcccttgatgatgagacgcaaaatcgcaatgatcaggggtttgaaaaaatgatatctgggatttatcttggggaaattgcaaggctggtgctgcatcgaatggctctagaatcagatgtctttggtgatgccgctgataatctatccacccccttcacattgaggtaccttaagttttctatgttttgtttattccatttttttttgtgtagtggaaaaggtgaagtagattttttcaaaggaaacgtagcaagtatcgggttatatttgctaccaatgcagtactctatgttgtgttctgcatctttggattcatgcttcccaatgtcaagtacatgatccatatcatatctatgttggaaaccttcctgctcagctgtgcatattactgcagaatgtttcatgtttatgcgtcattgggtgttaaatataggcttaattaggtttaataaatccgtctcgtattttagtcttcatctgcgtaattagttttataattaaactatatttaatacccataaatatcattcaaacattcgatgtgacaggaactaaactttagttgggtcgaaccaaacactaaaaggcaaaatcacgttggcgattacctaaactaaagcttgtgcgcagaaaatattgctgatactttagtatatgcttctgtttgtgttccagcacaccacttctggctgcaattcgcaaggacgattcaccagatctgagcgaagtcagaaggatattgcaagaccatctgaagataccggacactcctctgaaaactcggaggctagtcgtcaaagtctgcgacatcgtcacccggagagctgcccgcctagccgccgctggcattgttgggatactgaaaaagctgggtcgggatgggagcggcattgcctcaagcgggagaacgcgagggcagctgaggcggacggtggtggcgatcgagggtggcctatatgagggctacccggagttcagggagtacctagatgaagccctggtggagatcttgggggaggaggtggcgcggacggtgacactggaggtgacagtggatgggtctggggccggcgctgccctcctcgccgccgtacattcgtcgaatagacagcaaggttccatatagggagaagggaagatggtgatacagcccctctgtgcaaatgtaaaaagggatattatttgatatctatattcatatatataaaatctggtcttgtgcagagaaatacctgttctcctatctcaagctcttatcactcttctgccttgctcttgtggatgtaggcgttgctgtgtactaggtttacctttttttttcagtgtggaagggaattatgattctttgtaagtccgagttgctgatgaactgatcttgtgaccaaaatggcaaaatgtcatgagtcatgacaagctgagataaccattttttttttctaatgttggacgcagcaatggacatcacattggtccttgaggttgaaggatcatctactgagtcatttactaagagatcagagatcaaacattcatcagatg

SEQ ID NO: 30815 - DNA, 1659 bp, Zea Mays
cactcatctccctgctccgcaatggtgaacaaatctgggtccctgcctttctgatgtgttcatcccacaaaatgaagaaggcacatattattccatagatctcggaggaacaaactttagagtgctgaaagttgaagttggtgatgggtctgtggtcactcgccgtaaggagttattcaactttgttgccgtgaccctaaaggagttcgtagaagcagaagatggtaaagacgaacaaagggcacttggtttcacattttctttcccagtcagacaaacatcagtatcttcagggtccttaattaggtggaccaaagggtttttgattgaagatgtggttgggaaagatgtggctcaatgcttaaatgaagctcttgctaggagtggactaaatgtgcgagttactgcactggtgaatgacactgtggggacgttagctctaggtcattatcacgatgaggatacagtggctgctgtgataatcggtgctggcaccaatgcttgctatatcgaacgcactgatgcaattattaaatgtcagggtcttcttacaaactctggtggcatggttgtaaacatggaatggggcaatttctggtcatcacatttgccaagaactccttatgacatctcccttgatgatgagacgcaaaatcgcaatgatcaggggtttgaaaaaatgatatctgggatttatcttggggaaattgcaaggctggtgctgcatcgaatggctctagaatcagatgtctttggtgatgccgctgataatctatccacccccttcacattgagcacaccacttctggctgcaattcgcaaggacgattcaccagatctgagcgaagtcagaaggatattgcaagaccatctgaagataccggacactcctctgaaaactcggaggctagtcgtcaaagtctgcgacatcgtcacccggagagctgcccgcctagccgccgctggcattgttgggatactgaaaaagctgggtcgggatgggagcggcattgcctcaagcgggagaacgcgagggcagctgaggcggacggtggtggcgatcgagggtggcctatatgagggctacccggagttcagggagtacctagatgaagccctggtggagatcttgggggaggaggtggcgcggacggtgacactggaggtgacagtggatgggtctggggccggcgctgccctcctcgccgccgtacattcgtcgaatagacagcaaggttccatatagggagaagggaagatggtgatacagcccctctgtgcaaatgtaaaaagggatattatttgatatctatattcatatatataaaatctggtcttgtgcagagaaatacctgttctcctatctcaagctcttatcactcttctgccttgctcttgtggatgtaggcgttgctgtgtactaggtttacctttttttttcagtgtggaagggaattatgattctttgtaagtccgagttgctgatgaactgatcttgtgaccaaaatggcaaaatgtcatgagtcatgacaagctgagataaccattttttttttctaatgttggacgcagcaatggacatcacattggtccttgaggttgaaggatcatctactgagtcatttactaagagatcagagatcaaacattcatcagatg

SEQ ID NO: 30816 - DNA, 2376 bp, Zea Mays
cacaggcgccaggttgtattccaccatggcattgttggcctggggcgttctctgtcagactggaatcattgctcggggaggcaccttttggagtgcaagaatatctggtgacgatgatgtcgagccgtaacccgtaatgcagaaacgtttgtgtcccactgcatcgggatgctctactgttgcttgttcaaggctggttgcttgtgctgttcacagtccagctaataccgtgctaaacaatcggaatttgaaggccaaatgaaacctcaagcccacacagttttgttaccatatgtctatgtccattgtttggttttgggtagccgctcttgcaacagcttagcatgatagtagaacaacctgcgtgacagatgggatacacattgatttggttggccttttgttcttttgcttctgtcacatgtttggattttagcaccactgtgtttcttgttcgtagccattgcctgttcttgtgaaaattgtctgttttcgtgacgggaatggagcattttcttcttggtttgcatagccttcacgccttgtgcttgtcaagtatgattgaacttgatatgaatgatttatcttgatcaattacatgtttgctatggaatattataccctcattaggaaatgcatgaaaccacactgcctcttttttgaatctttcccagatattgcatctatctgtttctgtttaggcccatccaaggccatagctgttagtgttcaatttcctcgaaatgaagaaggcacatattattccatagatctcggaggaacaaactttagagtgctgaaagttgaagttggtgatgggtctgtggtcactcgccgtaaggtcgagcttcccatccctgaggaattgattaagggtacaattgaggagttattcaactttgttgccgtgaccctaaaggagttcgtagaagcagaagatggtaaagacgaacaaagggcacttggtttcacattttctttcccagtcagacaaacatcagtatcttcagggtccttaattaggtggaccaaagggtttttgattgaagatgtggttgggaaagatgtggctcaatgcttaaatgaagctcttgctaggagtggactaaatgtgcgagttactgcactggtgaatgacactgtggggacgttagctctaggtcattatcacgatgaggatacagtggctgctgtgataatcggtgctggcaccaatgcttgctatatcgaacgcactgatgcaattattaaatgtcagggtcttcttacaaactctggtggcatggttgtaaacatggaatggggcaatttctggtcatcacatttgccaagaactccttatgacatctcccttgatgatgagacgcaaaatcgcaatgatcaggggtttgaaaaaatgatatctgggatttatcttggggaaattgcaaggctggtgctgcatcgaatggctctagaatcagatgtctttggtgatgccgctgataatctatccacccccttcacattgagcacaccacttctggctgcaattcgcaaggacgattcaccagatctgagcgaagtcagaaggatattgcaagaccatctgaagataccggacactcctctgaaaactcggaggctagtcgtcaaagtctgcgacatcgtcacccggagagctgcccgcctagccgccgctggcattgttgggatactgaaaaagctgggtcgggatgggagcggcattgcctcaagcgggagaacgcgagggcagctgaggcggacggtggtggcgatcgagggtggcctatatgagggctacccggagttcagggagtacctagatgaagccctggtggagatcttgggggaggaggtggcgcggacggtgacactggaggtgacagtggatgggtctggggccggcgctgccctcctcgccgccgtacattcgtcgaatagacagcaaggttccatatagggagaagggaagatggtgatacagcccctctgtgcaaatgtaaaaagggatattatttgatatctatattcatatatataaaatctggtcttgtgcagagaaatacctgttctcctatctcaagctcttatcactcttctgccttgctcttgtggatgtaggcgttgctgtgtactaggtttacctttttttttcagtgtggaagggaattatgattctttgtaagtccgagttgctgatgaactgatcttgtgaccaaaatggcaaaatgtcatgagtcatgacaagctgagataaccattttttttttctaatgttggacgcagcaatggacatcacattggtccttgaggttgaaggatcatctactgagtcatttactaagagatcagagatcaaacattcatcagatg

SEQ ID NO: 30817 - DNA, 2181 bp, Zea Mays
gtcggctcctcccgtctcctctgcctccgctcgcgcctcccgccgtctctctgtcgccgtcgccgttctgccgccgccggacacgtcgtgagctctctctctcctggctcccctattcgaccattcgtttctgtgcctatcgtatcgaggtttcgctcgtgcagttacaacaaggattgcacggattttgctgcgaatggtgcacggccggaggatattacgatacaatcgcaaggacgatcttcgttgttaaaggttgtctcttatcactatcagctatcaaaggtgtgcggaaagtggtgatgataacagagggacacaaaagagctttactaaaaccaaacacagatgttctctctcaatcatctgcatttcgtattgtccatatttgaagtaaggtaacgccaagtggtgggcatattatcgatcaaatgttcagaagcacatgaattcaatagatattgatatatgtataatctgaagaaaatgaaaggaaagctccgtattatagcagatactagatggtggttcagacacttttttggagtctttggttgaaatgaaacgagatgcctttgtcagagaatgaacttgaaatcggcttcttgaataattgcagcacggctgttcagagagttggtggacatgtgcatcatgttgcaagctgaatccttgatcctatcacggttgcaaagtgactagtaatgtggcattgggggtctgggttagaatttctggcttcgggaaggcaccgtggtggtgtgggtgcagagtggcggcatgtcagtgagcgagggagggagagaatgtgtaagggccattgaggccaggcaagatgtttgccttgcttgctttaaaacggttacataacccttacagatttggactcttaggccctgtttgggaaaaaagtttttgaaaaccacagtttttgaaatactacagtatactttagtcatgacaataccgtagtttacaataccacaattttggaaactgaggtctagacctaagtttagaataccttaaaacaactatagtatttgcaatacttcagttttgaaaacagagattttagccagcttgccaaacaccattatgtatataatactgcagtatttgagaatactgcagtattcttccaaaactatgaaaaaacttcactcccaaacacccccttattttctaacaaatcgatcctatttcctaaaccaactcaatctcaagcaaactagagaagaaatccttatagatttggacccaccttttctaacaaaccaatcctattttctaaaccaacgcaatctctggttctaagaaatctctattttaactactccgactcatgcgctacagggctactgcacgtgctatagtactggaggtacggttcacaccgggtctaatttgggcgcaacacctacgtggcccatttttcgacgcacacaaaagataccggttataacatgtggaccaaccgttgaagcttattgccctaacattgatgttcatcttgttacatatccacatctaatgtactatgaacccgaattttttgttttttagccccttttgtgacacaaatttacgtttggacccccagaaattttatttgcacgtttggacccgatgctcggcgccataggctgtggcgccgaggtaacacctagcctggagggggctattagaagagctgaagaagaaattattatttggaagtttgcgggggccaagcatcttgccctaattacagctcccattccaggtgtcatgtagggctctagtagagagtccagtaggccttgtttattttctttcttctttttcttctttatttctttttttttctgttgtgtttgtatttggtctaattttagacccttcttcttaattcaatgatacgcagctctcctgcgtgttcgaaaaaaaaggtaacacagctcggcgccacagcctatggcgccgagctctgacgtggccatggcgggcaggggtgacgtggaagtccgcgtgacacctagctcggcgccacagatcttggcgccgagctaggaattaaccgcgagccccttttctctgcgtttcttctctgttacttttcacgtttagccgccgccgccgttcccgagttaggaaatagccgccgccgttcccgagctccgcccaccccgcccgccgagc

SEQ ID NO: 30818 - DNA, 1848 bp, Zea Mays
gtcggctcctcccgtctcctctgcctccgctcgcgcctcccgccgtctctctgtcgccgtcgccgttctgccgccgccggacacgtcggctcccctattcgaccattcgtttctgtgcctatcgtatcgaggtttcgctcgtgcagttacaacaaggattgcacggattttgctgcgaatggtgcacggccggaggatattacgatacaatcgcaagaaacgagatgcctttgtcagagaatgaacttgaaatcggcttcttgaataattgcagcacggctgttcagagagttggtggacatgtgcatcatgttgcaagctgtggtggtggcagaatccttgatcctatcacggttgcaaagtgactagtaatgtggcattgggggtctgggttagaatttctggcttcgggaaggcaccgtggtggtgtgggtgcagagtggcggcatgtcagtgagcgagggagggagagaatgtgtaagggccattgaggccaggcaagatgtttgccttgcttgctttaaaacggttacataacccttacagatttggactcttaggccctgtttgggaaaaaagtttttgaaaaccacagtttttgaaatactacagtatactttagtcatgacaataccgtagtttacaataccacaattttggaaactgaggtctagacctaagtttagaataccttaaaacaactatagtatttgcaatacttcagttttgaaaacagagattttagccagcttgccaaacaccattatgtatataatactgcagtatttgagaatactgcagtattcttccaaaactatgaaaaaacttcactcccaaacacccccttattttctaacaaatcgatcctatttcctaaaccaactcaatctcaagcaaactagagaagaaatccttatagatttggacccaccttttctaacaaaccaatcctattttctaaaccaacgcaatctctggttctaagaaatctctattttaactactccgactcatgcgctacagggctactgcacgtgctatagtactggaggtacggttcacaccgggtctaatttgggcgcaacacctacgtggcccatttttcgacgcacacaaaagataccggttataacatgtggaccaaccgttgaagcttattgccctaacattgatgttcatcttgttacatatccacatctaatgtactatgaacccgaattttttgttttttagccccttttgtgacacaaatttacgtttggacccccagaaattttatttgcacgtttggacccgatgctcggcgccataggctgtggcgccgaggtaacacctagcctggagggggctattagaagagctgaagaagaaattattatttggaagtttgcgggggccaagcatcttgccctaattacagctcccattccaggtgtcatgtagggctctagtagagagtccagtaggccttgtttattttctttcttctttttcttctttatttctttttttttctgttgtgtttgtatttggtctaattttagacccttcttcttaattcaatgatacgcagctctcctgcgtgttcgaaaaaaaaggtaacacagctcggcgccacagcctatggcgccgagctctgacgtggccatggcgggcaggggtgacgtggaagtccgcgtgacacctagctcggcgccacagatcttggcgccgagctaggaattaaccgcgagccccttttctctgcgtttcttctctgttacttttcacgtttagccgccgccgccgttcccgagttaggaaatagccgccgccgttcccgagctccgcccaccccgcccgccgagc

SEQ ID NO: 30819 - DNA, 2598 bp, Zea Mays
gtcggctcctcccgtctcctctgcctccgctcgcgcctcccgccgtctctctgtcgccgtcgccgttctgccgccgccggacacgtcggctcccctattcgaccattcgtttctgtgcctatcgtatcgaggtttcgctcgtgcagttacaacaaggattgcacggattttgctgcgaatggtgcacggccggaggatattacgatacaatcgcaaggtgaagtgccttctacacttggcaatttcgcacccttaacggttgtttgttgcgttttgatctccacaaatccggtaatatagcggaatgacgcccttttgctatcagtagcatagcagagcaggaatttgtttgtgcatgtttggaattttgtctgcattgatgatgtgggtagcgccgaatccttctgacgtttacagtttgatacggcgtcttggtttatctgaaggataaggtggattggactctcttgacggtaacaatccggtcaattagaagtaacttcacatgaatgactttatattttagtctcactctcacatcaacttacctttaatttgacgtggattggactgacacatcaccaaccgggagaagaagactagtgagacttagtctttttttttccttccttttttattctgagccaacaatatagcctggaaaaagcacattgattcagatgagacgttataagatctggtattatggaaatttccttgacgtacgagttttacaggacgatcttcgttgttaaaggttgtctcttatcactatcagctatcaaaggtgtgcggaaagtggtgatgataacagagggacacaaaagagctttactaaaaccaaacacagatgttctctctcaatcatctgcatttcgtattgtccatatttgaagtaagaaaatgaaaggaaagctccgtattatagcagatactagatggtggttcagacacttttttggagtctttggttgaaatgaaacgagatgcctttgtcagagaatgaacttgaaatcggcttcttgaataattgcagcacggctgttcagagagttggtggacatgtgcatcatgttgcaagctgaatccttgatcctatcacggttgcaaagtgactagtaatgtggcattgggggtctgggttagaatttctggcttcgggaaggcaccgtggtggtgtgggtgcagagtggcggcatgtcagtgagcgagggagggagagaatgtgtaagggccattgaggccaggcaagatgtttgccttgcttgctttaaaacggttacataacccttacagatttggactcttaggccctgtttgggaaaaaagtttttgaaaaccacagtttttgaaatactacagtatactttagtcatgacaataccgtagtttacaataccacaattttggaaactgaggtctagacctaagtttagaataccttaaaacaactatagtatttgcaatacttcagttttgaaaacagagattttagccagcttgccaaacaccattatgtatataatactgcagtatttgagaatactgcagtattcttccaaaactatgaaaaaacttcactcccaaacacccccttattttctaacaaatcgatcctatttcctaaaccaactcaatctcaagcaaactagagaagaaatccttatagatttggacccaccttttctaacaaaccaatcctattttctaaaccaacgcaatctctggttctaagaaatctctattttaactactccgactcatgcgctacagggctactgcacgtgctatagtactggaggtacggttcacaccgggtctaatttgggcgcaacacctacgtggcccatttttcgacgcacacaaaagataccggttataacatgtggaccaaccgttgaagcttattgccctaacattgatgttcatcttgttacatatccacatctaatgtactatgaacccgaattttttgttttttagccccttttgtgacacaaatttacgtttggacccccagaaattttatttgcacgtttggacccgatgctcggcgccataggctgtggcgccgaggtaacacctagcctggagggggctattagaagagctgaagaagaaattattatttggaagtttgcgggggccaagcatcttgccctaattacagctcccattccaggtgtcatgtagggctctagtagagagtccagtaggccttgtttattttctttcttctttttcttctttatttctttttttttctgttgtgtttgtatttggtctaattttagacccttcttcttaattcaatgatacgcagctctcctgcgtgttcgaaaaaaaaggtaacacagctcggcgccacagcctatggcgccgagctctgacgtggccatggcgggcaggggtgacgtggaagtccgcgtgacacctagctcggcgccacagatcttggcgccgagctaggaattaaccgcgagccccttttctctgcgtttcttctctgttacttttcacgtttagccgccgccgccgttcccgagttaggaaatagccgccgccgttcccgagctccgcccaccccgcccgccgagc

SEQ ID NO: 30820 - DNA, 2175 bp, Zea Mays
gtcggctcctcccgtctcctctgcctccgctcgcgcctcccgccgtctctctgtcgccgtcgccgttctgccgccgccggacacgtcggctcccctattcgaccattcgtttctgtgcctatcgtatcgaggtttcgctcgtgcagttacaacaaggattgcacggattttgctgcgaatggtgcacggccggaggatattacgatacaatcgcaaggacgatcttcgttgttaaaggttgtctcttatcactatcagctatcaaaggtgtgcggaaagtggtgatgataacagagggacacaaaagagctttactaaaaccaaacacagatgttctctctcaatcatctgcatttcgtattgtccatatttgaagtaaggtaacgccaagtggtgggcatattatcgatcaaatgttcagaagcacatgaattcaatagatattgatatatgtataatctgaagaaaatgaaaggaaagctccgtattatagcagatactagatggtggttcagacacttttttggagtctttggttgaaatgaaacgagatgcctttgtcagagaatgaacttgaaatcggcttcttgaataattgcagcacggctgttcagagagttggtggacatgtgcatcatgttgcaagctgtggtggtggcagaatccttgatcctatcacggttgcaaagtgactagtaatgtggcattgggggtctgggttagaatttctggcttcgggaaggcaccgtggtggtgtgggtgcagagtggcggcatgtcagtgagcgagggagggagagaatgtgtaagggccattgaggccaggcaagatgtttgccttgcttgctttaaaacggttacataacccttacagatttggactcttaggccctgtttgggaaaaaagtttttgaaaaccacagtttttgaaatactacagtatactttagtcatgacaataccgtagtttacaataccacaattttggaaactgaggtctagacctaagtttagaataccttaaaacaactatagtatttgcaatacttcagttttgaaaacagagattttagccagcttgccaaacaccattatgtatataatactgcagtatttgagaatactgcagtattcttccaaaactatgaaaaaacttcactcccaaacacccccttattttctaacaaatcgatcctatttcctaaaccaactcaatctcaagcaaactagagaagaaatccttatagatttggacccaccttttctaacaaaccaatcctattttctaaaccaacgcaatctctggttctaagaaatctctattttaactactccgactcatgcgctacagggctactgcacgtgctatagtactggaggtacggttcacaccgggtctaatttgggcgcaacacctacgtggcccatttttcgacgcacacaaaagataccggttataacatgtggaccaaccgttgaagcttattgccctaacattgatgttcatcttgttacatatccacatctaatgtactatgaacccgaattttttgttttttagccccttttgtgacacaaatttacgtttggacccccagaaattttatttgcacgtttggacccgatgctcggcgccataggctgtggcgccgaggtaacacctagcctggagggggctattagaagagctgaagaagaaattattatttggaagtttgcgggggccaagcatcttgccctaattacagctcccattccaggtgtcatgtagggctctagtagagagtccagtaggccttgtttattttctttcttctttttcttctttatttctttttttttctgttgtgtttgtatttggtctaattttagacccttcttcttaattcaatgatacgcagctctcctgcgtgttcgaaaaaaaaggtaacacagctcggcgccacagcctatggcgccgagctctgacgtggccatggcgggcaggggtgacgtggaagtccgcgtgacacctagctcggcgccacagatcttggcgccgagctaggaattaaccgcgagccccttttctctgcgtttcttctctgttacttttcacgtttagccgccgccgccgttcccgagttaggaaatagccgccgccgttcccgagctccgcccaccccgcccgccgagc

SEQ ID NO: 30821 - DNA, 2577 bp, Zea Mays
gtcggctcctcccgtctcctctgcctccgctcgcgcctcccgccgtctctctgtcgccgtcgccgttctgccgccgccggacacgtcggctcccctattcgaccattcgtttctgtgcctatcgtatcgaggtttcgctcgtgcagttacaacaaggattgcacggattttgctgcgaatggtgcacggccggaggatattacgatacaatcgcaaggtgaagtgccttctacacttggcaatttcgcacccttaacggttgtttgttgcgttttgatctccacaaatccggtaatatagcggaatgacgcccttttgctatcagtagcatagcagagcaggaatttgtttgtgcatgtttggaattttgtctgcattgatgatgtgggtagcgccgaatccttctgacgtttacagtttgatacggcgtcttggtttatctgaaggataaggtggattggactctcttgacggtaacaatccggtcaattagaagtaacttcacatgaatgactttatattttagtctcactctcacatcaacttacctttaatttgacgtggattggactgacacatcaccaaccgggagaagaagactagtgagacttagtctttttttttccttccttttttattctgagccaacaatatagcctggaaaaagcacattgattcagatgagacgttataagatctggtattatggaaatttccttgacgtacgagttttacaggacgatcttcgttgttaaaggttgtctcttatcactatcagctatcaaaggtgtgcggaaagtggtgatgataacagagggacacaaaagagctttactaaaaccaaacacagatgttctctctcaatcatctgcatttcgtattgtccatatttgaagtaagaaacgagatgcctttgtcagagaatgaacttgaaatcggcttcttgaataattgcagcacggctgttcagagagttggtggacatgtgcatcatgttgcaagctggctctccttgagatgagatgccagttacaagtgaaataacaggcagtgctatttgctaatcaatgcactaccctcatgcaaacttctgcactgttgttaacggaaaatacatacagaccaacatgatttcctcgggacactggttagtgatcagttgatcagcacagctcatctcaacgctgtaacaacagacaggttccttggaccgctacaaccctccaggctccactaccagtgattgcctccaaagttgcactcaccaccttcagggttcaggtgacgttgctccacattgaagtactgctttgagaagcctttaaatagcaggaaccgtcacaaagacaatgggagtgacgcctttgggaatattctctgtcctggtgctaggatggctaggggatcatatctgtgtttcctccgttcaaatgtctcccaccttgctccaaagctcatcgcatgtgcaatgctgccgtgacctgagagagacggtgctgaagaaaggaatcccactaggatcctgccaaagacttccgtagcaaatctgcggattgagctcctcggtatcagaagattcaaccaagggtgtggaacttcccagaggctttgtgccctcagcttcagctcagaggtgtgcaccctgtccaaaaactccagtgtcgccactattgaagttcttggttagttcgaggcagtatagcactcttccatctgactggaaatggcttgcttggactgggtcctgtggcttgaaggacgccctccagttgttgaggatgcctgtcctgtttatgatgacaaaaccttcaatgtagtcaaaggagttctctgccatgatcaacatctcctggtcttcggtgaagctttcaaaatccgagctcaagtgcaatccttgctctggttatgatcccgaactgaccaagaccgccgagagcagcatagaagagatcagagttatcctcgggtgagcaggtactcgatggatacttgctaccagcggtgtatataggtaccgttgaaccaagctcgggaaaccattatattcccaagtttttagaatttaattataagagggtgggtgttcattagcaggtacaacctcgaccatcggacgatcgcaattcttcaatacatggcttcaccttcaccacacttgggctttagaaagaagaaaaaaagacaacaaaaatacatgattacaactagtgaacttgactggtatagatatttatggacagtatgctgacctacgttggcatgtttcagatgcgtgtgccgtgtctggtctgaaaaactgttgtgcaccacaagctctggtccaaagcgccacgtacgtgctttctttctctgtcatctcagttgtgtgccaacgtgaacctatgtacatcagcgttcgtgtcgagctacgcaggggcgcgcggcaacctcctttattttccaactccctttgaccggttttcatcggatcggtagtgccagatgcatgcatgcggaagagggagtgtgtgtgatggcagagagcgaccgaattggacgttcactgaaccaacgtatggaaaataacccatcgatctc

SEQ ID NO: 30822 - DNA, 2572 bp, Zea Mays
gtcggctcctcccgtctcctctgcctccgctcgcgcctcccgccgtctctctgtcgccgtcgccgttctgccgccgccggacacgtcggctcccctattcgaccattcgtttctgtgcctatcgtatcgaggtttcgctcgtgcagttacaacaaggattgcacggattttgctgcgaatggtgcacggccggaggatattacgatacaatcgcaagtttgatacggcgtcttggtttatctgaaggataaggtggattggactctcttgacggtaacaatccggtcaattagaagtaacttcacatgaatgactttatattttagtctcactctcacatcaacttacctttaatttgacgtggattggactgacacatcaccaaccgggagaagaagactagtgagacttagtctttttttttccttccttttttattctgagccaacaatatagcctggaaaaagcacattgattcagatgagacgttataagatctggtattatggaaatttccttgacgtacgagttttacaggacgatcttcgttgttaaaggttgtctcttatcactatcagctatcaaaggtgtgcggaaagtggtgatgataacagagggacacaaaagagctttactaaaaccaaacacagatgttctctctcaatcatctgcatttcgtattgtccatatttgaagtaaggtaacgccaagtggtgggcatattatcgatcaaatgttcagaagcacatgaattcaatagatattgatatatgtataatctgaagaaaatgaaaggaaagctccgtattatagcagatactagatggtggttcagacacttttttggagtctttggttgaaatgaaacgagatgcctttgtcagagaatgaacttgaaatcggcttcttgaataattgcagcacggctgttcagagagttggtggacatgtgcatcatgttgcaagctgttacgcaggctctccttgagatgagatgccagttacaagtgaaataacaggcagtgctatttgctaatcaatgcactaccctcatgcaaacttctgcactgttgttaacggaaaatacatacagaccaacatgatttcctcgggacactggttagtgatcagttgatcagcacagctcatctcaacgctgtaacaacagacaggttccttggaccgctacaaccctccaggctccactaccagtgattgcctccaaagttgcactcaccaccttcagggttcaggtgacgttgctccacattgaagtactgctttgagaagcctttaaatagcaggaaccgtcacaaagacaatgggagtgacgcctttgggaatattctctgtcctggtgctaggatggctaggggatcatatctgtgtttcctccgttcaaatgtctcccaccttgctccaaagctcatcgcatgtgcaatgctgccgtgacctgagagagacggtgctgaagaaaggaatcccactaggatcctgccaaagacttccgtagcaaatctgcggattgagctcctcggtatcagaagattcaaccaagggtgtggaacttcccagaggctttgtgccctcagcttcagctcagaggtgtgcaccctgtccaaaaactccaggctcacctgttccatggtatcagtgtcgccactattgaagttcttggttagttcgaggcagtatagcactcttccatctgactggaaatggcttgcttggactgggtcctgtggcttgaaggacgccctccagttgttgaggatgcctgtcctgtttatgatgacaaaaccttcaatgtagtcaaaggagttctctgccatgatcaacatctcctggtcttcggtgaagctttcaaaatccgagctcaagtgcaatccttgctctggttatgatcccgaactgaccaagaccgccgagagcagcatagaagagatcagagttatcctcgggtgagcaggtactcgatggatacttgctaccagcggtgtatataggtaccgttgaaccaagctcgggaaaccattatattcccaagtttttagaatttaattataagagggtgggtgttcattagcaggtacaacctcgaccatcggacgatcgcaattcttcaatacatggcttcaccttcaccacacttgggctttagaaagaagaaaaaaagacaacaaaaatacatgattacaactagtgaacttgactggtatagatatttatggacagtatgctgacctacgttggcatgtttcagatgcgtgtgccgtgtctggtctgaaaaactgttgtgcaccacaagctctggtccaaagcgccacgtacgtgctttctttctctgtcatctcagttgtgtgccaacgtgaacctatgtacatcagcgttcgtgtcgagctacgcaggggcgcgcggcaacctcctttattttccaactccctttgaccggttttcatcggatcggtagtgccagatgcatgcatgcggaagagggagtgtgtgtgatggcagagagcgaccgaattggacgttcactgaaccaacgtatggaaaataacccatcgatctc

SEQ ID NO: 30823 - DNA, 2442 bp, Zea Mays
gtcggctcctcccgtctcctctgcctccgctcgcgcctcccgccgtctctctgtcgccgtcgccgttctgccgccgccggacacgtcggctcccctattcgaccattcgtttctgtgcctatcgtatcgaggtttcgctcgtgcagttacaacaaggattgcacggattttgctgcgaatggtgcacggccggaggatattacgatacaatcgcaaggtgaagtgccttctacacttggcaatttcgcacccttaacggttgtttgttgcgttttgatctccacaaatccggtaatatagcggaatgacgcccttttgctatcagtagcatagcagagcaggaatttgtttgtgcatgtttggaattttgtctgcattgatgatgtgggtagcgccgaatccttctgacgtttacagtttgatacggcgtcttggtttatctgaaggataaggtggattggactctcttgacggtaacaatccggtcaattagaagtaacttcacatgaatgactttatattttagtctcactctcacatcaacttacctttaatttgacgtggattggactgacacatcaccaaccgggagaagaagactagtgagacttagtctttttttttccttccttttttattctgagccaacaatatagcctggaaaaagcacattgattcagatgagacgttataagatctggtattatggaaatttccttgacgtacgagttttacaggacgatcttcgttgttaaaggttgtctcttatcactatcagctatcaaaggtgtgcggaaagtggtgatgataacagagggacacaaaagagctttactaaaaccaaacacagatgttctctctcaatcatctgcatttcgtattgtccatatttgaagtaagaaacgagatgcctttgtcagagaatgaacttgaaatcggcttcttgaataattgcagcacggctgttcagagagttggtggacatgtgcatcatgttgcaagctggctctccttgagatgagatgccagttacaagtgaaataacaggcagtgctatttgctaatcaatgcactaccctcatgcaaacttctgcactgttgttaacggaaaatacatacagaccaacatgatttcctcgggacactggttagtgatcagttgatcagcacagctcatctcaacgctgtaacaacagacaggttccttggaccgctacaaccctccaggctccactaccagtgattgcctccaaagttgcactcaccaccttcagggttcaggtgacgttgctccacattgaagtactgctttgaggctcatcgcatgtgcaatgctgccgtgacctgagagagacggtgctgaagaaaggaatcccactaggatcctgccaaagacttccgtagcaaatctgcggattgagctcctcggtatcagaagattcaaccaagggtgtggaacttcccagaggctttgtgccctcagcttcagctcagaggtgtgcaccctgtccaaaaactccagtgtcgccactattgaagttcttggttagttcgaggcagtatagcactcttccatctgactggaaatggcttgcttggactgggtcctgtggcttgaaggacgccctccagttgttgaggatgcctgtcctgtttatgatgacaaaaccttcaatgtagtcaaaggagttctctgccatgatcaacatctcctggtcttcggtgaagctttcaaaatccgagctcaagtgcaatccttgctctggttatgatcccgaactgaccaagaccgccgagagcagcatagaagagatcagagttatcctcgggtgagcaggtactcgatggatacttgctaccagcggtgtatataggtgtaccgttgaaccaagctcgggaaaccattatattcccaagtttttagaatttaattataagagggtgggtgttcattagcaggtacaacctcgaccatcggacgatcgcaattcttcaatacatggcttcaccttcaccacacttgggctttagaaagaagaaaaaaagacaacaaaaatacatgattacaactagtgaacttgactggtatagatatttatggacagtatgctgacctacgttggcatgtttcagatgcgtgtgccgtgtctggtctgaaaaactgttgtgcaccacaagctctggtccaaagcgccacgtacgtgctttctttctctgtcatctcagttgtgtgccaacgtgaacctatgtacatcagcgttcgtgtcgagctacgcaggggcgcgcggcaacctcctttattttccaactccctttgaccggttttcatcggatcggtagtgccagatgcatgcatgcggaagagggagtgtgtgtgatggcagagagcgaccgaattggacgttcactgaaccaacgtatggaaaataacccatcgatctc

SEQ ID NO: 30824 - DNA, 2705 bp, Zea Mays
ctcccgtctcctctgcctccgctcgcgcctcccgccgtctctctgtcgccgtcgccgttctgccgccgccggacacgtcgtgagctctctctctcctggctcccctattcgaccattcgtttctgtgcctatcgtatcgaggtttcgctcgtgcagttacaacaaggattgcacggattttgctgcgaatggtgcacggccggaggatattacgatacaatcgcaaggtgaagtgccttctacacttggcaatttcgcacccttaacggttgtttgttgcgttttgatctccacaaatccggtaatatagcggaatgacgcccttttgctatcagtagcatagcagagcaggaatttgtttgtgcatgtttggaattttgtctgcattgatgatgtgggtagcgccgaatccttctgacgtttacagtttgatacggcgtcttggtttatctgaaggataaggtggattggactctcttgacggtaacaatccggtcaattagaagtaacttcacatgaatgactttatattttagtctcactctcacatcaacttacctttaatttgacgtggattggactgacacatcaccaaccgggagaagaagactagtgagacttagtctttttttttccttccttttttattctgagccaacaatatagcctggaaaaagcacattgattcagatgagacgttataagatctggtattatggaaatttccttgacgtacgagttttacaggacgatcttcgttgttaaaggttgtctcttatcactatcagctatcaaaggtgtgcggaaagtggtgatgataacagagggacacaaaagagctttactaaaaccaaacacagatgttctctctcaatcatctgcatttcgtattgtccatatttgaagtaaggtaacgccaagtggtgggcatattatcgatcaaatgttcagaagcacatgaattcaatagatattgatatatgtataatctgaagaaaatgaaaggaaagctccgtattatagcagatactagatggtggttcagacacttttttggagtctttggttgaaatgaaacgagatgcctttgtcagagaatgaacttgaaatcggcttcttgaataattgcagcacggctgttcagagagttggtggacatgtgcatcatgttgcaagctgtggtggtggcagaatccttgatcctatcacggttgcaaagtgactagtaatgtggcattgggggtctgggttagaatttctggcttcgggaaggcaccgtggtggtgtgggtgcagagtggcggcatgtcagtgagcgagggagggagagaatgtgtaagggccattgaggccaggcaagatgtttgccttgcttgctttaaaacggttacataacccttacagatttggactcttaggccctgtttgggaaaaaagtttttgaaaaccacagtttttgaaatactacagtatactttagtcatgacaataccgtagtttacaataccacaattttggaaactgaggtctagacctaagtttagaataccttaaaacaactatagtatttgcaatacttcagttttgaaaacagagattttagccagcttgccaaacaccattatgtatataatactgcagtatttgagaatactgcagtattcttccaaaactatgaaaaaacttcactcccaaacacccccttattttctaacaaatcgatcctatttcctaaaccaactcaatctcaagcaaactagagaagaaatccttatagatttggacccaccttttctaacaaaccaatcctattttctaaaccaacgcaatctctggttctaagaaatctctattttaactactccgactcatgcgctacagggctactgcacgtgctatagtactggaggtacggttcacaccgggtctaatttgggcgcaacacctacgtggcccatttttcgacgcacacaaaagataccggttataacatgtggaccaaccgttgaagcttattgccctaacattgatgttcatcttgttacatatccacatctaatgtactatgaacccgaattttttgttttttagccccttttgtgacacaaatttacgtttggacccccagaaattttatttgcacgtttggacccgatgctcggcgccataggctgtggcgccgaggtaacacctagcctggagggggctattagaagagctgaagaagaaattattatttggaagtttgcgggggccaagcatcttgccctaattacagctcccattccaggtgtcatgtagggctctagtagagagtccagtaggccttgtttattttctttcttctttttcttctttatttctttttttttctgttgtgtttgtatttggtctaattttagacccttcttcttaattcaatgatacgcagctctcctgcgtgttcgaaaaaaaaggtaacacagctcggcgccacagcctatggcgccgagctctgacgtggccatggcgggcaggggtgacgtggaagtccgcgtgacacctagctcggcgccacagatcttggcgccgagctaggaattaaccgcgagccccttttctctgcgtttcttctctgttacttttcacgtttagccgccgccgccgttcccgagttaggaaatagccgccgccgttcccgagctccgcccaccccgcccgccgagc

SEQ ID NO: 30825 - DNA, 1835 bp, Zea Mays
cgcgcctcccgccgtctctctgtcgccgtcgccgttctgccgccgccggacacgtcgtgagctctctctctcctggctcccctattcgaccattcgtttctgtgcctatcgtatcgaggtttcgctcgtgcagttacaacaaggattgcacggattttgctgcgaatggtgcacggccggaggatattacgatacaatcgcaagaaacgagatgcctttgtcagagaatgaacttgaaatcggcttcttgaataattgcagcacggctgttcagagagttggtggacatgtgcatcatgttgcaagctgtggtggtggcagaatccttgatcctatcacggttgcaaagtgactagtaatgtggcattgggggtctgggttagaatttctggcttcgggaaggcaccgtggtggtgtgggtgcagagtggcggcatgtcagtgagcgagggagggagagaatgtgtaagggccattgaggccaggcaagatgtttgccttgcttgctttaaaacggttacataacccttacagatttggactcttaggccctgtttgggaaaaaagtttttgaaaaccacagtttttgaaatactacagtatactttagtcatgacaataccgtagtttacaataccacaattttggaaactgaggtctagacctaagtttagaataccttaaaacaactatagtatttgcaatacttcagttttgaaaacagagattttagccagcttgccaaacaccattatgtatataatactgcagtatttgagaatactgcagtattcttccaaaactatgaaaaaacttcactcccaaacacccccttattttctaacaaatcgatcctatttcctaaaccaactcaatctcaagcaaactagagaagaaatccttatagatttggacccaccttttctaacaaaccaatcctattttctaaaccaacgcaatctctggttctaagaaatctctattttaactactccgactcatgcgctacagggctactgcacgtgctatagtactggaggtacggttcacaccgggtctaatttgggcgcaacacctacgtggcccatttttcgacgcacacaaaagataccggttataacatgtggaccaaccgttgaagcttattgccctaacattgatgttcatcttgttacatatccacatctaatgtactatgaacccgaattttttgttttttagccccttttgtgacacaaatttacgtttggacccccagaaattttatttgcacgtttggacccgatgctcggcgccataggctgtggcgccgaggtaacacctagcctggagggggctattagaagagctgaagaagaaattattatttggaagtttgcgggggccaagcatcttgccctaattacagctcccattccaggtgtcatgtagggctctagtagagagtccagtaggccttgtttattttctttcttctttttcttctttatttctttttttttctgttgtgtttgtatttggtctaattttagacccttcttcttaattcaatgatacgcagctctcctgcgtgttcgaaaaaaaaggtaacacagctcggcgccacagcctatggcgccgagctctgacgtggccatggcgggcaggggtgacgtggaagtccgcgtgacacctagctcggcgccacagatcttggcgccgagctaggaattaaccgcgagccccttttctctgcgtttcttctctgttacttttcacgtttagccgccgccgccgttcccgagttaggaaatagccgccgccgttcccgagctccgcccaccccgcccgccgagc

SEQ ID NO: 30826 - DNA, 4518 bp, Zea Mays
cgaagatggatttttgagtgatgaagcgaactgctgcgatcgacaccgatgcgccagcgacgacgacagagatgggggatgagtactcgatggggagggatatgggggatgctatcacgaaacaggcaacagatcgagttgatcgctgtcttcgttgacactggcacatacgtgcacatgcaggactgggacaggcgagcaacatccgcaagtatcgctgtccacgattttccgcgagcctgtatggtcgcaactcgaacggcctactgttatgctcagagatcagaagtggaagaagaatcagagattagagaagaacagtgaacaggaggcagaaggcgacggatgttattgcgtatgagtttgtttaagttttgcatgcctcttcagaaaccacagactaggtattataccgtcacatgggctggccctgaattacaagagactaggattacacagcccattctgggctcatcacacaaacgttggtgcgtcgagtgcgtttgccgccgagtgctgcctgttccacttccgtctcttccacagcctcctcctccacagaggtgctgacagtcccctctcctttggaagcggcttgtccccaagccggcgcgttcggaaacgcagctttcagggcctcagcgtcctcccatatcgctaaggcgggatcccaacctgaccacaccactttgatttgtggaatcagagctcctcctcgctgaataatgcggtgagccagaacctggacaggcacttgaaaactaggattagcatcaggtaactgaggaaccactgaatgctgacggccgattgaagcttttagttgggaaacatgaaatattggatgtatagaagaggtctccggtaactgaagcttgtacgccacggtgcccacccgttgcagcactgtgtaagggccgaagaatcgaaatgcgagcttttgattcgagcgaactgccacagatgattgaatatagggttgaagtttgaggtaaactagggttgaagtttgaggtaaacctgatcgcccacctggaatgatcgctccgaacgtttcttgtcagcctgttttttcatgcgggactgagctcgagtcaaatgctggtgaatcaacttggatatgatttctctgtccgtcaaccactgtctgaggtcctccactgcgacggacgagactgaatcaataccaaaatggcgagctgcatgaccatatagaacctcaaagggtgaacgcccaattgccgaatggtagttggtgttataccaaaattccgcgactgacagccagtgacagcatttcttgggacaagcatggacaaaacacctgagataagtttcaatacattggtttactcgctcagtttgaccatcagactggggatggtaagccgagctcatgcaaagctgtgttctagtcaatgtaaacagctgctgccagaattgacttgtgaagattcgatctcgatccgacacaatacttgctggcataccgtgaagcttataaatattgtccaagaaaaccttggccacccccgcggctgtgaatggatgagcaagggccagaaaatgactatattttgagaaacggtcgaccaccactagaatgcagttccaggatcccgatttcggtaggccttctatgaaatccatagaaattgaatgccaggcgtgcggtggaatgggtagaggagcaagcagacctgggtatttagcacgatccggcttcgcttgctggcatatgggacatgactgcacaaactggtgaactgtcttcttcatgcccttccatgaaaataattgcttcactcgtcgataagtgacaggcacacccgagtgaccccccaaagctgagtcgtggaaggcggcgatgaccttttgttgtaacacctcattcttgcctaaccatagacgtcccttatgtcgaatcaagccatctttaagagtgtatgttgcagctagtgccgacggatcaagggccaactgcgataacaaactctgtgcctgctggtcatgttgataaccctccacgatttcctgaacccaagttggcgtacagtgagaaatatgcagcaattggtccggctgatgtgagtacctggacagtgcgtctgcggcagcgttgtcacacccttttttgtaaacaatcttgtattgaaggccggccagcttggtgtataccttttgttgccaaacagtgtggagacgttgttcgtttaactgagccaagctttggtgatccgtataaatatggaattctgccaactgaaggtatgagcgccactgtgctatagcaatcacaattgcaagatattccttctcgtatgtcgacaagccttggtttttgggacccagagccttgctcaagaacgccaacgggtgccccttttgcatcaggaccgcacctacgcctgtactgcaggcatctgtataaatgcagaatggttggttgaagtctggaagagccagcactggagcagatattaaagcctgcatgagggtctcaaatgctgactgatgatctgatgtccaaacgaacagggaatttttcttgagtaagtccgtcagaggtttggcgatgatgctgaaatgtcgtacgaatttacggtaaaaaccagccaaaccgagaaaactgcgtagctccttagtatttgttggggctgaccactgctgaataatttgcaacttagctgggtcagtcgccacaccgtgagcactgattatatgaccgagataagcaatagtggtctgggcaaaagcacatttggacaacttgatcttccagtgatcttgcttcaacaaagtgaggacctcggataaatgttgcaagtgggactcaaatgtaggactgtaaataagtatgtcatcgaagaacacgagggcacaacgacgcaatactggtgccagtgtatcattcatggcacccagaaaagtgttgggagctccagtcaagccaaaagccattactcgaaactcgaaatgacccaaatgtgtttggaaggccgtctttggttcttctcctggtactagacagatttgatggtaacccgctttcagatcaagcttgctaaaccattgtgcagaggacagttcatccatcagctgatcaaagattggaacaggatacgagctcttcactgttatagcgttgagatagcggtaatcaatacagaagcgccacgtttgatctttcttcttgaccagcaatactggcgatgcaaacagactgtggctcttttggatgactccctgcgacagcatgtcacgtacttgtgtctctatttcatccttgagagccggtggataacgatagggcttgacattgaaagggtgagcaccagggaccaatggaatagcatggtcacactgtcggctgggaggtaaacccacaggatcagcaaacacatctgaaaattgttgaagaaccgcttgaaccttgggatgtacctccaactgagactcttcttgaactgaattgagctgtatctcagctgatagcagcaactgcaccacagaaccagaaggaaaagatgactgaagtccttgtaagcacactgacgatccattgtatggaattaccaaccacttgtttgcccaatcgacatgcataggactaaaccgttgcaaccagtccatgcccaccactaaatccaaagctggtaacggcaaaaaacgaagatcagctgtaaaccaataaccagccatagaccactgtgctgcaggaatataatattgagaagaaagagtctgcccgttggccacctgaactgagaacggctgagcaagttcctggacaccagctagcagtggtcgaagacgatcaaagaggaacgagtgtgacgatcccgaatcaataagaataaccaggtcctgttgctgaatcgttccagataatctcatcgtcaccaatctgttactgccctcccaggctgctgaagatagtgataacgccataaccacttgttcagactgctcacaggttctgtattctcctggtcatccaaagtaagaagatcccatacctcttcaatagcatggagctgaactgtggttgcacatttgtgacctggagtccacttttctgcgcatcggtcacataacccacgggcacggcgatagctcttcagagtcgctactctgtccattggcgaagtgtgacgggttgagtcaacaataagcttctccgttggttgcccctggttaccaacacgctccaccttggtgatctcagacgccgtcgcctgcggccaagccttccggtggatgaaaggctcagcacgccggcgtcgtgtgggctccaacgcttcttcctgcacgagagcaagcgcacaagcagcatcgaggctttggggacgttgtaccatgacaactgacttgatatcatacttaagaccatcaacaaatcgcatagtataatacaaaggatctgttctagactcataagcacccaattcatctaccagcgacgcaaactgttcgacgtaatctgacacagatccagactgactaatatgaaataac

SEQ ID NO: 30827 - DNA, 1230 bp, Zea Mays
tgacagcccacgtctaaatttagccgaaaggaacccaacccacgaagcatccgccacagccgaactggcccgatgtcgctggttgcctacgatgcctcctccgatgaggaagacgccggcgagcctgccgccgccgcggcgccacaccctgcccccatcggtccgcagccaaggcctccgtctcctacggcagtgagccctgctcctcggcctacgcctacgcttacgccgccgccgccagcagccagccagagtgtagcaccaattagttcgagtgatgtctctctgcccacatcatcattagatctcccagatgttgcagatctctttgctccccctgcagacaatgcatcaaggaagagggaatcaaatgggtctgctcttcatgactcgcgcaataaatttccaaggatgcaatcacaatcccaaggcataggaagtgctgcagggaacgccctaattccaccgcagcttcgtggaaggttagtttcttttttttttctttccatttctcttcggcgccttgtgaaagtgagaccagcttattatatgtattctctagtctatacccccctcagctaacgagtcaaatgcttacagtgaactataatatgagacatgtaggcgcattcccaggtgtatttgccaaaatgttcacattatatatttcgcatccctgagtgatgtctacctttttgttactgcttcacaggagcaatgttgttaccgaagacatgagcaaactctttgtggctaaacgaaaagagtagcatcttaaccttttctggacctgaacctctgtttggactccatagactgataaacgcatgtactgagtgcaatggatgtgccggcatgatccaaggttgttgctgaatcctaaagaaccggacgaaggatgctaacggtaggacgacctggtctcttagcctaccgtgggctgttgtcagatgtcaaaaatgccctcttagaagtttagaacatttctttggtgctcactcgcgtttcatgttcaacggtgctacatgactggtgctggatgcatgtaaactctgcaaccctatcatgttatggcagctagatgctactacgtctatcttttggtcggtgattacaaccatgtattacgtctagtagtggtaatagatcgcgatccaaatgcttcttaataaaatagtagaactctaaataattttagttaaaaaatgaatagaaataagattctgattt

SEQ ID NO: 30828 - DNA, 1629 bp, Zea Mays
cacaagtgcacgtttacctgcaactctgcatttacatgcatatttaagtgttgttttgttttattcatctcacatttaatttttgactttattgtgcaatcaattaagaatttcatagtagttctaaacacattggaggtcacaaaggataagaaggtcgaagcctataaggtgttcaaggaccctgagtccctgacaatcgacaaattttcttgagtgcgtgcagtgatgatagagaggttgtattgatgtggttgagggatgagatgactaagcaggtctctatggagctgaagtgttatgtattggcagcgtgactggtacttgacaatactctagattaccgaacaacagtttgagccagggattatagccaaaagggattatacccccaaggggttcaagtgataaagaggggattaactcaatccctcctggattcaatacctctctggaataaaaacctgtaaaccgaacatgcccctagggaagtaatccattgcaaacgaacatgccctcagggtttactattgtgtccgctcccaccgggtctgcgcatcagagaccgacaagactgggaaatccagagatgcatttttctaccgatcagctgatcggctcggcgttcattgcctttgggctcacattgttcgtgtgtttcttctacgttgccgtcgtgtccaagctgcttccgccacatcaaaatggattcctggccgccatccaaaacgactggtattactgtctgcttgtgccgttgacgcttcctgtaataatcgtggctgtctacctgcactggctcagcatgaagatgttcaagcacgcatgaagcagtcatgcagcttccttccggtttcagaatcctggtcaaaatcgaggagtgtagcaccaattagttcgagtgatgtctctctgcccacatcatcattagatctcccagatgttgcagatctctttgctccccctgcagacaatgcatcaaggaagagggaatcaaatgggtctgctcttcatgactcgcgcaataaatttccaaggatgcaatcacaatcccaaggcataggaagtgctgcagggaacgccctaattccaccgcagcttcgtggaaggagcaatgttgttaccgaagacatgagcaaactctttgtggctaaacgaaaagagtagcatcttaaccttttctggacctgaacctctgtttggactccatagactgataaacgcatgtactgagtgcaatggatgtgccggcatgatccaaggttgttgctgaatcctaaagaaccggacgaaggatgctaacggtaggacgacctggtctcttagcctaccgtgggctgttgtcagatgtcaaaaatgccctcttagaagtttagaacatttctttggtgctcactcgcgtttcatgttcaacggtgctacatgactggtgctggatgcatgtaaactctgcaaccctatcatgtcatggcagctagatgctactacgtctatcttttggtcggtgattacaaccatgtattacgtctagtagtggtaatagatcgcgatccaaatgcttcttaataaaatagtagaactctaaataattttagttaaaaaatgaatagaaataagattctgatttta

SEQ ID NO: 30829 - DNA, 1048 bp, Zea Mays
taagaaggtcgaagcctataaggtgttcaaggaccctgagtccctgacaatcgacaaattttcttgagtgcgtgcagtgatgatagagaggttgtattgatgtggttgagggatgagatgactaagcaggtctctatggagctgaagtgttatgtattggcagcgtgactggtacttgacaatactctagattaccgaacaacagtttgagccagggattatagccaaaagggattatacccccaaggggttcaagtgataaagaggggattaactcaatccctcctggattcaatacctctctggaataaaaacctgtaaaccgaacatgcccctagggaagtaatccattgcaaacgaacatgccctcagggtttactattgtgtccgctcccaccgggtctgcgcatcagagaccgacaagactgggaaatccagagatgcatttttctaccgatcagctgatcggctcggcgttcattgcctttgggctcacattgttcgtgtgtttcttctacgttgccgtcgtgtccaagctgcttccgccacatcaaaatggattcctggccgccatccaaaacgactggtattactgtctgcttgtgccgttgacgcttcctgtaataatcgtggctgtctacctgcactggctcagcatgaagatgttcaagcacgcatgaagcagtcatgcagcttccttccggtttcagaatcctggtcaaaatcgagcttcaaaagtcaaaaccatgggttcttcccttctatacatatctggtcatcagtatgtgcttgcccctctttagagacgagggtacaggagtgtagcaccaattagttcgagtgatgtctctctgcccacatcatcattagatctcccagatgttgcagatctctttgctccccctgcagacaatgcatcaaggaagagggaatcaaatgggtctgctcttcatgactcgcgcaataaatttccaaggatgcaatcacaatcccaaggcataggaagtgctgcagggaacgccctaattccaccgcagcttcgtggaag

SEQ ID NO: 30830 - DNA, 1447 bp, Zea Mays
cggccaggagggcgatttggtgccgttgccgtactgccgtgagccaagagtgactgctgttggcgctcggcgattgggcccatattgccatacactgtctctatggagctgaagtgttatgtattggcagcgtgactggtacttgacaatactctagattaccgaacaacagtttgagccagggattatagccaaaagggattatacccccaaggggttcaagtgataaagaggggattaactcaatccctcctggattcaatacctctctggaataaaaacctgtaaaccgaacatgcccctagggaagtaatccattgcaaacgaacatgccctcagggtttactattgtgtccgctcccaccgggtctgcgcatcagagaccgacaagactgggaaatccagagatgcatttttctaccgatcagctgatcggctcggcgttcattgcctttgggctcacattgttcgtgtgtttcttctacgttgccgtcgtgtccaagctgcttccgccacatcaaaatggattcctggccgccatccaaaacgactggtattactgtctgcttgtgccgttgacgcttcctgtaataatcgtggctgtctacctgcactggctcagcatgaagatgttcaagcacgcatgaagcagtcatgcagcttccttccggtttcagaatcctggtcaaaatcgaggagtgtagcaccaattagttcgagtgatgtctctctgcccacatcatcattagatctcccagatgttgcagatctctttgctccccctgcagacaatgcatcaaggaagagggaatcaaatgggtctgctcttcatgactcgcgcaataaatttccaaggatgcaatcacaatcccaaggcataggaagtgctgcagggaacgccctaattccaccgcagcttcgtggaaggagcaatgttgttaccgaagacatgagcaaactctttgtggctaaacgaaaagagtagcatcttaaccttttctggacctgaacctctgtttggactccatagactgataaacgcatgtactgagtgcaatggatgtgccggcatgatccaaggttgttgctgaatcctaaagaaccggacgaaggatgctaacggtaggacgacctggtctcttagcctaccgtgggctgttgtcagatgtcaaaaatgccctcttagaagtttagaacatttctttggtgctcactcgcgtttcatgttcaacggtgctacatgactggtgctggatgcatgtaaactctgcaaccctatcatgtcatggcagctagatgctactacgtctatcttttggtcggtgattacaaccatgtattacgtctagtagtggtaatagatcgcgatccaaatgcttcttaataaaatagtagaactctaaataattttagttaaaaaatgaatagaaataagattctgatttta

SEQ ID NO: 30831 - DNA, 2817 bp, Zea Mays
gggcgatttggtgccgttgccgtactgccgtgagccaagagtgactgctgttggcgctcggcgattgggcccatattgccatacactgtctctatggagctgaagtgttatgtattggcagcgtgactggtacttgacaatactctagattaccgaacaacagtttgagccagggattatagccaaaagggattatacccccaaggggttcaagtgataaagaggggattaactcaatccctcctggattcaatacctctctggaataaaaacctgtaaaccgaacatgcccctagggaagtaatccattgcaaacgaacatgccctcagggtttactattgtgtccgctcccaccgggtctgcgcatcagagaccgacaagactgggaaatccagagatgcatttttctaccgatcagctgatcggctcggcgttcattgcctttgggctcacattgttcgtgtgtttcttctacgttgccgtcgtgtccaagctgcttccgccacatcaaaatggattcctggccgccatccaaaacgactggtattactgtctgcttgtgccgttgacgcttcctgtaataatcgtggctgtctacctgcactggctcagcatgaagatgttcaagcacgcatgaagcagtcatgcagcttccttccggtttcagaatcctggtcaaaatcgaggttggtttggtttagctgaaagtgtcaaggcaatagccaatttgcttatatacagcctgcatttttttgctgtctccaagatgtaatctggctatcgaatcactgtactaacaaaccctgcatcaatacgagctgcaatccattgtttcgctttactccatagctcacggtagcgcgacatatctcgtaggaaggttcaattcggaataattactggcatgtatgcgttttttttcaatgtgcacctttagggatgctattatctatgctatgcagcttcaaaagtcaaaaccatgggttcttcccttctatacatatctggtcatcagtatgtgcttgcccctctttagagacgagggtacaggtaagacatctccactttacctctttttaccctgtatagatgtagtatattcaatccacaagcttagcagcactcacaactgaacagtgtaactaaatgataaggttagttcagggacatctcattgatcacgatgttgttccctattttgtaatgtttagaatgcttaatgatggctcaatcgacctcacgtagagtgcattttgtttgtggcggaagtaactgtatgttaactagttagtcacatataacttctggactaatgcatttttcctctactgctactgcattgggttctgcacagtccttcctcctaatgctcaccatgtaccacaagtagatgatcattatgttcttctttagcatgccatcataaatcaatctggaaatattgtacttatctataagacccaactaatttggtggtggttttggtgtagcgctaaatttctcttatcatggtttatacatgctgcttatcatcagaacgagacactaatccactaatatattatgtgcctattctgcttcttctgtacgggcctgatagtttctctaaattttaactagcaagaaagagcatatttgccttgtgccattgtccttgatcttctgcctttttttagaaaaaggaattaaatggtactcctaacaggataagttggattattagatgccctgtgatgctttggtttattgggaaaaaagatcgcaattgatattggttattcaaagcagacacttccctactgcatttaatctttactgtatttcctttgttatgttatatttcattgccccctctttattttggttcctggccttgttcttttgtttcttctgattcattttcagttctagctgtgtgctgaagtgttattctggatgtatacttgattatttgtcagtttcctaaacgcacagcacattactaccattactccccccattgctatctaggtctgatatggtttttgtgagttcttaacttgttgtttttgtcattttggtccaggagtgtagcaccaattagttcgagtgatgtctctctgcccacatcatcattagatctcccagatgttgcagatctctttgctccccctgcagacaatgcatcaaggaagagggaatcaaatgggtctgctcttcatgactcgcgcaataaatttccaaggatgcaatcacaatcccaaggcataggaagtgctgcagggaacgccctaattccaccgcagcttcgtggaaggagcaatgttgttaccgaagacatgagcaaactctttgtggctaaacgaaaagagtagcatcttaaccttttctggacctgaacctctgtttggactccatagactgataaacgcatgtactgagtgcaatggatgtgccggcatgatccaaggttgttgctgaatcctaaagaaccggacgaaggatgctaacggtaggacgacctggtctcttagcctaccgtgggctgttgtcagatgtcaaaaatgccctcttagaagtttagaacatttctttggtgctcactcgcgtttcatgttcaacggtgctacatgactggtgctggatgcatgtaaactctgcaaccctatcatgtcatggcagctagatgctactacgtctatcttttggtcggtgattacaaccatgtattacgtctagtagtggtaatagatcgcgatccaaatgcttcttaataaaatagtagaactctaaataattttagttaaaaaatgaatagaaataagattctgatttta

SEQ ID NO: 30832 - DNA, 1268 bp, Zea Mays
cgttgccgtactgccgtgagccaagagtgactgctgttggcgctcggcgattgggcccatattgccatacactgtctctatggagctgaagtgttatgtattggcagcgtgactggtacttgacaatactctagattaccgaacaacagtttgagccagggattatagccaaaagggattatacccccaaggggttcaagtgataaagaggggattaactcaatccctcctggattcaatacctctctggaataaaaacctgtaaaccgaacatgcccctagggaagtaatccattgcaaacgaacatgccctcagggtttactattgtgtccgctcccaccgggtctgcgcatcagagaccgacaagactgggaaatccagagatgcatttttctaccgatcagctgatcggctcggcgttcattgcctttgggctcacattgttcgtgtgtttcttctacgttgccgtcgtgtccaagctgcttccgccacatcaaaatggattcctggccgccatccaaaacgactggtattactgtctgcttgtgccgttgacgcttcctgtaataatcgtggctgtctacctgcactggctcagcatgaagatgttcaagcacgcatgaagcagtcatgcagcttccttccggtttcagaatcctggtcaaaatcgaggttggtttggtttagctgaaagtgtcaaggcaatagccaatttgcttatatacagcctgcatttttttgctgtctccaagatgtaatctggctatcgaatcactgtactaacaaaccctgcatcaatacgagctgcaatccattgtttcgctttactccatagctcacggtagcgcgacatatctcgtaggaaggttcaattcggaataattactggcatgtatgcgttttttttcaatgtgcacctttagggatgctattatctatgctatgcagcttcaaaagtcaaaaccatgggttcttcccttctatacatatctggtcatcagtatgtgcttgcccctctttagagacgagggtacaggagtgtagcaccaattagttcgagtgatgtctctctgcccacatcatcattagatctcccagatgttgcagatctctttgctccccctgcagacaatgcatcaaggaagagggaatcaaatgggtctgctcttcatgactcgcgcaataaatttccaaggatgcaatcacaatcccaaggcataggaagtgctgcagggaacgccctaattccaccgcagcttcgtggaag

SEQ ID NO: 30833 - DNA, 2352 bp, Zea Mays
gtaacccgacgggtataatttttattgataggtacaatatggaatggtattacccgataggtatatacccattgtcatccttaggtctaacataaccagagcagaacctgaggggtagaggtgggcggccgcccaggacccctaaaatattgggtacttaactatagtacttaattatttaatagcaacctcgctcatataagtgggcaacacaattcctactatcttgctcacggtaacataaggcagaaacgactgctggccaatccgcgtaagccagtttctgagtcaacataatacatctaaaaacctaatccctgtcatggtgttgccgccaccaaagaactaaacataattgcaaacgttggtactagtatgcgtataacatatgcaagagctagctaattaatctatccaagagcccctaaaacctcagccactaccctgaacacaaccgaaaaactaaatagtaatctttaataaacctatccaagagtccctttacgcctttacccactgataacctggtcactccacactaatcttgcgagagcgagcaactagagcgagctcccctcccttcccctcgggcctcggctgcactcgcattccgtttcacctagctgcggtttacctctccctttctctcaccttcctcgcccacctcgatcgcctcctccttaagcaacgacgcggacgagcgacccgcgaccctagggagagagagagagagaccagtagttgggccgaccgcacgctcgcaggcgcacccactcagcggcggcaatggcggggcgccccctcccccctcgctcgtcgtcggcggccggccgggatgcgtgagatctcggcggcggatggggaaggacgccggcgaggcgcagcagcagccggacggggcgggcggtggcgcaggcggcggcgcaggaggaaataggggcggccgcttctgcttctgcggcggcggaggagcggcgagggtggttcggctgcaatgcgtggcagcgctcgtgctcggggtggccgtgctgctgtcggcgctcttctggctcccgccctttgccgggtggggcggcggcaaggagggcccggatccgggcgacgagttcggagctgctatagcggcaagctttaggctacacaagacagttcctgagctgagtggaaataaatcccagctcgaattggatatatatgaggaagttggcattcctaattccacggtggttgtgaatatgatacatccattagatggatcaaactggacaaacatcatcttcaacattgtccctttcccagagaacgtgactatatcatcaacatggttgagcattcttagatcaaagttcatgtccttggttgtacggcagtcatcaatccacttgactgagcctctattcgggaatgcgtcagcctttgaagtaattaaatttccaggaggaataacaattatccctccacaaactgcttttcttcttcagaagccccatgcaacttttaattttactctgaactatccgatctacaaattacaagacagaactaacgagttaaaggatcaaatgaaggcaggattactgctcaatccatacgagaatctgtatatcaagttgacaaattcgcaaggttcaacgattctcccgccaacaatcgttgagacctccatcgtcctcgaagttggaaaccaccagccatctgtaccaaggatgaaacagttggcgcggacgatcaccaattcatcttcatcctcaggaaacctgggcctgaatcacactgtatttggcagggtgaagcagattagcctttcatcctatcttaggcattccttacacagtggacgtggttctgatgcaccgagtcctgcacccatgcaccatcatggtcaccacagccaccaccaccgccaccaccaccacagtcacgatgacaacaggcatcctgcagctcccgctcctgctccagtacattttcctgcgccacagcccagatacggtgctccacctccatccggtgggtgtccgtacagcaaaaacaagccaaagaaaagcgggcgtgctgcaccagctgccgagcctgcagctaatgaccaccgatctgcttccatcgccttaccaccgcatccatcatcgccttcgcctgctagttggtctcagcatgctcccagtacgccggctgttcctccccctcctgctctaccagagccacctctgcccaccatctcgtttgctcatccacgtcctccaagtgaacgtggaactgggacgagtcctgctccaagtgaagaggcgacacgagcgggtccttctgggatgtcacaagtggcaccggcgcctcattcatgttaacaataca

SEQ ID NO: 30834 - DNA, 761 bp, Zea Mays
ctcgcgaccatgggtcgccgcagcttcccctaccacaagctcaagaagctcctccccgctgtcgccccctctcctccccgtcctcctgccacgatggcaggctctgctaccgccgccgccattaaggactcataccggtcctactactttgcggtggcgaggcggcggagcaggcgcctgaggagggcgagagtctggggtgccctggcgcgcgcgttgtggcagagggcggcggcggccggggccctggtgcgcgcgtcgggcgccagggtggcgtgctggctgaggaacgctcggccctacgtcggtgacctcttcgtcgggaactacatgttcctgcaggtggcgccgtcgccgatgacgatcacgggcggcggcaccgtggtgcccttcgcgcagtacaactacggctgtaaggccagggccgtgcatctgcaccgctaccctactggggcggtgctctacgagacatagcgacgtgccactacagctccgttgttcagccaacgatggatgacttcgtcgctggcctgtgttgtgttgaaatatggccatgccatgtcctgagatatgttcggaacatgcgttctactagcatgcaagtcggctgtcagaggaggtagcaattgaatgaatcggtaagtctttgtttgtgtacaagcgagatctgattcatggtacaaactgatgctgctgtgctgctgcgacgaatctccaagaatgcgagtgagctgaacagagaggagagaaaacaatgtggg

SEQ ID NO: 30835 - DNA, 1573 bp, Zea Mays
gcagatgccatggttgacggaaactggcgataacctagaaaaaactaggccgtcaagcattccaatgcccttccagtcagatactcagatctgaagcatcaaccagctagctagctagcggcgcactgcaatattttaagcacccgatcgcacagtcacagcagcagccagcagacaccaaaccatcccgcccagctctacccaagatggcgcagctgctgctgctcgccgtcgtctcggcgctcagcctcctctcgccgcgcacggcggcggcagcgacatcgacaacgtccggcggcaaacccctggtgacggccatcaccagggacgcggccaccaagctgtacacggcgccgctcaaggacgagctgccgctggtcctggacctctccggcccgctcctctgggccacgtgcgccgcgccgcacccgagctacgagtgccaccatgctgcgtgcgcgcacgcgcacgcgcaccacccgccgggctgcccgcgcacgggccacggcgtggccgacgagttcgacccgttccgctgcaggtgcagggcgcacccctacaacccgttcgcgcgccgggccgggtccggggacctcacgcgggcgcgcgtcacggccaacaccaccgacggcgccaacccgctcgccgccgcctccttcaccgccgtcgcggcctgcgcgccgccgacactgctcgccggcctccccgcgggcgccgtcggcgtcgcgggcctcgcgcgatccaggctcgccctgccggcacaggtcgcacgcaagcagaaggtcgccaggaggttcgcgctctgcctccccggcgaaggcggtggcatgggagtggccatcttcggcggggggcctctgttcctgctcccgccgggccggcccgacgtcacggcgtcgctggcgggcaccacgccgctccgccggaaccccggggtccccgggtacttcgtctcggccacgggcatcgccgtgaaccacgtgcaggtgcaggtgcagcagcagggcccgcttactgtcgcgctatgctcgcgtgtcccctacacggtgctccggccggacgtgtacgcgccgttcgtgagggcgttcgaggccatggccatggccgggaggaagcggatgacgccgccgacgccgccgttcgagctgtgctacgactcgcgggagctcgggtcgacgcggctcggttacgccgtgccgcaggtggacctcatgctcgagagcggcaccaactggacggtgttcggcggcaactccatggtgcaggtcagcgacgacacggcgtgcttcgcgttcctcgagatgaaggaagagaagcagcagggagggcacggctacggcggcggtgcgccggcgccgacggttgtcataggagggttccagatggagaacaacctgctggtgttcgatgaggagaatgggcagctcggcttcagtggcctgctcttcggaaggcagacgacgtgcagtaacttcaatttcactctcgctggctaggttccttcaagattcatgaaaactttttttggaagggcagtcagagcaacattcaacaattaaaaggtgtttggcat

SEQ ID NO: 30836 - DNA, 1638 bp, Zea Mays
ccccctgtcgcggatcgtccgtgtgtgtgtgtgtgtggcgccaagttgaggtgaagaaacaaagttcatgtgttgtctgcctaaccaacaagtccaacgaatatgttgcttttaaggttaaaacgacatcccctaaaagatactgtgttcgaccaaataccggggttatccttccgaggaaaacatgtgaattcacagttaccatgcaagcgctccggactgctccaccagacatgcaattaaaggacaagtttttagtacagaccacagttgttccttatggcacatctgatgaagaactcgttcctgccgttttctccaaagaaactggcagatacatcgaggaaagcaaattgagagttgttcttgttagttcataccaatccctcgaagagcaacccactaatggaattcatgacactgagccagctgttgaagttcctttactgaaagagatgccaaatttagggagcgaagtaccagatgttgcaaaagaaattcctgcccctctggtacaaggtccagcaattgtgaccggaataccttcacctgtcaaagaggttccaggcctgagagaaattcctgtgccactgaacgaagcaccaactttattggcagaatttccttcccctcaaaaagatccctctgctattacagttgaacatgcctctaatgttacaattgagcatgcccctgctatttccattgaatccccacctttgaaacaaagtgttccagtttttaaggaatctcctctgaaacaaagcgttgcagtttttaaggaatctcctcctttgaaacaaagcatttcagtttttaaggaatctcctccactggaggaaactactcctaaagaagctgttatgctaagtgaccgagggcttttcaatgtgcagaatcatcaattatcccatgtaacagaagatgttcagaatatgaaatcaaagctcaacaatcttgaatcaaaattggaagaggctgaaaagatgataataaggctaagagaagagagcagaaataccacccaggagcgggatgagctacagcaagaaatggtattcctaagaaagaagggaaccgcaaggagtcaaatgggtttccccctgctctttgtggtgtacgtggcgcttcttggtacctgtatcggttacctgctccgcatatgagttccaaacttcaaaaaagttcagcagatgggatatgcttcgtatgtgggcaagacaattgaacggcagttgcactccaaaatgttgaggggtgaatttattagcattattagttcggaacttcatatggttttgcacataacagcagtgccaaactaccatctgcctgtatgtatagaacagttactttttttcgcgttttatagaacccacccaaaagatgtctgctgcctcgtagactaacctgggattcttcttccatctacctaagatttttttttacactttactggattcgcttgccctgaatcggtattggtcttttgtgtaactatttttacacctggtttcgttccagtctaatatcctggcctataaaggcacaaaacagtgtaccaaaaatccaagaaagtcaggaattcatggttgcgtagttcgtgtcaagataccaagatgtagtaagagccagtct

SEQ ID NO: 30837 - DNA, 1655 bp, Zea Mays
ctcacactacgcctgatattaatttgtgttgagagaagggccttgatgacaggaaaagtgtgttgaggtgaagaaacaaagttcatgtgttgtctgcctaaccaacaagtccaacgaatatgttgcttttaaggttaaaacgacatcccctaaaagatactgtgttcgaccaaataccggggttatccttccgaggaaaacatgtgaattcacagttaccatgcaagcgctccggactgctccaccagacatgcaattaaaggacaagtttttagtacagaccacagttgttccttatggcacatctgatgaagaactcgttcctgccgttttctccaaagaaactggcagatacatcgaggaaagcaaattgagagttgttcttgttagttcataccaatccctcgaagagcaacccactaatggaattcatgacactgagccagctgttgaagttcctttactgaaagagatgccaaatttagggagcgaagtaccagatgttgcaaaagaaattcctgcccctctggtacaaggtccagcaattgtgaccggaataccttcacctgtcaaagaggttccaggcctgagagaaattcctgtgccactgaacgaagcaccaactttattggcagaatttccttcccctcaaaaagatccctctgctattacagttgaacatgcctctaatgttacaattgagcatgcccctgctatttccattgaatccccacctttgaaacaaagtgttccagtttttaaggaatctcctctgaaacaaagcgttgcagtttttaaggaatctcctcctttgaaacaaagcatttcagtttttaaggaatctcctccactggaggaaactactcctaaagaagctgttatgctaagtgaccgagggcttttcaatgtgcagaatcatcaattatcccatgtaacagaagatgttcagaatatgaaatcaaagctcaacaatcttgaatcaaaattggaagaggctgaaaagatgataataaggctaagagaagagagcagaaataccacccaggagcgggatgagctacagcaagaaatggtattcctaagaaagaagggaaccgcaaggagtcaaatgggtttccccctgctctttgtggtgtacgtggcgcttcttggtacctgtatcggttacctgctccgcatatgagttccaaacttcaaaaaagttcagcagatgggatatgcttcgtatgtgggcaagacaattgaacggcagttgcactccaaaatgttgaggggtgaatttattagcattattagttcggaacttcatatggttttgcacataacagcagtgccaaactaccatctgcctgtatgtatagaacagttactttttttcgcgttttatagaacccacccaaaagatgtctgctgcctcgtagactaacctgggattcttcttccatctacctaagatttttttttacactttactggattcgcttgccctgaatcggtattggtcttttgtgtaactatttttacacctggtttcgttccagtctaatatcctggcctataaaggcacaaaacagtgtaccaaaaatccaagaaagtcaggaattcatggttgcgtagttcgtgtcaagataccaagatgtagtaagagccagtct

SEQ ID NO: 30838 - DNA, 1596 bp, Zea Mays
gtcagcttggttattttgaggtgaagaaacaaagttcatgtgttgtctgcctaaccaacaagtccaacgaatatgttgcttttaaggttaaaacgacatcccctaaaagatactgtgttcgaccaaataccggggttatccttccgaggaaaacatgtgaattcacagcgctccggactgctccaccagacatgcaattaaaggacaagtttttagtacagaccacagttgttccttatggcacatctgatgaagaactcgttcctgccgttttctccaaagaaactggcagatacatcgaggaaagcaaattgagagttgttcttgttagttcataccaatccctcgaagagcaacccactaatggaattcatgacactgagccagctgttgaagttcctttactgaaagagatgccaaatttagggagcgaagtaccagatgttgcaaaagaaattcctgcccctctggtacaaggtccagcaattgtgaccggaataccttcacctgtcaaagaggttccaggcctgagagaaattcctgtgccactgaacgaagcaccaactttattggcagaatttccttcccctcaaaaagatccctctgctattacagttgaacatgcctctaatgttacaattgagcatgcccctgctatttccattgaatccccacctttgaaacaaagtgttccagtttttaaggaatctcctctgaaacaaagcgttgcagtttttaaggaatctcctcctttgaaacaaagcatttcagtttttaaggaatctcctccactggaggaaactactcctaaagaagctgttatgctaagtgaccgagggcttttcaatgtgcagaatcatcaattatcccatgtaacagaagatgttcagaatatgaaatcaaagctcaacaatcttgaatcaaaattggaagaggctgaaaagatgataataaggctaagagaagagagcagaaataccacccaggagcgggatgagctacagcaagaaatggtattcctaagaaagaagggaaccgcaaggagtcaaatgggtttccccctgctctttgtggtgtacgtggcgcttcttggtacctgtatcggttacctgctccgcatatgagttccaaacttcaaaaaagttcagcagatgggatatgcttcgtatgtgggcaagacaattgaacggcagttgcactccaaaatgttgaggggtgaatttattagcattattagttcggaacttcatatggttttgcacataacagcagtgccaaactaccatctgcctgtatgtatagaacagttactttttttcgcgttttatagaacccacccaaaagatgtctgctgcctcgtagactaacctgggattcttcttccatctacctaagatttttttttacactttactggattcgcttgccctgaatcggtattggtcttttgtgtaactatttttacacctggtttcgttccagtctaatatcctggcctataaaggcacaaaacagtgtaccaaaaatccaagaaagtcaggaattcatggttgcgtagttcgtgtcaagataccaagatgtagtaagagccagtct

SEQ ID NO: 30839 - DNA, 1526 bp, Zea Mays
gtcagcttggttattttgaggtgaagaaacaaagttcatgtgttgtctgcctaaccaacaagtccaacgaatatgttgcttttaagttaccatgcaagcgctccggactgctccaccagacatgcaattaaaggacaagtttttagtacagaccacagttgttccttatggcacatctgatgaagaactcgttcctgccgttttctccaaagaaactggcagatacatcgaggaaagcaaattgagagttgttcttgttagttcataccaatccctcgaagagcaacccactaatggaattcatgacactgagccagctgttgaagttcctttactgaaagagatgccaaatttagggagcgaagtaccagatgttgcaaaagaaattcctgcccctctggtacaaggtccagcaattgtgaccggaataccttcacctgtcaaagaggttccaggcctgagagaaattcctgtgccactgaacgaagcaccaactttattggcagaatttccttcccctcaaaaagatccctctgctattacagttgaacatgcctctaatgttacaattgagcatgcccctgctatttccattgaatccccacctttgaaacaaagtgttccagtttttaaggaatctcctctgaaacaaagcgttgcagtttttaaggaatctcctcctttgaaacaaagcatttcagtttttaaggaatctcctccactggaggaaactactcctaaagaagctgttatgctaagtgaccgagggcttttcaatgtgcagaatcatcaattatcccatgtaacagaagatgttcagaatatgaaatcaaagctcaacaatcttgaatcaaaattggaagaggctgaaaagatgataataaggctaagagaagagagcagaaataccacccaggagcgggatgagctacagcaagaaatggtattcctaagaaagaagggaaccgcaaggagtcaaatgggtttccccctgctctttgtggtgtacgtggcgcttcttggtacctgtatcggttacctgctccgcatatgagttccaaacttcaaaaaagttcagcagatgggatatgcttcgtatgtgggcaagacaattgaacggcagttgcactccaaaatgttgaggggtgaatttattagcattattagttcggaacttcatatggttttgcacataacagcagtgccaaactaccatctgcctgtatgtatagaacagttactttttttcgcgttttatagaacccacccaaaagatgtctgctgcctcgtagactaacctgggattcttcttccatctacctaagatttttttttacactttactggattcgcttgccctgaatcggtattggtcttttgtgtaactatttttacacctggtttcgttccagtctaatatcctggcctataaaggcacaaaacagtgtaccaaaaatccaagaaagtcaggaattcatggttgcgtagttcgtgtcaagataccaagatgtagtaagagccagtct

SEQ ID NO: 30840 - DNA, 4604 bp, Zea Mays
tttttttttatatacctgaccggcgatcaagattcaggactggcagctgcgcatgcacctgcccgttcaatggcacctccatctcatcttctggtctctgcctcaacaactgttcttcaattactactgcattctaggggaagactcttgcgctctcttaagcttggttcagtacatgactaattgtgcctcagctgtcgccggcattgtgaattttttaatctacaaaaacatggtgctgttgcatcgttccacacccaaccagcatttgcaattttgtattatccaggtcatcataatagtggggataatgaagcacctgaatagctccctgccttctgagatcaacaaggacagcaacccaagcaaaaaaaaaaaaaaagacgaagcaaattttacagcaacgatgcgctgcaattagacaagcttgcacgcttgtctcgcaaccccttccttcaacatcaaaaaaacgacaacttttgtttggttacggtctccctaaatttgtcacgtcatgcatgcatgcatgcgtttccctttcccccacgagactttgtccattcatgcatccacgtggcacatagaccccgcttaatctcctccgacttttcattccctcagatccaagaagcccgtatcggttcctcgtcctatcgttgcattttttttccatctccgccgctctctctctctctcctctcctctcctctcctttgagccaccatgggctgcggtggctccaaagaagcggtggccaccggcaactccggcagcagcagatgcaaccgattcaagaggaaatccagcgtcgtcgacgccacccagccatcgtcccgtgtgcttcagccatccctcgacaatgcgtccgccgccgccgctgcaaaggctagtaacggcgaggtgacaaaggacaaggcagccacgttgaaacagaaagccgtcgaggagaagaaagaggaagccgtcgctgtgaagaacagcaaagaagccgtctctgtgaaggagggcaacgcggcgtcgtcgaaggcgagtgccatccgggaggagaagccgcaggtcgagaccaagacggatgaagcagccgccgtcacggatgccgctagcgaagcggccgccgccgccgttgaaaaggcgggcaaagaagcgttggccggtaaggccgccagggagaaggaaggcgatgaggtcgtcgtcgtcgtcaaggacaaagcggtgatcgccggtcagggactgaggataaagcattcgtcgaggacaaaacagtcgtcatcaaccggcggggacgtgaatgccatcaccgtcaccgcggggaaagaagaacacatcatcaggaaggacgacgtggtcaaaatatcgaccaccgaggcagccgtcgacaaggggaataatggcggtgacgaacctgacggtacaccatacatggcggcgatcgaggagaacgacgacgaggctgcgtcgtcgaccgaggacgtcggcgacgccgtcgaggaggaggacaagaaggaggtagacgacggcagcgtcacgttcccggtctccatggtggcagaggaggacggcagcgtcaccttcaaggtacgagtcaatgacgccgaggccaaggacgacgacgggagcgttaagttcgcgactgccgccgccggcgccgcccccacgaccagcagcaacgtggttgccgtggtggccgaggaggatgggagcgtcacgttcgcagtgccagtttcccctgtgatcaaggacgacgacgagagcgttacctccgcggctgcaccggcagccaaggtccaggacgtcgtgggcgccgtggtggcagaggacgatggcagtgtcaccttggcgaaaccgctagcccctgtgagtgtgaccaagggtggccacagcgtttcctttgtgcctgcccggcctgcaacgaccaaggacgacgacgacagtgttgcctccgcagcttccccgatgaccatggacgacgaatttgtcagcttaccggttgcactggaggaggaggaggaggaagaagaaaatgagcattggaaggacaatgatgaggcggaaaatgagcctgctgtttctgatgacgaggagggcacggccgaagctgatggcgcaacagaagccgaagaggatgaggaggaggcagggcagtccgaaccttctgaagataatgatgaggtagacgatgacgcggacctgcccgatcctactgctgtcgagcagctgctaaccaaagctgtcgaggagatcaaagcggaggaggagaggagtgcggcggacacagttggggagaacgtctccagcaaagagccagacgaggggaaacccattgcaccttcgagaccgagagacgaggacggcggggaaccggatgggaaagaacccatggatttggaggaggaggaggccagaaccaccgaggagaagacaccggatgatcacccaggcatcccagctgagaagaagagcggcagtgatgacaaggattccgctctacctgtaagcgcgtcgtcgtcttcttgagcccagagaataattaaggagaacacgaacaccgatggaaaggcaggctgctgccggtggccgctccagtagtagtagcctctagtgcatctttgttttttttttgaacatgtatggcgtacgcgtcgttgtcatgtccaacacgccctggttcttcaacatcggtacgtactgaccatgtggtttcgaagtagttggcaagaggtagttgttgttgacgagtttgttgcgttgttgttcgaaaccaaggagaggcaggtcggcttcaaaagtctatatgcaaatgctaataggacaccagtgctatgagcacacatggtgccagcgctgatcgcggtaccaatacgcgatcaaatcaaattctaacacttggaaacgaaagtgcaggtcagaagaagatgaatctgagcagacgtgcctgtagcctgattgggtggtagtggcactagtttggtgcggagaccgactggttgagcgagtcgtctcatgttcaaccagcagacggaccaactgctgcaggctgcagcacaggaaaagcggacagcgatggctcaacaactaaccccacacagccacaacacccccccccaccccaccccccaaaaaaaaacaaagaagcctgaaagcacccagaagattcatatcaatcggacataccatgtctaccagagaatagaaagaccttccttccatccatcccacagtcagtcgttgacacaaagagaaattccacagccggggggcaaggctttaattgccccctctccctccctcgcctccttcaccatcccaccgagctttgcaacagctagtagcatgggcaagctgtgctgcagccaggaagacgacgagccggcgttcaacctcctggggctgctcgtcaccgtcgtcctcgccctgctcctgctcatgctgtgcacgccgccccgccgcaggcgctgcgtcgcctactacccccgttactgctaggacaggacggacgcggtggcggtggcacacgccgtcgagcttcagccttcttcgaggtagggaggaaaggatcaatcttctgctctgctctgcgatgggcgccgaggtaggcatcagacgtggagttcaattcgagtccgagttgtggagtatacaataaatcatgctggattgtttgtttgtatgtaaaagcgttctgttattattggtaaatcaatgtgactactgcataaggctggtcggtctgtaacctgatccgagagtctgtctgttggtaaaaaattaattgactactggaatttgttgacttggtatctgaaagattttatttttatttgtgtgtgaagttttcaagggacgagtggttcatgaattgcattgatcggtccgtgatacaccttctttttattaggctcagtcgatctgtgctactttagcatgattcgatgatacaaaagattcaaaagctactttttattatgtgtggcgatgaacagtagcagttgcaaaataaaagtagttcaagttcataaggaagcgggcaaacgtagcagcatcgatcacctggacctgggacaccgatggtccgcgacctcgcgctccgatctagtccccgtatccatccctcctcctcctcctcatgatccgcggcaacccaggcgactcctttcttcctccttgtcgaccctgtcctccccttctctggcgtggtagcgccgtggcgcagcggcccggaacacggctgggaaggggctgtagaggactacgaggaggaacgggagcccactcgccgcgaaggggccggggggggggggggggggcggggttgccgtcgccggaggagaagggagcaccaaccagtgcgcagaggggctatttcgcaaactgtctcttactacacttttccagggagttttgtgcaaaatagtcatattgctaatttgcaatgcttataaataatggcggatagctcgggactcgggaggacggatctgatgtcatcaactcatcatcagagctcaaaagttgtgactgtgatcgtgtttcgtacaaattattcgataaaatattaatacaaatcgattacatataaacgaaaccactatatttatttttaggaa

SEQ ID NO: 30841 - DNA, 3541 bp, Zea Mays
atgggctgcggtggctccaaagaagcggtggccaccggcaactccggcagcagcagatgcaaccgattcaagaggaaatccagcgtcgtcgacgccacccagccatcgtcccgtgtgcttcagccatccctcgacaatgcgtccgccgccgccgctgcaaaggctagtaacggcgaggtgacaaaggacaaggcagccacgttgaaacagaaagccgtcgaggagaagaaagaggaagccgtcgctgtgaagaacagcaaagaagccgtctctgtgaaggagggcaacgcggcgtcgtcgaaggcgagtgccatccgggaggagaagccgcaggtcgagaccaagacggatgaagcagccgccgtcacggatgccgctagcgaagcggccgccgccgccgttgaaaaggcgggcaaagaagcgttggccggtaaggccgccagggagaaggaaggcgatgaggtcgtcgtcgtcgtcaaggacaaagcggtgatcgccggtcagggactgaggataaagcattcgtcgaggacaaaacagtcgtcatcaaccggcggggacgtgaatgccatcaccgtcaccgcggggaaagaagaacacatcatcaggaaggacgacgtggtcaaaatatcgaccaccgaggcagccgtcgacaaggggaataatggcggtgacgaacctgacggtacaccatacatggcggcgatcgaggagaacgacgacgaggctgcgtcgtcgaccgaggacgtcggcgacgccgtcgaggaggaggacaagaaggaggtagacgacggcagcgtcacgttcccggtctccatggtggcagaggaggacggcagcgtcaccttcaaggtacgagtcaatgacgccgaggccaaggacgacgacgggagcgttaagttcgcgactgccgccgccggcgccgcccccacgaccagcagcaacgtggttgccgtggtggccgaggaggatgggagcgtcacgttcgcagtgccagtttcccctgtgatcaaggacgacgacgagagcgttacctccgcggctgcaccggcagccaaggtccaggacgtcgtgggcgccgtggtggcagaggacgatggcagtgtcaccttggcgaaaccgctagcccctgtgagtgtgaccaagggtggccacagcgtttcctttgtgcctgcccggcctgcaacgaccaaggacgacgacgacagtgttgcctccgcagcttccccgatgaccatggacgacgaatttgtcagcttaccggttgcactggaggaggaggaggaggaagaagaaaatgagcattggaaggacaatgatgaggcggaaaatgagcctgctgtttctgatgacgaggagggcacggccgaagctgatggcgcaacagaagccgaagaggatgaggaggaggcagggcagtccgaaccttctgaagataatgatgaggtagacgatgacgcggacctgcccgatcctactgctgtcgagcagctgctaaccaaagctgtcgaggagatcaaagcggaggaggagaggagtgcggcggacacagttggggagaacgtctccagcaaagagccagacgaggggaaacccattgcaccttcgagaccgagagacgaggacggcggtatggctgggttttcttcttctgttttggcatgaactcatgcatggcagttgatctgctctgggccaaagcaacaagtagccgccttctggctgctggctgctgccatccttaacccattcgtcccgtgtgcaggggaaccggatgggaaagaacccatggatttggaggaggaggaggccagaaccaccgaggagaagacaccggatgatcacccaggcatcccagctgagaagaagagcggcagtgatgacaaggattccgctctacctgtaagcgcgtcgtcgtcttcttgagcccagagaataattaaggagaacacgaacaccgatggaaaggcaggctgctgccggtggccgctccagtagtagtagcctctagtgcatctttgttttttttttgaacatgtatggcgtacgcgtcgttgtcatgtccaacacgccctggttcttcaacatcggtacgtactgaccatgtggtttcgaagtagttggcaagaggtagttgttgttgacgagtttgttgcgttgttgttcgaaaccaaggagaggcaggtcggcttcaaaagtctatatgcaaatgctaataggacaccagtgctatgagcacacatggtgccagcgctgatcgcggtaccaatacgcgatcaaatcaaattctaacacttggaaacgaaagtgcaggtcagaagaagatgaatctgagcagacgtgcctgtagcctgattgggtggtagtggcactagtttggtgcggagaccgactggttgagcgagtcgtctcatgttcaaccagcagacggaccaactgctgcaggctgcagcacaggaaaagcggacagcgatggctcaacaactaaccccacacagccacaacacccccccccaccccaccccccaaaaaaaaacaaagaagcctgaaagcacccagaagattcatatcaatcggacataccatgtctaccagagaatagaaagaccttccttccatccatcccacagtcagtcgttgacacaaagagaaattccacagccggggggcaaggctttaattgccccctctccctccctcgcctccttcaccatcccaccgagctttgcaacagctagtagcatgggcaagctgtgctgcagccaggaagacgacgagccggcgttcaacctcctggggctgctcgtcaccgtcgtcctcgccctgctcctgctcatgctgtgcacgccgccccgccgcaggcgctgcgtcgcctactacccccgttactgctaggacaggacggacgcggtggcggtggcacacgccgtcgagcttcagccttcttcgaggtagggaggaaaggatcaatcttctgctctgctctggacctgggacaccgatggtccgcgacctcgcgctccgatctagtccccgtatccatccctcctcctcctcctcatgatccgcggcaacccaggcgactcctttcttcctccttgtcgaccctgtcctccccttctctggcgtggtagcgccgtggcgcagcggcccggaacacggctgggaaggggctgtagaggactacgaggaggaacgggagcccactcgccgcgaaggggccggggggggggggggggggcggggttgccgtcgccggaggagaagggagcaccaaccagtgcgcagaggggctatttcgcaaactgtctcttactacacttttccagggagttttgtgcaaaatagtcatattgctaatttgcaatgcttataaataatggcggatagctcgggactcgggaggacggatctgatgtcatcaactcatcatcagagctcaaaagttgtgactgtgatcgtgtttcgtacaaattattcgataaaatattaatacaaatcgattacatataaacgaaaccactatatttatttttaggaa

SEQ ID NO: 30842 - DNA, 1718 bp, Zea Mays
cagcatcagaccgcgacctccgatccaaactctgataagcttcagcggggcatccgcgtcatttcgcaccaaccttgttgttgttgttcttctatttcttagtatcatagcacagtatttcgtgctctcgcttcgctcccttaatttatcaccattcctaatttattctatttcttagtatcatagcacagtatttcgctcgccccgatttcccgactcttcccgtgcctcagacagcatcggattgcttgatctcgattgtcagaataagattcagcgcaggtttggattcaccgaatccaccgattgcttgcgccccgcggtcgcgcgcggcggaatttcggccgccgccaattcgggcctctccggaagggtgtccccggtgtggttcgcctaatatccgctgccctcgtgcgggactcctcgtgattttcggctgtgcgcttggcttttccagtcccgtgttgtggttccagcctttcaggggatggggcgccgcgggttgctcaaggctgcgcttctgctgtgcttccttgctgcttgctccgggagagatctatactgccgatttgacgcaattgtttacttggacatgtgccagatgcggtgacttgatcgaggggttcgagatgatagagatcattgtggatgtcgagaactgcttgcagcaggcatattttggttttgccagtgacataaacgcagtcgttgttgtttttagaggaactcaagagaacagcatccagaattggatagaggacttgttatggaaacaacttgatcttgactaccctggcatgcctgaagcaatggttcaccgagggttttattctgcatatcacaacacgacactacgtgatggagtagtcagtggtattcagaggactaggaaagcttacggagacattccaatcatgatcacgggtcattcaatgggtggagctatggcttcattctgtgcgctcgatcttgttgttaactacggactggatggcgtaaacctgatgacatttgggcagcctcgtattggcaatgctgcatttgcttcttatttcaagacatacttgcctcaagcgatccgagttactcatgcccatgatattgtgcctcacctgccaccatatttctcattcttcccacagaagacctaccatcacttcccaagagaggtatggacccacaatattggactaggaaccctagtgtaccccgtagaaaagatctgtgacgattctggtgaagaccctacatgctgcagatcagtaagtggaagtagcgtgcgagaccatatatactatcttggcgtcagcatgcatgcagaagactggagcagctgcagaatcgtcatggactacagcaaattgcagtatcagatggacctcaacggtaatctcgtattgtcgaagcagcccggtttgtcaaacgccagaggattcagtgctcagtgaaccagtctatgatttgtacagtataatagcttcacgaatcagtaatgttcaattgttaatggatcaaaggagaagggttggaaccagcatgccgattcggagatgcttattgtacatgtgattacgtaatgtattgttcagtttgcaaatatatattcacacacgccgatatttgacaaatgcatctgaatatcaataattcatccaattttgtgagagcaacaataaaactcgaagcgttcgtcttataaacgggcagcatgagcattc

SEQ ID NO: 30843 - DNA, 2023 bp, Zea Mays
cagcatcagaccgcgacctccgatccaaactctgataagcttcagcggggcatccgcgtcatttcgcaccaaccttgttgttgttgttcttctatttcttagtatcatagcacagtatttcgtgctctcgcttcgctcccttaatttatcaccattcctaatttattctatttcttagtatcatagcacagtatttcgctcgccccgatttcccgactcttcccgtgcctcagacagcatcggattgcttgatctcgattgtcagaataagattcagcgcaggtttggattcaccgaatccaccgattgcttgcgccccgcggtcgcgcgcggcggaatttcggccgccgccaattcgggcctctccggaagggtgtccccggtgtggttcgcctaatatccgctgccctcgtgcgggactcctcgtgattttcggctgtgcgcttggcttttccagtcccgtgttgtggttccagcctttcaggggatggggcgccgcgggttgctcaaggctgcgcttctgctgtgcttccttgctgcttgctccgggagagaacttacgatcaaacagaacccttccactaccatatacaactcgactcttgccaagatactcgtggaatatgcttctgcaatctatactgccgatttgacgcaattgtttacttggacatgtgccagatgcggtgacttgatcgaggggttcgagatgatagagatcattgtggatgtcgagaactgcttgcaggcatattttggttttgccagtgacataaacgcagtcgttgttgtttttagaggaactcaagagaacaggtactgagctcatatcctgtcttgcttagctcttaaacatgctattctcatctcaactcagaactccgccatgtcaaatcttcattaatcaaccaattatgtactgctatggttcattcatatacatttatattctagatgtattttgaccttcagttgacagtttatatctgtgtgcaatgtgtaaaatgtactttgttacccccaactgtattgattatccaatttctcagcatccagaattggatagaggacttgttatggaaacaacttgatcttgactaccctggcatgcctgaagcaatggttcaccgagggttttattctgcatatcacaacacgacactacgtgatggagtagtcagtggtattcagaggactaggaaagcttacggagacattccaatcatgatcacgggtcattcaatgggtggagctatggcttcattctgtgcgctcgatcttgttgttaactacggactggatggcgtaaacctgatgacatttgggcagcctcgtattggcaatgctgcatttgcttcttatttcaagacatacttgcctcaagcgatccgagttactcatgcccatgatattgtgcctcacctgccaccatatttctcattcttcccacagaagacctaccatcacttcccaagagaggtatggacccacaatattggactaggaaccctagtgtaccccgtagaaaagatctgtgacgattctggtgaagaccctacatgctgcagtaagtggaagtagcgtgcgagaccatatatactatcttggcgtcagcatgcatgcagaagactggagcagctgcagaatcgtcatggactacagcaaattgcagtatcagatggacctcaacggtaatctcgtattgtcgaagcagcccggtttgtcaaacgccagaggattcagtgctcagtgaaccagtctatgatttgtacagtataatagcttcacgaatcagtaatgttcaattgttaatggatcaaaggagaagggttggaaccagcatgccgattcggagatgcttattgtacatgtgattacgtaatgtattgttcagtttgcaaatatatattcacacacgccgatatttgacaaatgcatctgaatatcaataattcatccaattttgtgagagcaacaataaaactcgaagcgttcgtcttataaacgggcagcatgagcattc

SEQ ID NO: 30844 - DNA, 2116 bp, Zea Mays
cagcatcagaccgcgacctccgatccaaactctgataagcttcagcggggcatccgcgtcatttcgcaccaaccttgttgttgttgttcttctatttcttagtatcatagcacagtatttcgtgctctcgcttcgctcccttaatttatcaccattcctaatttattctatttcttagtatcatagcacagtatttcgctcgccccgatttcccgactcttcccgtgcctcagacagcatcggattgcttgatctcgattgtcagaataagattcagcgcaggtttggattcaccgaatccaccgattgcttgcgccccgcggtcgcgcgcggcggaatttcggccgccgccaattcgggcctctccggaagggtgtccccggtgtggttcgcctaatatccgctgccctcgtgcgggactcctcgtgattttcggctgtgcgcttggcttttccagtcccgtgttgtggttccagcctttcaggggatggggcgccgcgggttgctcaaggctgcgcttctgctgtgcttccttgctgcttgctccgggagagttggtttgtctcaacgtattcattgtgttccatattactccacggtagtttcacaacgaaactttgttgtaacgctttgctttcgtcaaatagaacttacgatcaaacagaacccttccactaccatatacaactcgactcttgccaagatactcgtggaatatgcttctgcaatctatactgccgatttgacgcaattgtttacttggacatgtgccagatgcggtgacttgatcgaggggttcgagatgatagagatcattgtggatgtcgagaactgcttgcaggcatattttggttttgccagtgacataaacgcagtcgttgttgtttttagaggaactcaagagaacaggtactgagctcatatcctgtcttgcttagctcttaaacatgctattctcatctcaactcagaactccgccatgtcaaatcttcattaatcaaccaattatgtactgctatggttcattcatatacatttatattctagatgtattttgaccttcagttgacagtttatatctgtgtgcaatgtgtaaaatgtactttgttacccccaactgtattgattatccaatttctcagcatccagaattggatagaggacttgttatggaaacaacttgatcttgactaccctggcatgcctgaagcaatggttcaccgagggttttattctgcatatcacaacacgacactacgtgatggagtagtcagtggtattcagaggactaggaaagcttacggagacattccaatcatgatcacgggtcattcaatgggtggagctatggcttcattctgtgcgctcgatcttgttgttaactacggactggatggcgtaaacctgatgacatttgggcagcctcgtattggcaatgctgcatttgcttcttatttcaagacatacttgcctcaagcgatccgagttactcatgcccatgatattgtgcctcacctgccaccatatttctcattcttcccacagaagacctaccatcacttcccaagagaggtatggacccacaatattggactaggaaccctagtgtaccccgtagaaaagatctgtgacgattctggtgaagaccctacatgctgcagtaagtggaagtagcgtgcgagaccatatatactatcttggcgtcagcatgcatgcagaagactggagcagctgcagaatcgtcatggactacagcaaattgcagtatcagatggacctcaacggtaatctcgtattgtcgaagcagcccggtttgtcaaacgccagaggattcagtgctcagtgaaccagtctatgatttgtacagtataatagcttcacgaatcagtaatgttcaattgttaatggatcaaaggagaagggttggaaccagcatgccgattcggagatgcttattgtacatgtgattacgtaatgtattgttcagtttgcaaatatatattcacacacgccgatatttgacaaatgcatctgaatatcaataattcatccaattttgtgagagcaacaataaaactcgaagcgttcgtcttataaacgggcagcatgagcattc

SEQ ID NO: 30845 - DNA, 3317 bp, Zea Mays
atggttagaggtggcttaagccagcacgatggctgcacacccactggttcgggcctgcgcctccaccgtgcccgcgaggttcgtgacctgacgcagccgccgatcgagttaatggacgccgaggctggcgtcgccggcgccgaccagctgccgcggaggcagtactacatgaatctattgcttttggcttaccagagctttggtgttgtttacggtgacctaagcacatcgcctctttacgtttataaaagcacattctctggaaagctcaatcagtaccaagatgaggagacagtgttcggtgtgctttccctcatcttctggaccttcactctgattcctttgctgaagtatgtcactattgtgctgagtgctgatgataacggtgaaggtgcctataaatctctttcttaacatcccctgtcttttcatgtgcctggatggagtgggattagtttgttgtaatccaacatgtatatcggctagcaacgatatgcaagaaaaattaaggctatattgtttatcgtcctaataaatcttatattaaatgaataatatcccttaatgtatcttctgaaagaaggcctatcttcgcacttgtagcttacaaatgactaagggctgcctacacttttgtaggcggaccatttgctctctattcgcttctttgcaggcatacaaaactcagcttgctgccaaatcaacaagcagctgatgaggaactatcttcatactacagaaatgggtttgcacctagcaatggatcttcaccttggttaagaaggtttctggagaagcacaaaaaaatgagagttgtgcttcttctcatagttctctgtggcgctagcatggtgattggtgatggtgtcctcaccccagcaatctcagtcctctcatctatgtctggattacaagttcgagctactggtttaaagcatagttctgtagttctcctttcgtgcattgtgttggttggtctatttgccttgcaacaccgaggtactcagaaggttgcattcgtgtttgcacccattgtcatcatctggctgctttccattggaggaattggtttatacaacattcttcattggaatccaaatatatatcaagctctctctccatattatatggttaagttctttagaaagacaggtaaagatggttggattgctttaggagggatccttctttctatgacaggcagtgaagcaatgtttgctgaccttggtcactttacgagtgcatctgtcagggttgcctttattactgtcatatacccatgccttatactacaatatatgggtcatgctgcatttctgtcaaagaacacatttcacatgccgacaggtttttatgatactatcccagaacctgtgttttggcctgtattcgtggtggccacactcgctgcagttgttggtagccaagctgttatttcagcaacattctccattgtgaaacaatgccatgctttgggatgtttcccacgagtgaaggttgttcacacatcgaggtggatctatgggcagatatatattccagaaataaattggattcttatggttctttgtgttgctgtcactattgcatttcgtgatactactcttatcggcaatgcctacggtattgcctgcatgactgttatgtttgttactacattcttgatggcattgataatcatctttgtttggcaaaggaacataatatttgccctagtttttctggttttctttggatccattgaagctgtatatctttcgtcatctctcatgaaggttactcagggaggatgggttcctcttgtgcttgctttcatattcatgtcagtcatgtacatttggcactatgggttaaggaggaagtaccagtttgacctacagaacaaagtatcaatgaggtccatcttatctctcggtccaagccttggcatagttcgggttcctggtattggattgatttacacggagctggtcactggtgtaccctccattttctcacattttgtcactaatctccctgccttccatgaagtcctggtcttcctttgtgtgaaatcagtgccagtgccgtatgtttcaccggacgagcgataccttgtgggtaggattggacctaaagaatatcggatgtaccgttgcatcgttagatatggttacaaagatgtgcagcgggacgatgacaattttgagaacatgttagttatgaacattgcaaagtttattatgatggaagctgaggatgcatcttcttcagcaagttatgatgtctctaatgaaggaaggatggcggtcataacaaccaccgatgcctctggcagtccattggccatgagagatttcgacggcctagccgactccatgactatgaggagcagcaaatcagaaacccttcgaagtttgcaatcctcctacgagcaagaatcccctagtgtaagccggcgccgccgtgttcgctttgaggtaccagaggaggatggcatgggccggcaagtgaaagaagaactcatggcgctggtggaagcgaaacatgctggggtggcatacatcatgggccattcttatatcaaagctaggaggagctcaagtttcctgaagaagtttgctattgatgttggctactctttcctccggaagaactgcagaggtccatcagttacgctgcacattccacacattagtctgatagaagtgggcatgatctactatgtttagcctaatgcccatggccaaagttgacatgtggatacccggctgggacaattctgttttcccttcagtcctatctggcagcttgtgctttctgggccaaggatcctcgtgcgcttaagtttcagcttgtagagaagaaggcagactttccttgttaatattattttttagcctaaataaacaagcagaatgttgccggttatgtttctcatttggtatatttgcatgcatgctctgtaattttttctgcgggctatgtgatggaaatatatgcactccttataaactggtcagcgttcctctctctctctcgagcaggcatgaacctgtatttatttcattaaagaatggagttttaaacaaactataactcactagcgaggcacgagcttcagtcgatttcaatgttggcagcgttttcaatgttgttccacaaccgcaaaaactggtcagttttcaccaatcgacttacaattttggatgctcctgttctttgactaaaacaactcgaagaaaacgctgaaaaggaaaccattatgctccgtgccttattattgtgaacatgtgtacagctgagaaggctttaacaggctgtacagcttaactgac

SEQ ID NO: 30846 - DNA, 2831 bp, Zea Mays
atggttagaggtggcttaagccagcacgatggctgcacacccactggttcgggcctgcgcctccaccgtgcccgcgaggttcgtgacctgacgcagccgccgatcgagttaatggacgccgaggctggcgtcgccggcgccgaccagctgccggcggaccatttgctctctattcgcttctttgcaggcatacaaaactcagcttgctgccaaatcaacaagcagctgatgaggaactatcttcatactacagaaatgggtttgcacctagcaatggatcttcaccttggttaagaaggtttctggagaagcacaaaaaaatgagagttgtgcttcttctcatagttctctgtggcgctagcatggtgattggtgatggtgtcctcaccccagcaatctcagtcctctcatctatgtctggattacaagttcgagctactggtttaaagcatagttctgtagttctcctttcgtgcattgtgttggttggtctatttgccttgcaacaccgaggtactcagaaggttgcattcgtgtttgcacccattgtcatcatctggctgctttccattggaggaattggtttatacaacattcttcattggaatccaaatatatatcaagctctctctccatattatatggttaagttctttagaaagacaggtaaagatggttggattgctttaggagggatccttctttctatgacaggcagtgaagcaatgtttgctgaccttggtcactttacgagtgcatctgtcagggttgcctttattactgtcatatacccatgccttatactacaatatatgggtcatgctgcatttctgtcaaagaacacatttcacatgccgacaggtttttatgatactatcccagaacctgtgttttggcctgtattcgtggtggccacactcgctgcagttgttggtagccaagctgttatttcagcaacattctccattgtgaaacaatgccatgctttgggatgtttcccacgagtgaaggttgttcacacatcgaggtggatctatgggcagatatatattccagaaataaattggattcttatggttctttgtgttgctgtcactattgcatttcgtgatactactcttatcggcaatgcctacggtattgcctgcatgactgttatgtttgttactacattcttgatggcattgataatcatctttgtttggcaaaggaacataatatttgccctagtttttctggttttctttggatccattgaagctgtatatctttcgtcatctctcatgaaggttactcagggaggatgggttcctcttgtgcttgctttcatattcatgtcagtcatgtacatttggcactatgggttaaggaggaagtaccagtttgacctacagaacaaagtatcaatgaggtccatcttatctctcggtccaagccttggcatagttcgggttcctggtattggattgatttacacggagctggtcactggtgtaccctccattttctcacattttgtcactaatctccctgccttccatgaagtcctggtcttcctttgtgtgaaatcagtgccagtgccgtatgtttcaccggacgagcgataccttgtgggtaggattggacctaaagaatatcggatgtaccgttgcatcgttagatatggttacaaagatgtgcagcgggacgatgacaattttgagaacatgttagttatgaacattgcaaagtttattatgatggaagctgaggatgcatcttcttcagcaagttatgatgtctctaatgaaggaaggatggcggtcataacaaccaccgatgcctctggcagtccattggccatgagagatttcgacggcctagccgactccatgactatgaggagcagcaaatcagaaacccttcgaagtttgcaatcctcctacgagcaagaatcccctagtgtaagccggcgccgccgtgttcgctttgaggtaccagaggaggatggcatgggccggcaagtgaaagaagaactcatggcgctggtggaagcgaaacatgctggggtggcatacatcatgggccattcttatatcaaagctaggaggagctcaagtttcctgaagaagtttgctattgatgttggctactctttcctccggaagaactgcagaggtccatcagttacgctgcacattccacacattagtctgatagaagtgggcatgatctactatgtttagcctaatgcccatggccaaagttgacatgtggatacccggctgggacaattctgttttcccttcagtcctatctggcagcttgtgctttctgggccaaggatcctcgtgcgcttaagtttcagcttgtagagaagaaggcagactttccttgttaatattattttttagcctaaataaacaagcagaatgttgccggttatgtttctcatttggtatatttgcatgcatgctctgtaattttttctgcgggctatgtgatggaaatatatgcactccttataaactggtcagcgttcctctctctctctcgagcaggcatgaacctgtatttatttcattaaagaatggagttttaaacaaactataactcactagcgaggcacgagcttcagtcgatttcaatgttggcagcgttttcaatgttgttccacaaccgcaaaaactggtcagttttcaccaatcgacttacaattttggatgctcctgttctttgactaaaacaactcgaagaaaacgctgaaaaggaaaccattatgctccgtgccttattattgtgaacatgtgtacagctgagaaggctttaacaggctgtacagcttaactgac

SEQ ID NO: 30847 - DNA, 3069 bp, Zea Mays
atggttagaggtggcttaagccagcacgatggctgcacacccactggttcgggcctgcgcctccaccgtgcccgcgaggttcgtgacctgacgcagccgccgatcgagttaatggacgccgaggctggcgtcgccggcgccgaccagctgccgcggaggcagtactacatgaatctattgcttttggcttaccagagctttggtgttgtttacggtgacctaagcacatcgcctctttacgtttataaaagcacattctctggaaagctcaatcagtaccaagatgaggagacagtgttcggtgtgctttccctcatcttctggaccttcactctgattcctttgctgaagtatgtcactattgtgctgagtgctgatgataacggtgaaggcggaccatttgctctctattcgcttctttgcaggcatacaaaactcagcttgctgccaaatcaacaagcagctgatgaggaactatcttcatactacagaaatgggtttgcacctagcaatggatcttcaccttggttaagaaggtttctggagaagcacaaaaaaatgagagttgtgcttcttctcatagttctctgtggcgctagcatggtgattggtgatggtgtcctcaccccagcaatctcagtcctctcatctatgtctggattacaagttcgagctactggtttaaagcatagttctgtagttctcctttcgtgcattgtgttggttggtctatttgccttgcaacaccgaggtactcagaaggttgcattcgtgtttgcacccattgtcatcatctggctgctttccattggaggaattggtttatacaacattcttcattggaatccaaatatatatcaagctctctctccatattatatggttaagttctttagaaagacaggtaaagatggttggattgctttaggagggatccttctttctatgacaggcagtgaagcaatgtttgctgaccttggtcactttacgagtgcatctgtcagggttgcctttattactgtcatatacccatgccttatactacaatatatgggtcatgctgcatttctgtcaaagaacacatttcacatgccgacaggtttttatgatactatcccagaacctgtgttttggcctgtattcgtggtggccacactcgctgcagttgttggtagccaagctgttatttcagcaacattctccattgtgaaacaatgccatgctttgggatgtttcccacgagtgaaggttgttcacacatcgaggtggatctatgggcagatatatattccagaaataaattggattcttatggttctttgtgttgctgtcactattgcatttcgtgatactactcttatcggcaatgcctacggtattgcctgcatgactgttatgtttgttactacattcttgatggcattgataatcatctttgtttggcaaaggaacataatatttgccctagtttttctggttttctttggatccattgaagctgtatatctttcgtcatctctcatgaaggttactcagggaggatgggttcctcttgtgcttgctttcatattcatgtcagtcatgtacatttggcactatgggttaaggaggaagtaccagtttgacctacagaacaaagtatcaatgaggtccatcttatctctcggtccaagccttggcatagttcgggttcctggtattggattgatttacacggagctggtcactggtgtaccctccattttctcacattttgtcactaatctccctgccttccatgaagtcctggtcttcctttgtgtgaaatcagtgccagtgccgtatgtttcaccggacgagcgataccttgtgggtaggattggacctaaagaatatcggatgtaccgttgcatcgttagatatggttacaaagatgtgcagcgggacgatgacaattttgagaacatgttagttatgaacattgcaaagtttattatgatggaagctgaggatgcatcttcttcagcaagttatgatgtctctaatgaaggaaggatggcggtcataacaaccaccgatgcctctggcagtccattggccatgagagatttcgacggcctagccgactccatgactatgaggagcagcaaatcagaaacccttcgaagtttgcaatcctcctacgagcaagaatcccctagtgtaagccggcgccgccgtgttcgctttgaggtaccagaggaggatggcatgggccggcaagtgaaagaagaactcatggcgctggtggaagcgaaacatgctggggtggcatacatcatgggccattcttatatcaaagctaggaggagctcaagtttcctgaagaagtttgctattgatgttggctactctttcctccggaagaactgcagaggtccatcagttacgctgcacattccacacattagtctgatagaagtgggcatgatctactatgtttagcctaatgcccatggccaaagttgacatgtggatacccggctgggacaattctgttttcccttcagtcctatctggcagcttgtgctttctgggccaaggatcctcgtgcgcttaagtttcagcttgtagagaagaaggcagactttccttgttaatattattttttagcctaaataaacaagcagaatgttgccggttatgtttctcatttggtatatttgcatgcatgctctgtaattttttctgcgggctatgtgatggaaatatatgcactccttataaactggtcagcgttcctctctctctctcgagcaggcatgaacctgtatttatttcattaaagaatggagttttaaacaaactataactcactagcgaggcacgagcttcagtcgatttcaatgttggcagcgttttcaatgttgttccacaaccgcaaaaactggtcagttttcaccaatcgacttacaattttggatgctcctgttctttgactaaaacaactcgaagaaaacgctgaaaaggaaaccattatgctccgtgccttattattgtgaacatgtgtacagctgagaaggctttaacaggctgtacagcttaactgac

SEQ ID NO: 30848 - DNA, 2976 bp, Zea Mays
ctgtgcgtgtgcccgcgtcgcgatcggggttgtccggggggtcggatttaggggattccgcggaggcagtactacatgaatctattgcttttggcttaccagagctttggtgttgtttacggtgacctaagcacatcgcctctttacgtttataaaagcacattctctggaaagctcaatcagtaccaagatgaggagacagtgttcggtgtgctttccctcatcttctggaccttcactctgattcctttgctgaagtatgtcactattgtgctgagtgctgatgataacggtgaaggcggaccatttgctctctattcgcttctttgcaggcatacaaaactcagcttgctgccaaatcaacaagcagctgatgaggaactatcttcatactacagaaatgggtttgcacctagcaatggatcttcaccttggttaagaaggtttctggagaagcacaaaaaaatgagagttgtgcttcttctcatagttctctgtggcgctagcatggtgattggtgatggtgtcctcaccccagcaatctcagtcctctcatctatgtctggattacaagttcgagctactggtttaaagcatagttctgtagttctcctttcgtgcattgtgttggttggtctatttgccttgcaacaccgaggtactcagaaggttgcattcgtgtttgcacccattgtcatcatctggctgctttccattggaggaattggtttatacaacattcttcattggaatccaaatatatatcaagctctctctccatattatatggttaagttctttagaaagacaggtaaagatggttggattgctttaggagggatccttctttctatgacaggcagtgaagcaatgtttgctgaccttggtcactttacgagtgcatctgtcagggttgcctttattactgtcatatacccatgccttatactacaatatatgggtcatgctgcatttctgtcaaagaacacatttcacatgccgacaggtttttatgatactatcccagaacctgtgttttggcctgtattcgtggtggccacactcgctgcagttgttggtagccaagctgttatttcagcaacattctccattgtgaaacaatgccatgctttgggatgtttcccacgagtgaaggttgttcacacatcgaggtggatctatgggcagatatatattccagaaataaattggattcttatggttctttgtgttgctgtcactattgcatttcgtgatactactcttatcggcaatgcctacggtattgcctgcatgactgttatgtttgttactacattcttgatggcattgataatcatctttgtttggcaaaggaacataatatttgccctagtttttctggttttctttggatccattgaagctgtatatctttcgtcatctctcatgaaggttactcagggaggatgggttcctcttgtgcttgctttcatattcatgtcagtcatgtacatttggcactatgggttaaggaggaagtaccagtttgacctacagaacaaagtatcaatgaggtccatcttatctctcggtccaagccttggcatagttcgggttcctggtattggattgatttacacggagctggtcactggtgtaccctccattttctcacattttgtcactaatctccctgccttccatgaagtcctggtcttcctttgtgtgaaatcagtgccagtgccgtatgtttcaccggacgagcgataccttgtgggtaggattggacctaaagaatatcggatgtaccgttgcatcgttagatatggttacaaagatgtgcagcgggacgatgacaattttgagaacatgttagttatgaacattgcaaagtttattatgatggaagctgaggatgcatcttcttcagcaagttatgatgtctctaatgaaggaaggatggcggtcataacaaccaccgatgcctctggcagtccattggccatgagagatttcgacggcctagccgactccatgactatgaggagcagcaaatcagaaacccttcgaagtttgcaatcctcctacgagcaagaatcccctagtgtaagccggcgccgccgtgttcgctttgaggtaccagaggaggatggcatgggccggcaagtgaaagaagaactcatggcgctggtggaagcgaaacatgctggggtggcatacatcatgggccattcttatatcaaagctaggaggagctcaagtttcctgaagaagtttgctattgatgttggctactctttcctccggaagaactgcagaggtccatcagttacgctgcacattccacacattagtctgatagaagtgggcatgatctactatgtttagcctaatgcccatggccaaagttgacatgtggatacccggctgggacaattctgttttcccttcagtcctatctggcagcttgtgctttctgggccaaggatcctcgtgcgcttaagtttcagcttgtagagaagaaggcagactttccttgttaatattattttttagcctaaataaacaagcagaatgttgccggttatgtttctcatttggtatatttgcatgcatgctctgtaattttttctgcgggctatgtgatggaaatatatgcactccttataaactggtcagcgttcctctctctctctcgagcaggcatgaacctgtatttatttcattaaagaatggagttttaaacaaactataactcactagcgaggcacgagcttcagtcgatttcaatgttggcagcgttttcaatgttgttccacaaccgcaaaaactggtcagttttcaccaatcgacttacaattttggatgctcctgttctttgactaaaacaactcgaagaaaacgctgaaaaggaaaccattatgctccgtgccttattattgtgaacatgtgtacagctgagaaggctttaacaggctgtacagcttaactgac

SEQ ID NO: 30849 - DNA, 303 bp, Zea Mays
ccttggactgagtggagcggaaggcaaccttgcctaacatccatccatgacccgtcttatctacaggtgagctctactgcctggcttgcctgaatatgacttttgctgtagcttgtttttggatctagggctgtgtaactcaagcgtcatgacccttttgcctcatgttgcgtgttatttggcagaatttagaaatgtacatgtggtttctgttactacctacctaagtactggcagaatttagaaatgtacatgtggcacttgtgctttactgcccataacttgtttcaagaagaaattatg

SEQ ID NO: 30850 - DNA, 2520 bp, Zea Mays
ctaccatataggcgcaggataccctaccatacatgtgcaggcatccttgcctttctagctacagccgcatataggaagatatggattcaatcctcccatttaggggcagtgattgtttccttccattccaggagatctcagggttctgtagttctcctttcgtgcattgtgttggttggtctatttgccttgcaacaccgaggtactcagaaggttgcattcgtgtttgcacccattgtcatcatctggctgctttccattggaggaattggtttatacaacattcttcattggaatccaaatatatatcaagctctctctccatattatatggttaagttctttagaaagacaggtaaagatggttggattgctttaggagggatccttctttctatgacaggcagtgaagcaatgtttgctgaccttggtcactttacgagtgcatctgtcagggttgcctttattactgtcatatacccatgccttatactacaatatatgggtcatgctgcatttctgtcaaagaacacatttcacatgccgacaggtttttatgatactatcccagaacctgtgttttggcctgtattcgtggtggccacactcgctgcagttgttggtagccaagctgttatttcagcaacattctccattgtgaaacaatgccatgctttgggatgtttcccacgagtgaaggttgttcacacatcgaggtggatctatgggcagatatatattccagaaataaattggattcttatggttctttgtgttgctgtcactattgcatttcgtgatactactcttatcggcaatgcctacggtattgcctgcatgactgttatgtttgttactacattcttgatggcattgataatcatctttgtttggcaaaggaacataatatttgccctagtttttctggttttctttggatccattgaagctgtatatctttcgtcatctctcatgaaggttactcagggaggatgggttcctcttgtgcttgctttcatattcatgtcagtcatgtacatttggcactatgggttaaggaggaagtaccagtttgacctacagaacaaagtatcaatgaggtccatcttatctctcggtccaagccttggcatagttcgggttcctggtattggattgatttacacggagctggtcactggtgtaccctccattttctcacattttgtcactaatctccctgccttccatgaagtcctggtcttcctttgtgtgaaatcagtgccagtgccgtatgtttcaccggacgagcgataccttgtgggtaggattggacctaaagaatatcggatgtaccgttgcatcgttagatatggttacaaagatgtgcagcgggacgatgacaattttgagaacatgttagttatgaacattgcaaagtttattatgatggaagctgaggatgcatcttcttcagcaagttatgatgtctctaatgaaggaaggatggcggtcataacaaccaccgatgcctctggcagtccattggccatgagagatttcgacggcctagccgactccatgactatgaggagcagcaaatcagaaacccttcgaagtttgcaatcctcctacgagcaagaatcccctagtgtaagccggcgccgccgtgttcgctttgaggtaccagaggaggatggcatgggccggcaagtgaaagaagaactcatggcgctggtggaagcgaaacatgctggggtggcatacatcatgggccattcttatatcaaagctaggaggagctcaagtttcctgaagaagtttgctattgatgttggctactctttcctccggaagaactgcagaggtccatcagttacgctgcacattccacacattagtctgatagaagtgggcatgatctactatgtttagcctaatgcccatggccaaagttgacatgtggatacccggctgggacaattctgttttcccttcagtcctatctggcagcttgtgctttctgggccaaggatcctcgtgcgcttaagtttcagcttgtagagaagaaggcagactttccttgttaatattattttttagcctaaataaacaagcagaatgttgccggttatgtttctcatttggtatatttgcatgcatgctctgtaattttttctgcgggctatgtgatggaaatatatgcactccttataaactggtcagcgttcctctctctctctcgagcaggcatgaacctgtatttatttcattaaagaatggagttttaaacaaactataactcactagcgaggcacgagcttcagtcgatttcaatgttggcagcgttttcaatgttgttccacaaccgcaaaaactggtcagttttcaccaatcgacttacaattttggatgctcctgttctttgactaaaacaactcgaagaaaacgctgaaaaggaaaccattatgctccgtgccttattattgtgaacatgtgtacagctgagaaggctttaacaggctgtacagcttaactgac

SEQ ID NO: 30851 - DNA, 3265 bp, Zea Mays
ggaaaagtggcaggataaatacgagaccaaccactccctcccttctattgtccgttgtccgtctctcaagagaactgaagaacacacaatttctcattttccatctctagctcatctcctacaaacaagagtctgcatatagcagtatagaaggcgtgtgtctgcctgtcaatttgttgatctcgctagcgcgtgtggctttggcgcatgcaagcagcaggttagctgattgctatcatccgcatcggatccatgtcgggagctgccggtagggagtgcaccggcggcggcggcagtcgtagcagcagcttctcttctgtgagcaacgcatcacctacggaggtggaggaagagttcctgcggtaccacaccaatccgctcctcggtggccccacgacggagatgcgagacgacggcggcgtcaccggcggcccctcggatcagccgccgctgactgtgaagaagaagagaagccttcccgggacaccagacccgagcgcggaggtgatcgcgctgtcgccgcggacgctgatggcgacgaaccggttcgtgtgcgagatctgccacaagggcttccagcgcgaccagaacctgcagctgcaccggcgcgggcacaacctgccgtggaagctgcggcagcgcggcgggcccggaggaggcgcggacggcggcgggccgccgaggaagcgggtgtacgtgtgcccggaggcgtcgtgcgtgcaccacaacccggcgcgcgcgctgggggacctcacggggatcaagaagcactactgccggaagcacggggagaagaagtggaagtgcgagcgctgcgccaagcgctacgccgtgcactccgactggaaggcgcacgccaaggtctgcggcacccgcgagtacaagtgcgactgcggcaccgtcttctccaggtatatatacgctctaagccacatcgtcggctcgtcctaagccacatcgtcggctcgtcgcgtcgtcggccggcgtcgttgtcagtgtccgtcactggacgggcgatgcatggccggcggacattgcatatatgcatgcacgtactgatagtatgcgacatctatacatcagccagcaggcgcactaggcactacggtagtaagtagtatgcgatttcatgcatgccgtgcggatatacatcagcattttacaaaaaatgcttatacggcgtgcatatgcttctcttggacatgcaccattattaccacaccaggcgagacagcttcgtgacgcacagggcattctgcgacgccctagcccaggagaacaacaagctatcccagcccatgaacatggcgacggtggcctcagccctccaggggcaagctccccaccaccaccaccatcaccacctggcgctaccatcgtcgtcccaggcggccgacgaccacgacaatgcagccggcgatgacgacaacgacggcgacgacttcgccatcgacactaagagcccgcagctgaggatgctccccgccatgtccgactccgccgccgccgacaacaacaacaacaataacccgctattcctgccgccgccaagcatggccgggtgcatgctctccagcctgcagcagggcggcgccgcgaggcccgccccgccgccgcctgcatcctacttcagcggcggcggcaaggcagcaggcctctacgaccccagcgcgtcctccccggcgagcatgtcggccacggcgctgctgcaaaaggccgcggagatgggcgccaccgccggcgggtacggcgcgggcgcgggcttctccaccgtcggattcgggcccatgatggctgggcctagcgtcatgggcctttttgggcctgtgaagactcctgcggcgctctcgctcgaggtgtacgatgggatgccgttgggcccgacacagctggtgggcctcgacgtgggcaggctcttgccgggccagcaccacctctacggcagcagccatggccatggggtcggcatcggctccatgaccagggccatcgggtcgctgatgcacggcggcggccagcaggcggagcagcaccggcggccggacgacgacacccgcgtcgtggattacctcggcgtcgacgaccagcggacctgtttcagcggtgtgagcccctttgggcctcacataggcccatgggcttagtacctatgtaccctgcctgtgcctgtttcccttcctcatgcaaatgcaaacttactacccttgggccgtgtggtttgtttgtccggcgaggtaactgggctggccctgtaagatgctgagggtattcttgtcaatctagcatcatccgagtcaccggagcagaaaaaccctaacccacaaatcacccccctatatataaacaacggcttcctccattcttcctctgtgccgccgcaatcctctgcagccacctgagtcgtcaggtttattcatggctcggctgacgcggaagcacgattgtccattcatcgccttcaatttcttcttcattttctctggttcttttggttttgcttctgtcttttttcctgcttgctttgtcttctgatctgactggaggctgtgatgaccaaaaatacctacctattttcagactcctgacgatagaaaccaatggatccttctgagccttcctaaggtttatactcaatttgtcttccctgcttgtttatgttttaatttgctttaaaaaaacgcgaaaggaaggcaggatttttgccttgttgatgtgatgataaacctggacagaaacttcggtgttgaccaaaatttcagactacaattatctgatcaactgcaaaatcgtgcctttctgatagtgaatttgaccaactgcaaaaatccagaccacgatttttatgatacgtcacaagtttctgagtgtatttcaacgagcgacgattcaggcagcccctttgtccgatctcaatggcaatggaggtgttgcgttgctcggagatagaaatcttttggtcttcagatcggctgagtggggaggcccgcctcccctcgctgaggctggtctagtaagtctctgaaagtgctctcgactaggcaccttttttgctatttgaatttaaataaatgaattgctcatttgtacgagcccgtgcttacaacagaaacatataataccattggtaacttatgtaagctagggatgaccatcgacacatatttgatcagatcttaagttgcatgtgcattcctgtaaatcaaaactttgtactcggcagaagcaccgcgaagtagtatgaagtagtacttggttgaccacgggc

SEQ ID NO: 30852 - DNA, 3504 bp, Zea Mays
ggaaaagtggcaggataaatacgagaccaaccactccctcccttctattgtccgttgtccgtctctcaagagaactgaagaacacacaatttctcattttccatctctagctcatctcctacaaacaagagtctgcatatagcagtatagaaggcgtgtgtctgcctgtcaatttgttgatctcgctagcgcgtgtggctttggcgcatgcaagcagcaggttagctgattgctatcatccgcatcggatccatgtcgggagctgccggtagggagtgcaccggcggcggcggcagtcgtagcagcagcttctcttctgtgagcaacgcatcacctacggaggtggaggaagagttcctgcggtaccacaccaatccgctcctcggtggccccacgacggagatgcgagacgacggcggcgtcaccggcggcccctcggatcagccgccgctgactgtgaagaagaagagaagccttcccgggacaccaggttcttgcatgcagtacaaagattcctaactatagtcccgtcccgtcatagctaaattaaagctacatgcagagcagatgcatgcatggggagattgattaccgtctctccaattcgaaccgggtccgggtatactaatactaattactattaggacgtgtttatgtgttagttcttgagaacaattggcttctttccattgcgcatctttatggtcgatcttttgcgaatcttgtgaacttagagctatgattgatagggcagagaaagctcaatcatgacgacagcaactgtttagcagtccaaacctccctttcacccaagaagatgatgacgacacatactacgtactgtctgtgaggagggaatattttgaacattgtttgtgtcgatctatcaggttgatttaattaatgcgaactaaactaattaatggacttaattaattagctagctttgttgatagaatctaaacgatcgatggcaaggagaatgagatgagctcgatcaccatatatcatcagctagctaatttgctactattattcttcagacccgagcgcggaggtgatcgcgctgtcgccgcggacgctgatggcgacgaaccggttcgtgtgcgagatctgccacaagggcttccagcgcgaccagaacctgcagctgcaccggcgcgggcacaacctgccgtggaagctgcggcagcgcggcgggcccggaggaggcgcggacggcggcgggccgccgaggaagcgggtgtacgtgtgcccggaggcgtcgtgcgtgcaccacaacccggcgcgcgcgctgggggacctcacggggatcaagaagcactactgccggaagcacggggagaagaagtggaagtgcgagcgctgcgccaagcgctacgccgtgcactccgactggaaggcgcacgccaaggtctgcggcacccgcgagtacaagtgcgactgcggcaccgtcttctccaggcgagacagcttcgtgacgcacagggcattctgcgacgccctagcccaggagaacaacaagctatcccagcccatgaacatggcgacggtggcctcagccctccaggggcaagctccccaccaccaccaccatcaccacctggcgctaccatcgtcgtcccaggcggccgacgaccacgacaatgcagccggcgatgacgacaacgacggcgacgacttcgccatcgacactaagagcccgcagctgaggatgctccccgccatgtccgactccgccgccgccgacaacaacaacaacaataacccgctattcctgccgccgccaagcatggccgggtgcatgctctccagcctgcagcagggcggcgccgcgaggcccgccccgccgccgcctgcatcctacttcagcggcggcggcaaggcagcaggcctctacgaccccagcgcgtcctccccggcgagcatgtcggccacggcgctgctgcaaaaggccgcggagatgggcgccaccgccggcgggtacggcgcgggcgcgggcttctccaccgtcggattcgggcccatgatggctgggcctagcgtcatgggcctttttgggcctgtgaagactcctgcggcgctctcgctcgaggtgtacgatgggatgccgttgggcccgacacagctggtgggcctcgacgtgggcaggctcttgccgggccagcaccacctctacggcagcagccatggccatggggtcggcatcggctccatgaccagggccatcgggtcgctgatgcacggcggcggccagcaggcggagcagcaccggcggccggacgacgacacccgcgtcgtggattacctcggcgtcgacgaccagcggacctgtttcagcggtgtgagcccctttgggcctcacataggcccatgggcttagtacctatgtaccctgcctgtgcctgtttcccttcctcatgcaaatgcaaacttactacccttgggccgtgtggtttgtttgtccggcgaggtaactgggctggccctgtaagatgctgagggtattcttgtcaatctagcatcatccgagtcaccggagcagaaaaaccctaacccacaaatcacccccctatatataaacaacggcttcctccattcttcctctgtgccgccgcaatcctctgcagccacctgagtcgtcaggtttattcatggctcggctgacgcggaagcacgattgtccattcatcgccttcaatttcttcttcattttctctggttcttttggttttgcttctgtcttttttcctgcttgctttgtcttctgatctgactggaggctgtgatgaccaaaaatacctacctattttcagactcctgacgatagaaaccaatggatccttctgagccttcctaaggtttatactcaatttgtcttccctgcttgtttatgttttaatttgctttaaaaaaacgcgaaaggaaggcaggatttttgccttgttgatgtgatgataaacctggacagaaacttcggtgttgaccaaaatttcagactacaattatctgatcaactgcaaaatcgtgcctttctgatagtgaatttgaccaactgcaaaaatccagaccacgatttttatgatacgtcacaagtttctgagtgtatttcaacgagcgacgattcaggcagcccctttgtccgatctcaatggcaatggaggtgttgcgttgctcggagatagaaatcttttggtcttcagatcggctgagtggggaggcccgcctcccctcgctgaggctggtctagtaagtctctgaaagtgctctcgactaggcaccttttttgctatttgaatttaaataaatgaattgctcatttgtacgagcccgtgcttacaacagaaacatataataccattggtaacttatgtaagctagggatgaccatcgacacatatttgatcagatcttaagttgcatgtgcattcctgtaaatcaaaactttgtactcggcagaagcaccgcgaagtagtatgaagtagtacttggttgaccacgggc

SEQ ID NO: 30853 - DNA, 2923 bp, Zea Mays
aaccactccctcccttctattgtccgttgtccgtctctcaagagaactgaagaacacacaatttctcattttccatctctagctcatctcctacaaacaagagtctgcatatagcagtatagaaggcgtgtgtctgcctgtcaatttgttgatctcgctagcgcgtgtggctttggcgcatgcaagcagcaggttagctgattgctatcatccgcatcggatccatgtcgggagctgccggtagggagtgcaccggcggcggcggcagtcgtagcagcagcttctcttctgtgagcaacgcatcacctacggaggtggaggaagagttcctgcggtaccacaccaatccgctcctcggtggccccacgacggagatgcgagacgacggcggcgtcaccggcggcccctcggatcagccgccgctgactgtgaagaagaagagaagccttcccgggacaccagacccgagcgcggaggtgatcgcgctgtcgccgcggacgctgatggcgacgaaccggttcgtgtgcgagatctgccacaagggcttccagcgcgaccagaacctgcagctgcaccggcgcgggcacaacctgccgtggaagctgcggcagcgcggcgggcccggaggaggcgcggacggcggcgggccgccgaggaagcgggtgtacgtgtgcccggaggcgtcgtgcgtgcaccacaacccggcgcgcgcgctgggggacctcacggggatcaagaagcactactgccggaagcacggggagaagaagtggaagtgcgagcgctgcgccaagcgctacgccgtgcactccgactggaaggcgcacgccaaggtctgcggcacccgcgagtacaagtgcgactgcggcaccgtcttctccaggcgagacagcttcgtgacgcacagggcattctgcgacgccctagcccaggagaacaacaagctatcccagcccatgaacatggcgacggtggcctcagccctccaggggcaagctccccaccaccaccaccatcaccacctggcgctaccatcgtcgtcccaggcggccgacgaccacgacaatgcagccggcgatgacgacaacgacggcgacgacttcgccatcgacactaagagcccgcagctgaggatgctccccgccatgtccgactccgccgccgccgacaacaacaacaacaataacccgctattcctgccgccgccaagcatggccgggtgcatgctctccagcctgcagcagggcggcgccgcgaggcccgccccgccgccgcctgcatcctacttcagcggcggcggcaaggcagcaggcctctacgaccccagcgcgtcctccccggcgagcatgtcggccacggcgctgctgcaaaaggccgcggagatgggcgccaccgccggcgggtacggcgcgggcgcgggcttctccaccgtcggattcgggcccatgatggctgggcctagcgtcatgggcctttttgggcctgtgaagactcctgcggcgctctcgctcgaggtgtacgatgggatgccgttgggcccgacacagctggtgggcctcgacgtgggcaggctcttgccgggccagcaccacctctacggcagcagccatggccatggggtcggcatcggctccatgaccagggccatcgggtcgctgatgcacggcggcggccagcaggcggagcagcaccggcggccggacgacgacacccgcgtcgtggattacctcggcgtcgacgaccagcggacctgtttcagcggtgtgagcccctttgggcctcacataggcccatgggcttagtacctatgtaccctgcctgtgcctgtttcccttcctcatgcaaatgcaaacttactacccttgggccgtgtggtttgtttgtccggcgaggtaactgggctggccctgtaagatgctgagggtattcttgtcaatctagcatcatccgagtcaccggagcagaaaaaccctaacccacaaatcacccccctatatataaacaacggcttcctccattcttcctctgtgccgccgcaatcctctgcagccacctgagtcgtcaggtttattcatggctcggctgacgcggaagcacgattgtccattcatcgccttcaatttcttcttcattttctctggttcttttggttttgcttctgtcttttttcctgcttgctttgtcttctgatctgactggaggctgtgatgaccaaaaatacctacctattttcagactcctgacgatagaaaccaatggatccttctgagccttcctaaggtttatactcaatttgtcttccctgcttgtttatgttttaatttgctttaaaaaaacgcgaaaggaaggcaggatttttgccttgttgatgtgatgataaacctggacagaaacttcggtgttgaccaaaatttcagactacaattatctgatcaactgcaaaatcgtgcctttctgatagtgaatttgaccaactgcaaaaatccagaccacgatttttatgatacgtcacaagtttctgagtgtatttcaacgagcgacgattcaggcagcccctttgtccgatctcaatggcaatggaggtgttgcgttgctcggagatagaaatcttttggtcttcagatcggctgagtggggaggcccgcctcccctcgctgaggctggtctagtaagtctctgaaagtgctctcgactaggcaccttttttgctatttgaatttaaataaatgaattgctcatttgtacgagcccgtgcttacaacagaaacatataataccattggtaacttatgtaagctagggatgaccatcgacacatatttgatcagatcttaagttgcatgtgcattcctgtaaatcaaaactttgtactcggcagaagcaccgcgaagtagtatgaagtagtacttggttgaccacgggc

SEQ ID NO: 30854 - DNA, 1149 bp, Zea Mays
gtagaaggcgaaagaaggtcggaccaatggcaagataagtgtctcaaaaagaaaactagttactacaaggcaaggatattttgtctcttcctcctccgatcgaagtgtgcttgcgtcctgatcccaccaaccgcagaggacagaggaccatggagagcggcacggagcggcggcggcggcggcaccacttcgtgctggtgcacggcacctgccacggcgcgtggtgctggtacaaggtggccacactcctgtcatccgcgggccaccgcgtgacggcgctggacatggccgcgtgcggcgccagccccgggcgcgccgaggaggtgccgtcctttgaggagtacagccggccgctcctggccacggtggccggcctggcgcccgaggagaaggtggtcctcgtcggccacagcttcggcggggtcagcctcgcgctggccatggagcagtacccggacagggtcgccgtcgccgtcttcgtcgcgaccggcatgccctccgctgggaagccgatggcgttcgtcttcgagcagagtacccagcggaccgctacatggactgcgaattcgaaaccagcggcgacccccagcgtcccgtggagacatttcggttcgggccacagtacctgaagcagagactgtaccagctcagtcccccagaggacttgaccctggcaatggcgatggtgaggccgtcacagcggttccgagacgacgcgacgatgaaggggggtatcctgacggcggaacggtacggcggcgtgaggcgggtgtgcgtcgtcgccgaggacgacgcgtcagtgccggcaggcttccagcggcggatggcgtcgtggaaccccggcacggaggtgacggggttgcagggagccgaccatatgtccatgctctcgaaaccaggggagctgtcagaacttctcatggaggttgccaacaagtacagctgaaacttgtatcatgtaaatggctatcagcaaaatggttgttcaggtacgcttgtttcagatgaacaaatggagacggaagtttgaagtaacacgatgaaataagactagattttgtatccaatgcagttgtaactttctaaggtataaggctatttctatcagcatattcatcatctttaatttcaaagtctactcaatttacg

SEQ ID NO: 30855 - DNA, 491 bp, Zea Mays
gtatcttgatagctccatgatccatcaagacctcactcaactccagccttgctccctatcctgcaaatcagtttcaggttctatcactgctccggacatgaacgagcatgcagacatcaacaaagaaaacgtaaaacttcaggtttgaagaaaaggtagggctcagtgcatagacatctagaaatgcaaattttcggtgaccaactcgattgccgatttgtgtaacgcctaatagtttgccaaaaacccatgagaggaccttacaagcatgaattatccagttgattttagcaggctcccaagtcccaaacctcgtatggactgcaagatccaatggaactgcagcctcttccagacacaagtgtataacagcatggagaaataatataaacagcaacagaaaaaacagggggataaagtattactgcattgaagattttcacatcagtatcgactctaaccagtctgagatgtattcatatgccacaaat

SEQ ID NO: 30856 - DNA, 1263 bp, Zea Mays
ttttttttttaggatatgcaaagaccaaccaaaaggcaatgaacacacacgaaagcaacagtgtttattacacaggctgttaacacatggcgcagcagcaaatgcaagacaggatgctgcctcttttattcgactcggggctccgacgcatccgcgacccaggcaacggcgcaacgcaaggcgaggtcaagccgaggaggagggcggcgggggcaaggggatggcggcgacggtcttctggaacgcggggcgggcgacgatggcctcccaccaggccttgacgtgggggcgggcggcgacgagcccggccttgggggtcttgctgaggtagagcaggtaggacgcgtggttggcgtcggcgagcgtgaactcgtccccggcgaggtacttgttgcgggcgaggtgcgcctcgtacacgtcgagcaccttggcgagctgctccgcgtgcttgtccaccaccgccgcgtcgggggcgccgcccaggagcggcctcacgagcagctggaacaccagcggcgacgcgttcgggtagaagtggtgcgactccacctctagccacacctccagcttcgccgccgacgccgtcgcggggagcaggtccgtgccctccgacgcgtacttgctggcgatgtaccggttgatcgcacgggactctgcaacgcgagattgcggttcttacacgacacgacagctattgagttcttaggacagttcagcacagaaatccgagtggtcaacacaacagggataaggttcatttttttaaaaaaaaaaattgaaaaaaaaatccagagattactgctcctagatctggatctagatctcgtacgttatttaatttcataacaataatcaaccgcgacgaagaattattatcagtaaaaacagaggcgggggagtttaccgaagaggacttcgtctccgtcgacgagagccgggatctggccgaaaggctgttcggacgaaagagggagccacacagatcaggcgcaagctaaattagcagagagagaggaaagacgcatgaacatgacgcacgttgagggcgaggaagtcgggctgcttgtgggcgccggtggtgaggtcgacggggacgatctcgaagtcgaggcccttctcgttgagcacggtggccacgcgcaccacgttgggggacagcggcatcccgtacagcttcagaggcgccatccctgctgctgctgcttggtcaagtctctcgcacgcgtccaggccgcagtggataggagtagagtgggagcgagt

SEQ ID NO: 30857 - DNA, 2251 bp, Zea Mays
ctcatgatgagctccgaaagaaagaaaggaagaagaagacgactaggactagcactagtgaaccatgcatggatgtccacctccatacgcttggtctcactttcacggccatctttacctcctcccaaagccagccagccagcctctccaagagcgtggtgcgtccattcatttgttaaagccaccaaaggtgttcagcagctcagctcagcactattcgttcgttctccgtatatatggcggttgcttcgattcctttcactcgttgttatcactactaaactagtgcggggtataaagctctctccctccgcgcttccgatcagttcacgacgactccaggtccaggaggggcgcacttgactttcccctcctcctcctgcgagcaccttcctcgcctcgctctcatggcctcatcagagcctatagagtgccaggttgtggcgctgagggtgtcgattcactgccaaggatgcaagaagaaggtgaagaaggtgctccagaacatcagcggtacgcgtcgcacgctcttagctagcgggtctttcagtttaccacccacacgtcgtagcttggcattgtccaaggccttgcttacacagctccttgccttcgattgcagcacctactcagcactagtacatgcctttttttttttgcaagcaattgccggcctcgttcttgttttttttctaatcggtaaaataacgaaacaaagtcgatggcaagtctctgggacagtttgatcgggtgaaggtgctgagtttgtgttgtttttgatcctgttcaaggcgtgtaccgatgcgaaatcgatgcccggagcaacaaggtcgtggcgacggtctcgacggagctcgacccctacatgctggtcgccaagctgcgcaagtccggcaagcaggcggagctgtggccggagcagccggtgcagcagcaggagcagccggcaccagtaccaccagctgagagccaaaggcaggaggagcccaagaacaaccagcctgcggagccgggccgacccagcgaacctgccgaggagcgcggcgccgccgccgacacggccgaggccgccgcggcggagccgagcaacccgctaccttcgccgccggagcccaagccgagcgccggcggaggagaggccccgaatccggcggcccaggacagcaaagaaaacgccagcgccgacgacgtcggcggcggcgacgatacggccgcggcaccggcaccggcgcagcaaggacccagcgaggcgaaggggaaagcgaaatcgaagcagcatacggcggagatggaggagaggcagcccgtggacgccagagtgactgtggagtacgaccaccgaggcgtcggtgggggctacgtgagccgcatgccgccgccggcagtcatgagctacaaccaggtgcgcccgagcgtgagcgcgtcctactacgcccccgccccggctccggcgccggcgccgatgccgatggggaggcccgggccgtcgcagggctacatcgacgagcactacacgccgtcttacagcagcagtagcaacaactactactcctccaaccggtcgccggcgtacgagccgtactactacagcgctccgcagccggcgccgtatagctaccagtaccagtaccagccggcttcttcgtccgaggattactactacagcgcgccgccgcagaggagcgccttctcgccgccgcgggagggctacggcgacatgttcaacgacgagaacgccaattcttgcaccgtcatgtgaagggaggatgcatgcaaacatggaagtagctagtttacttacagttccttattaatcaagcgactctctctatatatatatatatatatttgtgtgtgttagtatattttagaaccagtaattaagtacgagtaaggagatgtattaaaagcactgttcagtcttgatggcgctgaataagttgagagctctgagcttgaatgcttgatgcatgtaccaaccgtgatagatagaggagaatgtgaggatctgaatgaacagctctggtgttcatcacagcaaattttgtaatgtatgacatggtcaaaatggggacttccaatctcttcaacttcttcattcatgtaagaactttgtatgtacacagaacatgagcaaagacacgatcgagctgttctgtttccgtgtgaatcttgcacctgaaaaggagctagctatgtgtcaatcattcaggaggttggttaactaaattgagcaggagtatttcatgag

SEQ ID NO: 30858 - DNA, 1927 bp, Zea Mays
ctcactttcacggccatctttacctcctcccaaagccagccagccagcctctccaagagcgtggtgcgtccattcatttgttaaagccaccaaaggtgttcagcagctcagctcagcactattcgttcgttctccgtatatatggcggttgcttcgattcctttcactcgttgttatcactactaaactagtgcggggtataaagctctctccctccgcgcttccgatcagttcacgacgactccaggtccaggaggggcgcacttgactttcccctcctcctcctgcgagcaccttcctcgcctcgctctcatggcctcatcagagcctatagagtgccagagcgcgcaattggtcttcttcttcagcttgtctgattcctgttccagcggttgtggcgctgagggtgtcgattcactgccaaggatgcaagaagaaggtgaagaaggtgctccagaacatcagcggcgtgtaccgatgcgaaatcgatgcccggagcaacaaggtcgtggcgacggtctcgacggagctcgacccctacatgctggtcgccaagctgcgcaagtccggcaagcaggcggagctgtggccggagcagccggtgcagcagcaggagcagccggcaccagtaccaccagctgagagccaaaggcaggaggagcccaagaacaaccagcctgcggagccgggccgacccagcgaacctgccgaggagcgcggcgccgccgccgacacggccgaggccgccgcggcggagccgagcaacccgctaccttcgccgccggagcccaagccgagcgccggcggaggagaggccccgaatccggcggcccaggacagcaaagaaaacgccagcgccgacgacgtcggcggcggcgacgatacggccgcggcaccggcaccggcgcagcaaggacccagcgaggcgaaggggaaagcgaaatcgaagcagcatacggcggagatggaggagaggcagcccgtggacgccagagtgactgtggagtacgaccaccgaggcgtcggtgggggctacgtgagccgcatgccgccgccggcagtcatgagctacaaccaggtgcgcccgagcgtgagcgcgtcctactacgcccccgccccggctccggcgccggcgccgatgccgatggggaggcccgggccgtcgcagggctacatcgacgagcactacacgccgtcttacagcagcagtagcaacaactactactcctccaaccggtcgccggcgtacgagccgtactactacagcgctccgcagccggcgccgtatagctaccagtaccagtaccagccggcttcttcgtccgaggattactactacagcgcgccgccgcagaggagcgccttctcgccgccgcgggagggctacggcgacatgttcaacgacgagaacgccaattcttgcaccgtcatgtgaagggaggatgcatgcaaacatggaagtagctagtttacttacagttccttattaatcaagcgactctctctatatatatatatatatatttgtgtgtgttagtatattttagaaccagtaattaagtacgagtaaggagatgtattaaaagcactgttcagtcttgatggcgctgaataagttgagagctctgagcttgaatgcttgatgcatgtaccaaccgtgatagatagaggagaatgtgaggatctgaatgaacagctctggtgttcatcacagcaaattttgtaatgtatgacatggtcaaaatggggacttccaatctcttcaacttcttcattcatgtaagaactttgtatgtacacagaacatgagcaaagacacgatcgagctgttctgtttccgtgtgaatcttgcacctgaaaaggagctagctatgtgtcaatcattcaggaggttggttaactaaattgagcaggagtatttcatgag

SEQ ID NO: 30859 - DNA, 2003 bp, Zea Mays
ctcactttcacggccatctttacctcctcccaaagccagccagccagcctctccaagagcgtggtgcgtccattcatttgttaaagccaccaaaggtgttcagcagctcagctcagcactattcgttcgttctccgtatatatggcggttgcttcgattcctttcactcgttgttatcactactaaactagtgcggggtataaagctctctccctccgcgcttccgatcagttcacgacgactccaggtccaggaggggcgcacttgactttcccctcctcctcctgcgagcaccttcctcgcctcgctctcatggcctcatcagagcctatagagtgccagcttgtctgattcctgttccagcggtccagccactgtttttattttcttcatcttcttcttctttctgtttgattcttcttcttctcagcgatccgtctgtgactgtgtgtcctgttttaattcaggttgtggcgctgagggtgtcgattcactgccaaggatgcaagaagaaggtgaagaaggtgctccagaacatcagcggcgtgtaccgatgcgaaatcgatgcccggagcaacaaggtcgtggcgacggtctcgacggagctcgacccctacatgctggtcgccaagctgcgcaagtccggcaagcaggcggagctgtggccggagcagccggtgcagcagcaggagcagccggcaccagtaccaccagctgagagccaaaggcaggaggagcccaagaacaaccagcctgcggagccgggccgacccagcgaacctgccgaggagcgcggcgccgccgccgacacggccgaggccgccgcggcggagccgagcaacccgctaccttcgccgccggagcccaagccgagcgccggcggaggagaggccccgaatccggcggcccaggacagcaaagaaaacgccagcgccgacgacgtcggcggcggcgacgatacggccgcggcaccggcaccggcgcagcaaggacccagcgaggcgaaggggaaagcgaaatcgaagcagcatacggcggagatggaggagaggcagcccgtggacgccagagtgactgtggagtacgaccaccgaggcgtcggtgggggctacgtgagccgcatgccgccgccggcagtcatgagctacaaccaggtgcgcccgagcgtgagcgcgtcctactacgcccccgccccggctccggcgccggcgccgatgccgatggggaggcccgggccgtcgcagggctacatcgacgagcactacacgccgtcttacagcagcagtagcaacaactactactcctccaaccggtcgccggcgtacgagccgtactactacagcgctccgcagccggcgccgtatagctaccagtaccagtaccagccggcttcttcgtccgaggattactactacagcgcgccgccgcagaggagcgccttctcgccgccgcgggagggctacggcgacatgttcaacgacgagaacgccaattcttgcaccgtcatgtgaagggaggatgcatgcaaacatggaagtagctagtttacttacagttccttattaatcaagcgactctctctatatatatatatatatatttgtgtgtgttagtatattttagaaccagtaattaagtacgagtaaggagatgtattaaaagcactgttcagtcttgatggcgctgaataagttgagagctctgagcttgaatgcttgatgcatgtaccaaccgtgatagatagaggagaatgtgaggatctgaatgaacagctctggtgttcatcacagcaaattttgtaatgtatgacatggtcaaaatggggacttccaatctcttcaacttcttcattcatgtaagaactttgtatgtacacagaacatgagcaaagacacgatcgagctgttctgtttccgtgtgaatcttgcacctgaaaaggagctagctatgtgtcaatcattcaggaggttggttaactaaattgagcaggagtatttcatgag

SEQ ID NO: 30860 - DNA, 1574 bp, Zea Mays
ctcctcccaaagccagccagccagcctctccaagagcgtggtgcgtccattcatttgttaaagccaccaaaggtgttcagcagctcagctcagcactattcgttcgttctccgtatatatggcggttgcttcgattcctttcactcgttgttatcactactaaactagtgcggggtataaagctctctccctccgcgcttccgatcagttcacgacgactccaggtccaggaggggcgcacttgactttcccctcctcctcctgcgagcaccttcctcgcctcgctctcatggcctcatcagagcctatagagtgccaggttgtggcgctgagggtgtcgattcactgccaaggatgcaagaagaaggtgaagaaggtgctccagaacatcagcggcgtgtaccgatgcgaaatcgatgcccggagcaacaaggtcgtggcgacggtctcgacggagctcgacccctacatgctggtcgccaagctgcgcaagtccggcaagcaggcggagctgtggccggagcagccggtgcagcagcaggagcagccggcaccagtaccaccagctgagagccaaaggcaggaggagcccaagaacaaccagcctgcggagccgggccgacccagcgaacctgccgaggagcgcggcgccgccgccgacacggccgaggccgccgcggcggagccgagcaacccgctaccttcgccgccggagcccaagccgagcgccggcggaggagaggccccgaatccggcggcccaggacagcaaagaaaacgccagcgccgacgacgtcggcggcggcgacgatacggccgcggcaccggcaccggcgcagcaaggacccagcgaggcgaaggggaaagcgaaatcgaagcagccggtcgccggcgtacgagccgtactactacagcgctccgcagccggcgccgtatagctaccagtaccagtaccagccggcttcttcgtccgaggattactactacagcgcgccgccgcagaggagcgccttctcgccgccgcgggagggctacggcgacatgttcaacgacgagaacgccaattcttgcaccgtcatgtgaagggaggatgcatgcaaacatggaagtagctagtttacttacagttccttattaatcaagcgactctctctatatatatatatatatatttgtgtgtgttagtatattttagaaccagtaattaagtacgagtaaggagatgtattaaaagcactgttcagtcttgatggcgctgaataagttgagagctctgagcttgaatgcttgatgcatgtaccaaccgtgatagatagaggagaatgtgaggatctgaatgaacagctctggtgttcatcacagcaaattttgtaatgtatgacatggtcaaaatggggacttccaatctcttcaacttcttcattcatgtaagaactttgtatgtacacagaacatgagcaaagacacgatcgagctgttctgtttccgtgtgaatcttgcacctgaaaaggagctagctatgtgtcaatcattcaggaggttggttaactaaattgagcaggagtatttcatgag

SEQ ID NO: 30861 - DNA, 2234 bp, Zea Mays
aaggtgttcagcagctcagctcagcactattcgttcgttctccgtatatatggcggttgcttcgattcctttcactcgttgttatcactactaaactagtgcggggtataaagctctctccctccgcgcttccgatcagttcacgacgactccaggtccaggaggggcgcacttgactttcccctcctcctcctgcgagcaccttcctcgcctcgctctcatggcctcatcagagcctatagagtgccagttctggtacatgtttgcagagcgcgcaattggtcttcttcttcagcttgtctgattcctgttccagcggtccagccactgtttttattttcttcatcttcttcttctttctgtttgattcttcttcttctcagcgatccgtctgtgactgtgtgtcctgttttaattcaggttgtggcgctgagggtgtcgattcactgccaaggatgcaagaagaaggtgaagaaggtgctccagaacatcagcggtacgcgtcgcacgctcttagctagcgggtctttcagtttaccacccacacgtcgtagcttggcattgtccaaggccttgcttacacagctccttgccttcgattgcagcacctactcagcactagtacatgcctttttttttttgcaagcaattgccggcctcgttcttgttttttttctaatcggtaaaataacgaaacaaagtcgatggcaagtctctgggacagtttgatcgggtgaaggtgctgagtttgtgttgtttttgatcctgttcaaggcgtgtaccgatgcgaaatcgatgcccggagcaacaaggtcgtggcgacggtctcgacggagctcgacccctacatgctggtcgccaagctgcgcaagtccggcaagcaggcggagctgtggccggagcagccggtgcagcagcaggagcagccggcaccagtaccaccagctgagagccaaaggcaggaggagcccaagaacaaccagcctgcggagccgggccgacccagcgaacctgccgaggagcgcggcgccgccgccgacacggccgaggccgccgcggcggagccgagcaacccgctaccttcgccgccggagcccaagccgagcgccggcggaggagaggccccgaatccggcggcccaggacagcaaagaaaacgccagcgccgacgacgtcggcggcggcgacgatacggccgcggcaccggcaccggcgcagcaaggacccagcgaggcgaaggggaaagcgaaatcgaagcagcatacggcggagatggaggagaggcagcccgtggacgccagagtgactgtggagtacgaccaccgaggcgtcggtgggggctacgtgagccgcatgccgccgccggcagtcatgagctacaaccaggtgcgcccgagcgtgagcgcgtcctactacgcccccgccccggctccggcgccggcgccgatgccgatggggaggcccgggccgtcgcagggctacatcgacgagcactacacgccgtcttacagcagcagtagcaacaactactactcctccaaccggtcgccggcgtacgagccgtactactacagcgctccgcagccggcgccgtatagctaccagtaccagtaccagccggcttcttcgtccgaggattactactacagcgcgccgccgcagaggagcgccttctcgccgccgcgggagggctacggcgacatgttcaacgacgagaacgccaattcttgcaccgtcatgtgaagggaggatgcatgcaaacatggaagtagctagtttacttacagttccttattaatcaagcgactctctctatatatatatatatatatttgtgtgtgttagtatattttagaaccagtaattaagtacgagtaaggagatgtattaaaagcactgttcagtcttgatggcgctgaataagttgagagctctgagcttgaatgcttgatgcatgtaccaaccgtgatagatagaggagaatgtgaggatctgaatgaacagctctggtgttcatcacagcaaattttgtaatgtatgacatggtcaaaatggggacttccaatctcttcaacttcttcattcatgtaagaactttgtatgtacacagaacatgagcaaagacacgatcgagctgttctgtttccgtgtgaatcttgcacctgaaaaggagctagctatgtgtcaatcattcaggaggttggttaactaaattgagcaggagtatttcatgag

SEQ ID NO: 30862 - DNA, 2054 bp, Zea Mays
cttcgattcctttcactcgttgttatcactactaaactagtgcggggtataaagctctctccctccgcgcttccgatcagttcacgacgactccaggtccaggaggggcgcacttgactttcccctcctcctcctgcgagcaccttcctcgcctcgctctcatggcctcatcagagcctatagagtgccagagcgcgcaattggtcttcttcttcagcttgtctgattcctgttccagcggttgtggcgctgagggtgtcgattcactgccaaggatgcaagaagaaggtgaagaaggtgctccagaacatcagcggtacgcgtcgcacgctcttagctagcgggtctttcagtttaccacccacacgtcgtagcttggcattgtccaaggccttgcttacacagctccttgccttcgattgcagcacctactcagcactagtacatgcctttttttttttgcaagcaattgccggcctcgttcttgttttttttctaatcggtaaaataacgaaacaaagtcgatggcaagtctctgggacagtttgatcgggtgaaggtgctgagtttgtgttgtttttgatcctgttcaaggcgtgtaccgatgcgaaatcgatgcccggagcaacaaggtcgtggcgacggtctcgacggagctcgacccctacatgctggtcgccaagctgcgcaagtccggcaagcaggcggagctgtggccggagcagccggtgcagcagcaggagcagccggcaccagtaccaccagctgagagccaaaggcaggaggagcccaagaacaaccagcctgcggagccgggccgacccagcgaacctgccgaggagcgcggcgccgccgccgacacggccgaggccgccgcggcggagccgagcaacccgctaccttcgccgccggagcccaagccgagcgccggcggaggagaggccccgaatccggcggcccaggacagcaaagaaaacgccagcgccgacgacgtcggcggcggcgacgatacggccgcggcaccggcaccggcgcagcaaggacccagcgaggcgaaggggaaagcgaaatcgaagcagcatacggcggagatggaggagaggcagcccgtggacgccagagtgactgtggagtacgaccaccgaggcgtcggtgggggctacgtgagccgcatgccgccgccggcagtcatgagctacaaccaggtgcgcccgagcgtgagcgcgtcctactacgcccccgccccggctccggcgccggcgccgatgccgatggggaggcccgggccgtcgcagggctacatcgacgagcactacacgccgtcttacagcagcagtagcaacaactactactcctccaaccggtcgccggcgtacgagccgtactactacagcgctccgcagccggcgccgtatagctaccagtaccagtaccagccggcttcttcgtccgaggattactactacagcgcgccgccgcagaggagcgccttctcgccgccgcgggagggctacggcgacatgttcaacgacgagaacgccaattcttgcaccgtcatgtgaagggaggatgcatgcaaacatggaagtagctagtttacttacagttccttattaatcaagcgactctctctatatatatatatatatatttgtgtgtgttagtatattttagaaccagtaattaagtacgagtaaggagatgtattaaaagcactgttcagtcttgatggcgctgaataagttgagagctctgagcttgaatgcttgatgcatgtaccaaccgtgatagatagaggagaatgtgaggatctgaatgaacagctctggtgttcatcacagcaaattttgtaatgtatgacatggtcaaaatggggacttccaatctcttcaacttcttcattcatgtaagaactttgtatgtacacagaacatgagcaaagacacgatcgagctgttctgtttccgtgtgaatcttgcacctgaaaaggagctagctatgtgtcaatcattcaggaggttggttaactaaattgagcaggagtatttcatgag

SEQ ID NO: 30863 - DNA, 370 bp, Zea Mays
ctgctatcttcatccaggtcttgctcctcatggcatcgtcctattcgacaaggcctgcggagactcgtgcattcactttggcatcggcaccagcgggttctgcaaaggcagacgaccacccaccagagtctgcacgtgtaacttcgaatgtccagggcaagagcgaagcaacacgtttacatgatggggatgagccgctatatctagcttaattattagcatgcccaaactgaatatccaataatttgagtgtttctgtagttgattgttcgctgtttgtttcaaaacgggctagcagcaaggaccagagctgcatgtgtaacatttgttttcaaagttaatatatgtgtccaatcttgtctttggagat

SEQ ID NO: 30864 - DNA, 1511 bp, Zea Mays
aaaactacaatattttaaaattgcattcccaaacaggccctaaactctcagtatccacgttccggtttgggctgctgctgcgcagttgcatttttcgcgagcgttcctcggatgatcgtggtcacctactcacctttttgcaaccaccgtcatttttttttgaccccggttcttcttttctcctctgcttccagtcccagcactccagcatgatccgttaggcactcgctctgctggaccgcagggatgagtcgaggcagctacggatcgctcgagcaagtggatcctccgtccagggctgggatgccaaggtacgatgccaaggacaataaaacaatattttatcaacggaaggagaatcacagtgtagataatgagagacatgactccgaggaggtcatctgtgttgttgatcccgtttgtgaaggtgctggagaaaacatagagcggagaagtccccatgtctccgtagaccacacctatgctctggaatgctaggtgcagtgtggtcgcccagccaaccttcattaccaaagtgcatactctgaatcagattacatttgcctcgaaaagaaagcaagaaagaaagcagacaatatgcttttaggcacacaacccttagatgatgaagcagctagctgatatgcttagtctcttcagtaaggcaaggacgaacacgacagtgcagcagttacttaagatttcagcagaaccatagaaacactttacgagatgaaaaaaagaacacatacaagaagaaaaaaaaactcaaccacatatggatactcccattagactttgttctaagaaggcaacaggggtttcatggaccctggagttcaagggtcgagaatctttcgtgcaacacgttacacacggctctaaggcaaaaggaggatcattatctgattggataagagtagtcggagaactaacatataccttggctgcatgcgtcgatccaccagcagggaacattccagcctccatgtgcagtgaatcatatctctgtagcctcttgggcggcattttctccgacgcatcatcagcatcaccgtgagcagctccgttgctgcttgtgtggtgaggttcagccatgctagactagaagtgcatgcatgttggcggaggccagacgctgttgctgtcgttcgcttcacttgccgaggtcttcgttcaacgccgcagccgtgaaacgcttgtgattttctttacacaagccgggaaggtggctacgtgcgtggtgggagggcgtggtgacttttcttcatccgcagtggctgtcactggtaagtgtagcgctgtactctagactttccaccatacgaatctgcgacttggcccttcagttccagttttcccccatactccttgacaatgatgaaccatattgagccatatgcccatgaatggatgtcctgatcccttttttttaaaaaaaaagtcagtaacgactactgtttttgaatcatatagacatatctgttaaaagtttaaaatagaaactataa

SEQ ID NO: 30865 - DNA, 1814 bp, Zea Mays
aaaactacaatattttaaaattgcattcccaaacaggccctaaactctcagtatccacgttccggtttgggctgctgctgcgcagttgcatttttcgcgagcgttcctcggatgatcgtggtcacctactcacctttttgcaaccaccgtcatttttttttgaccccggttcttcttttctcctctgcttccagtcccagcactccagcatgatccgttaggcactcgctctgctggaccgcagggatgagtcgaggcagctacggatcgctcgagcaagtggatcctccgtccagggctgggatgccaaggtacgatgccaagctcgcaggacaataaaacaatattttatcaacggaaggagaatcacagtgtagataatgagagacatgactccgaggaggtcatctgtgttgttgatcccgtttgtgaaggtgctggagaaaacatagagcggagaagtccccatgtctccgtagaccacacctatgctctggaatgctaggtgcagtgtggtcgcccagccaaccttcattaccaaagtgcatactctgaatcagattacatttgcctcgaaaagaaagcaagaaagaaagcagacaatatgcttttaggcacacaacccttagatgatgaagcagctagctgatatgcttagtctcttcagtaaggcaaggacgaacacgacagtgcagcagttacttaagatttcagcagaaccatagaaacactttacgagatgaaaaaaagaacacatacaagaagaaaaaaaaactcaaccacatatggatactcccattagactttgttctaagaaggcaacaggggtttcatggaccctggagttcaagggtcgagaatctttcgtgcaacacgttacacacggctctaaggcaaaaggaggatcattatctgattggataagagtagtcggagaactaacatataccttggctgcatgcgtcgatccaccagcagggaacattccagcctccatgtgcagtgaatcatatctctgtagcctcttgggcggcattttctccgacgcatcatcagcatcaccgtgagcagctccgttgctgcttgtgtggtgaggttcagccatgctagactagaagtgcatgcatgttggcggaggccagacgctgttgctgtcgttcgcttcacttgccgaggtcttcgttcaacgccgcagccgtgaaacgcttgtgattttctttacacaagccgggaaggtggctacgtgcgtggtgggagggcgtggtgacttttcttcatccgcagtggctgtcactggatccgtgcagagaaaagtcttcgtgataatggcttctagccttctggaatatttaccacctgcggccaagcgtgtgaaaattgctcggaaagattggcaagctgaatgaccgaaggggataagatcattgaccgtgtgcgcaagtctggttgctctctcaggtgtccctatcagggcttagaaaggacgtgtttggacttggacgaactcaaggagaactacataatgacgatttagtgacggggtttttttaagaagggtttagtgatgacttgttacatgcagctttcggctccaggacttgggtttggtaagctgtttctctgttaagtctgctattgggggtacagatccaatgcaccgaatgatcaacagaaccataaacgtcgggctggtttggtaacttagccagacctgtgggcagcccatcccctgaggcgttttattgggcctcacctttttttcccccagattattttggcgtcggttttcatacgccaacataaatggagcgtca

SEQ ID NO: 30866 - DNA, 790 bp, Zea Mays
acaccaacgaacttcgttaggctaccatgccgttgccccccgcggcccgcgaacccctgcgcggttgctcttttccctttttctatttcgcgagcgtgggtttgcaattccccgcgccgccgtgcgtccccggcaatgggaagctcactctgatgatcgctggtcggctcctctcactcgcagccatctctctctccgccacccgtcctcatttgcccccgaacactgtgacaccatctgctgcgcacgcaccctttctcaatggccgaagcgaagagggggatgggaaggatccgtgcagagaaaagtcttcgtgataatggcttctagccttctggaatatttaccacctgcggccaagcgtgtgaaaattgctcggaaagattggcaagctgaatgaccgaaggggataagatcattgaccgtgtgcgcaagtgtccctatcagggcttagaaaggacgtgtttggacttggacgaactcaaggagaactacataatgacgatttagtgacggggtttttttaagaagggtttagtgatgacttgttacatgcagctttcggctccaggacttgggtttggtaagctgtttctctgttaagtctgctattgggggtacagatccaatgcaccgaatgatcaacagaaccataaacgtcgggctggtttggtaacttagccagacctgtgggcagcccatcccctgaggcgttttattgggcctcacctttttttcccccagattattttggcgtcggttttcatacgccaacataaatggagcgtca

SEQ ID NO: 30867 - DNA, 1377 bp, Zea Mays
atggccgagtccgacctcaaggataagggactttgtgatggaaaagtggtgatgatgggtctggattgttataaggttcatttagatgatcctgacattggtgttgatattgtaaagatgaggtcatttacgagtttggtggacaccaactacatattagatgctatccatggttctgagttattggaagtgcaggttaacaatgcaggtgtaaacttcaacaaaggagcagataattctgttgagtttgctgagcaagttatcgagacaaattactatggcacgaagcggatgattgatgctatgataccgctaatgaaacgctctgcgtatggtgctcggatagtgaatgtaagctcaaggcttggtagagctaatggcagacggaatagaattggtgatgtgagcctaagagatcgactgttgaaagacgattgtttatcagagcagctgattgatgagatgatcacgaaatttctcgaacaagcgaagcaaggtacttggtccctgaatgagtggccacagatgtacacggactattcgatctcaaagctcgctgttaatgcttatacacgactcatggcaaggaggctctcggatcggcctgaaggccaaaagatatacattaactgtttctgccctggctgggtaaaaaccgccatgactggttgggaagggaatgtttctgctgaagaaggtgctgacacaggtatatggctcgccttattgcctcaggaaacggacacaaacggcaagttcttcgccgagagatgtgagataagcttctaagcgatcatatgacaagccgatggtcaagatcattaaagggggcaccgctatgtcacattgatggaaagcccatgacctcgaattctgttgattaaggtgatctacgaaatgtttgttggccatgaatgaagtatcataaaagcggaatgcttatcaggaccgccagaaaaatgggcaacttggaagcacggccagctggctgtttcctacgtgtgctacaaggctgcagcaatgacctgtattgctgtagtcagtatattacatgtttggttggttttagcacaacaaggtgaatgtgcaagcgcagcattgatgtaccatcaggtcatgcaaatctcagactggagtggttttcatgtacagaaagcaaacacgtgcttatttattatttgcgatttggagatggagacagattaagcatgtcgatgtaacttccctccctctgactattttattccctgttctgtgaatggaagtggggcaaaggcttgagacaatgccgtgtgcgctgggactgggagcatacaagtctggctgttgtgttggccgaattttttgtttttgagtcctttttgtgttaaaaatttc

SEQ ID NO: 30868 - DNA, 2682 bp, Zea Mays
ggtcaggtcacgaacccaacggaccctcagtaactgacgcttgaaagccggagctggcaacggacgctagccatagccaacggccggcggcgagcaacgcgcgcgggggcacgaggggaaagcggggcgccgctcatctggaaaacggcaatctgtgtgctgtgcgctagcgtcgctaattcggaaactcctgtgcaggtgcaggtgcagcggcagcggcagcatcccgtctggaaaagcgaaaatccagcggcagggggggcaaagggagatggaaaagacgagtccttttttttgttggtttttttttcttttatccgatctgacgagtgatgagcgagcgagccgacggacaaggcagcttgccagccgcgcccccatcatgttcttctcttccccggcaatcattggctcggctcccctgctggcggcggcggcggcaccggttcatcggaggacggactattatttagaatatctgtatatacaaatcttgtgacacgaatgaagaatcgacggccagtctgaaaaaaaaacgatgcgtcggcgcggtgtcgcggtcctggcgagttgtcgcctttggatcaatcattgggagatccatccatccatccaattccacttcttatacgatcccaccacgctcgaagacgcgagcagcgcagagccgccagccaccattcctggctgggctgcttcttccttctacatcttttctgctttctttctttcacccgcaaccgcaaccgcaacggccgcgcgccaaaccagagtttttttttcagcatcttccgctccgctttccgctgatgtttacagctcaaccctaccagtatatataccgacatgtttgtgttgatttgctgctggtttcccaattccaatccgccccccgctggaggaagaagacggggcggagtcaagaattggtacaaacggaacgtgttgcctgcagaatggattcggcatttgaccccgctgtcgtgctcgcacgtacatgatgcctctaaaccagagccatctgctgcaggtttcagatatctgcagatttcatcaccacagctacaaagattactgcgctactctgaaggaggatatccaatactagatgtcaggacttcttgcagaagctcttggagctgctgcaggaggatgtgcactactacttattgtcataattataatagtactttgcctacagcatcgcaaaagaacctcagactcttcagaaagtggtttttcagatcaagctctaccagagtcgcaggaagcaagatgtcttagtttagaggaattgaattttgctacaaggaatttcagcaatggcaaccttattggacaagggacgttcggagaggtatataagggtttgctccaggatggcacaatagtagctgttaaaagacggcattctcctcctagccaggaattcattcaagaggttaattatctagcatctctctgtcattggaaccttgtaaaacttttggggtactgtcaggaggatggcatgcagatgcttgtttatgagtatatctccaatggcagcgtatcaacacatttacatggtaacagccatgctctaggttcaaggctagaattcaagaagagactttctattgctcatggcacagctaaaggcctgagtcacctgcattcgctgacaccccctgcggtccatatgaatttcaaaacttctaatgtacttgtggacgaggacttcgcaccaaaagttgcagatactgggattccaggcatgcttgatcgacttggtgttacaggactgtcttccagaacatttaatgatcctttcgtggaacctcgaatgaaggaagctatgaacttgaacttttccatacaaagcgatgtgtacagctttggcgtattccttctggagctaattagcggacggaaagctgtctctgatcaatgcatcattcagtgggcacagagcttccaggaatcaagtgacatctccgtgatcgcagacagcagaatggccggtggctttacctcacaaagcatgaaggaattgctgagcctgacagcacggtgcgtaaatccgacgagcgagcagcgcccgtcgatgagctcggtggaggctgagatacaacggatccgcgagcaggagatcagcctcacagcagtcatggcggaaggtaccccaaccgtgactctaggcagtcagctcttcagaacatccaggtgaaacaaacatcagtgggatgtgtagtctagaagaaaagctagttctctcctcctcagggcagtagaccagccttgttctctttcggaattcgggaaaaaaaagaagagcccgtcttcatagcgagccagctgcatcccaagtgtaaaaaaaaaagagaggaaacagctgcgaggcttaccctttttttctccccagttttgttaccctgatggttccttcctaattctcccttttctgcacatgtttttaggggaattaatgacattttccttttgttgaataataataagaatgggtgggtggtggcaaaccagcggctcttgattgttcagcgcatcagtcttgcatgtgtttttttttctcttcccttcaaagtattggagaaaacatgaaaacaaaggcaattcatgcagaaagttgaagcaacagtctgcagaacatgtcgtgtattatatggcacgaggatagaacag

SEQ ID NO: 30869 - DNA, 1723 bp, Zea Mays
gtaagtgtgctttgctgttcttcacttcactctctctctctctccctccctttgtgggcactcccctcccctccccctctgcctggtgcctccctccccaaaaatacctcccaggccatctcacctcgctcacagaatcactcacggtcacttcctccacaatacagcaggagagtagcagggggttgaataggaggaagaagacggggcggagtcaagaattggtacaaacggaacgtgttgcctgcagaatggattcggcatttgaccccgctgtcgtgctcgcacgtacatgatgcctctaaaccagagccatctgctgcaggtttcagatatctgcagatttcatcaccacagctacaaagattactgcgctactctgaaggaggatatccaatactagatgtcaggacttcttgcagaagctcttggagctgctgcaggaggatgtgcactactacttattgtcataattataatagtactttgcctacagcatcgcaaaagaacctcagactcttcagaaagtggtttttcagatcaagctctaccagagtcgcaggaagcaagatgtcttagtttagaggaattgaattttgctacaaggaatttcagcaatggcaaccttattggacaagggacgttcggagaggtatataagggtttgctccaggatggcacaatagtagctgttaaaagacggcattctcctcctagccaggaattcattcaagaggttaattatctagcatctctctgtcattggaaccttgtaaaacttttggggtactgtcaggaggatggcatgcagatgcttgtttatgagtatatctccaatggcagcgtatcaacacatttacatggtaacagccatgctctaggttcaaggctagaattcaagaagagactttctattgctcatggcacagctaaaggcctgagtcacctgcattcgctgacaccccctgcggtccatatgaatttcaaaacttctaatgtacttgtggacgaggacttcgcaccaaaagttgcagatactgggattccaggcatgcttgatcgacttggtgttacaggactgtcttccagaacatttaatgatcctttcgtggaacctcgaatgaaggaagctatgaacttgaacttttccatacaaagcgatgtgtacagctttggcgtattccttctggagctaattagcggacggaaagctgtctctgatcaatgcatcattcagtgggcacagagcttccaggaatcaagtgacatctccgtgatcgcagacagcagaatggccggtggctttacctcacaaagcatgaaggaattgctgagcctgacagcacggtgcgtaaatccgacgagcgagcagcgcccgtcgatgagctcggtggaggctgagatacaacggatccgcgagcaggagatcagcctcacagcagtcatggcggaaggtaccccaaccgtgactctaggcagtcagctcttcagaacatccaggggaattaatgacattttccttttgttgaataataataagaatgggtgggtggtggcaaaccagcggctcttgattgttcagcgcatcagtcttgcatgtgtttttttttctcttcccttcaaagtattggagaaaacatgaaaacaaaggcaattcatgcagaaagttgaagcaacagtctgcagaacatgtcgtgtattatatggcacgaggatagaacag

SEQ ID NO: 30870 - DNA, 1977 bp, Zea Mays
gtaagtgtgctttgctgttcttcacttcactctctctctctctccctccctttgtgggcactcccctcccctccccctctgcctggtgcctccctccccaaaaatacctcccaggccatctcacctcgctcacagaatcactcacggtcacttcctccacaatacagcaggagagtagcagggggttgaataggaggaagaagacggggcggagtcaagaattggtacaaacggaacgtgttgcctgcagaatggattcggcatttgaccccgctgtcgtgctcgcacgtacatgatgcctctaaaccagagccatctgctgcaggtttcagatatctgcagatttcatcaccacagctacaaagattactgcgctactctgaaggaggatatccaatactagatgtcaggacttcttgcagaagctcttggagctgctgcaggaggatgtgcactactacttattgtcataattataatagtactttgcctacagcatcgcaaaagaacctcagactcttcagaaagtggtttttcagatcaagctctaccagagtcgcaggaagcaagatgtcttagtttagaggaattgaattttgctacaaggaatttcagcaatggcaaccttattggacaagggacgttcggagaggtatataagggtttgctccaggatggcacaatagtagctgttaaaagacggcattctcctcctagccaggaattcattcaagaggttaattatctagcatctctctgtcattggaaccttgtaaaacttttggggtactgtcaggaggatggcatgcagatgcttgtttatgagtatatctccaatggcagcgtatcaacacatttacatggtaacagccatgctctaggttcaaggctagaattcaagaagagactttctattgctcatggcacagctaaaggcctgagtcacctgcattcgctgacaccccctgcggtccatatgaatttcaaaacttctaatgtacttgtggacgaggacttcgcaccaaaagttgcagatactgggattccaggcatgcttgatcgacttggtgttacaggactgtcttccagaacatttaatgatcctttcgtggaacctcgaatgaaggaagctatgaacttgaacttttccatacaaagcgatgtgtacagctttggcgtattccttctggagctaattagcggacggaaagctgtctctgatcaatgcatcattcagtgggcacagagcttccaggaatcaagtgacatctccgtgatcgcagacagcagaatggccggtggctttacctcacaaagcatgaaggaattgctgagcctgacagcacggtgcgtaaatccgacgagcgagcagcgcccgtcgatgagctcggtggaggctgagatacaacggatccgcgagcaggagatcagcctcacagcagtcatggcggaaggtaccccaaccgtgactctaggcagtcagctcttcagaacatccaggtgaaacaaacatcagtgggatgtgtagtctagaagaaaagctagttctctcctcctcagggcagtagaccagccttgttctctttcggaattcgggaaaaaaaagaagagcccgtcttcatagcgagccagctgcatcccaagtgtaaaaaaaaaagagaggaaacagctgcgaggcttaccctttttttctccccagttttgttaccctgatggttccttcctaattctcccttttctgcacatgtttttaggggaattaatgacattttccttttgttgaataataataagaatgggtgggtggtggcaaaccagcggctcttgattgttcagcgcatcagtcttgcatgtgtttttttttctcttcccttcaaagtattggagaaaacatgaaaacaaaggcaattcatgcagaaagttgaagcaacagtctgcagaacatgtcgtgtattatatggcacgaggatagaacag

SEQ ID NO: 30871 - DNA, 1963 bp, Zea Mays
cttcactctctctctctctccctccctttgtgggcactcccctcccctccccctctgcctggtgcctccctccccaaaaatacctcccaggccatctcacctcgctcacagaatcactcacggtcacttcctccacaatacagcaggagagtagcagggggttgaataggaggaagaagacggggcggagtcaagaattggtacaaacggaacgtgttgcctgcagaatggattcggcatttgaccccgctgtcgtgctcgcacgtacatgatgcctctaaaccagagccatctgctgcagatatctgcagatttcatcaccacagctacaaagattactgcgctactctgaaggaggatatccaatactagatgtcaggacttcttgcagaagctcttggagctgctgcaggaggatgtgcactactacttattgtcataattataatagtactttgcctacagcatcgcaaaagaacctcagactcttcagaaagtggtttttcagatcaagctctaccagagtcgcaggaagcaagatgtcttagtttagaggaattgaattttgctacaaggaatttcagcaatggcaaccttattggacaagggacgttcggagaggtatataagggtttgctccaggatggcacaatagtagctgttaaaagacggcattctcctcctagccaggaattcattcaagagtgctgttttcttgtcaggttaattatctagcatctctctgtcattggaaccttgtaaaacttttggggtactgtcaggaggatggcatgcagatgcttgtttatgagtatatctccaatggcagcgtatcaacacatttacatggtaacagccatgctctaggttcaaggctagaattcaagaagagactttctattgctcatggcacagctaaaggcctgagtcacctgcattcgctgacaccccctgcggtccatatgaatttcaaaacttctaatgtacttgtggacgaggacttcgcaccaaaagttgcagatactgggattccaggcatgcttgatcgacttggtgttacaggactgtcttccagaacatttaatgatcctttcgtggaacctcgaatgaaggaagctatgaacttgaacttttccatacaaagcgatgtgtacagctttggcgtattccttctggagctaattagcggacggaaagctgtctctgatcaatgcatcattcagtgggcacagagcttccaggaatcaagtgacatctccgtgatcgcagacagcagaatggccggtggctttacctcacaaagcatgaaggaattgctgagcctgacagcacggtgcgtaaatccgacgagcgagcagcgcccgtcgatgagctcggtggaggctgagatacaacggatccgcgagcaggagatcagcctcacagcagtcatggcggaaggtaccccaaccgtgactctaggcagtcagctcttcagaacatccaggtgaaacaaacatcagtgggatgtgtagtctagaagaaaagctagttctctcctcctcagggcagtagaccagccttgttctctttcggaattcgggaaaaaaaagaagagcccgtcttcatagcgagccagctgcatcccaagtgtaaaaaaaaaagagaggaaacagctgcgaggcttaccctttttttctccccagttttgttaccctgatggttccttcctaattctcccttttctgcacatgtttttaggggaattaatgacattttccttttgttgaataataataagaatgggtgggtggtggcaaaccagcggctcttgattgttcagcgcatcagtcttgcatgtgtttttttttctcttcccttcaaagtattggagaaaacatgaaaacaaaggcaattcatgcagaaagttgaagcaacagtctgcagaacatgtcgtgtattatatggcacgaggatagaacag

SEQ ID NO: 30872 - DNA, 1998 bp, Zea Mays
aaaaatacctcccaggccatctcacctcgctcacagaatcactcacggtcacttcctccacaatacagcaggagagtagcagggggttgaataggaggaagaagacggggcggagtcaagaattggtacaaacggaacgtgttgcctgcagaatggattcggcatttgaccccgctgtcgtgctcgcacgtacatgatgcctctaaaccagagccatctgctgcagatatctgcagatttcatcaccacagctacaaagattactgcgctactctgaaggaggatatccaatactagatgtcaggacttcttgcagaagctcttggagctgctgcaggaggatgtgcactactacttattgtcataattataatagtactttgcctacagcatcgcaaaagaacctcagactcttcagaaagtggtttttcagatcaagctctaccagagtcgcaggaagcaagatgtcttagtttagaggaattgaattttgctacaaggaatttcagcaatggcaaccttattggacaagggacgttcggagaggtatataagggtttgctccaggatggcacaatagtagctgttaaaagacggcattctcctcctagccaggaattcattcaagaggttaattatctagcatctctctgtcattggaaccttgtaaaacttttggggtactgtcaggaggatggcatgcagatgcttgtttatgagtatatctccaatggcagcgtatcaacacatttacatggtaacagccatgctctaggttcaaggctagaattcaagaagagactttctattgctcatggcacagctaaaggcctgagtcacctgcattcgctgacaccccctgcggtccatatgaatttcaaaacttctaatgtacttgtggacgaggacttcgcaccaaaagttgcagatactgggattccaggcatgcttgatcgacttggtgttacaggactgtcttccagaacatttaatgatcctttcgtggaacctcggtaacaatggacacacatgtttctgatagttcttacattcattgcttacatcagatagatacagtagaatcatctgccttgaatctgctttgcattatttaagatcgatggaacttctgttgcatgatcagaatgaaggaagctatgaacttgaacttttccatacaaagcgatgtgtacagctttggcgtattccttctggagctaattagcggacggaaagctgtctctgatcaatgcatcattcagcacagagcttccaggaatcaagtgacatctccgtgatcgcagacagcagaatggccggtggctttacctcacaaagcatgaaggaattgctgagcctgacagcacggtgcgtaaatccgacgagcgagcagcgcccgtcgatgagctcggtggaggctgagatacaacggatccgcgagcaggagatcagcctcacagcagtcatggcggaaggtaccccaaccgtgactctaggcagtcagctcttcagaacatccaggtgaaacaaacatcagtgggatgtgtagtctagaagaaaagctagttctctcctcctcagggcagtagaccagccttgttctctttcggaattcgggaaaaaaaagaagagcccgtcttcatagcgagccagctgcatcccaagtgtaaaaaaaaaagagaggaaacagctgcgaggcttaccctttttttctccccagttttgttaccctgatggttccttcctaattctcccttttctgcacatgtttttaggggaattaatgacattttccttttgttgaataataataagaatgggtgggtggtggcaaaccagcggctcttgattgttcagcgcatcagtcttgcatgtgtttttttttctcttcccttcaaagtattggagaaaacatgaaaacaaaggcaattcatgcagaaagttgaagcaacagtctgcagaacatgtcgtgtattatatggcacgaggatagaacag

SEQ ID NO: 30873 - DNA, 2005 bp, Zea Mays
aaaaatacctcccaggccatctcacctcgctcacagaatcactcacggtcacttcctccacaatacagcaggagagtagcagggggttgaataggaggaagaagacggggcggagtcaagaattggtacaaacggaacgtgttgcctgcagaatggattcggcatttgaccccgctgtcgtgctcgcacgtacatgatgcctctaaaccagagccatctgctgcaggtttcagatatctgcagatttcatcaccacagctacaaagattactgcgctactctgaaggaggatatccaatactagatgtcaggacttcttgcagaagctcttggagctgctgcaggaggatgtgcactactacttattgtcataattataatagtactttgcctacagcatcgcaaaagaacctcagactcttcagaaagtggtttttcagatcaagctctaccagagtcgcaggaagcaagatgtcttagtttagaggaattgaattttgctacaaggaatttcagcaatggcaaccttattggacaagggacgttcggagaggtatataagggtttgctccaggatggcacaatagtagctgttaaaagacggcattctcctcctagccaggaattcattcaagaggttaattatctagcatctctctgtcattggaaccttgtaaaacttttggggtactgtcaggaggatggcatgcagatgcttgtttatgagtatatctccaatggcagcgtatcaacacatttacatggtaacagccatgctctaggttcaaggctagaattcaagaagagactttctattgctcatggcacagctaaaggcctgagtcacctgcattcgctgacaccccctgcggtccatatgaatttcaaaacttctaatgtacttgtggacgaggacttcgcaccaaaagttgcagatactgggattccaggcatgcttgatcgacttggtgttacaggactgtcttccagaacatttaatgatcctttcgtggaacctcggtaacaatggacacacatgtttctgatagttcttacattcattgcttacatcagatagatacagtagaatcatctgccttgaatctgctttgcattatttaagatcgatggaacttctgttgcatgatcagaatgaaggaagctatgaacttgaacttttccatacaaagcgatgtgtacagctttggcgtattccttctggagctaattagcggacggaaagctgtctctgatcaatgcatcattcagcacagagcttccaggaatcaagtgacatctccgtgatcgcagacagcagaatggccggtggctttacctcacaaagcatgaaggaattgctgagcctgacagcacggtgcgtaaatccgacgagcgagcagcgcccgtcgatgagctcggtggaggctgagatacaacggatccgcgagcaggagatcagcctcacagcagtcatggcggaaggtaccccaaccgtgactctaggcagtcagctcttcagaacatccaggtgaaacaaacatcagtgggatgtgtagtctagaagaaaagctagttctctcctcctcagggcagtagaccagccttgttctctttcggaattcgggaaaaaaaagaagagcccgtcttcatagcgagccagctgcatcccaagtgtaaaaaaaaaagagaggaaacagctgcgaggcttaccctttttttctccccagttttgttaccctgatggttccttcctaattctcccttttctgcacatgtttttaggggaattaatgacattttccttttgttgaataataataagaatgggtgggtggtggcaaaccagcggctcttgattgttcagcgcatcagtcttgcatgtgtttttttttctcttcccttcaaagtattggagaaaacatgaaaacaaaggcaattcatgcagaaagttgaagcaacagtctgcagaacatgtcgtgtattatatggcacgaggatagaacag

SEQ ID NO: 30874 - DNA, 2802 bp, Zea Mays
cgtgaggggtttccttctccctccaacccgcatcgttcaccaatcccagggagatcgattctacaacacgatcatggcatgcacagccttaaagtaacactataattcttcatttgtagcactaagcacacgctatgaattaatatatataatacatttacacacacatcattttcttaatttgtttcctctctctctctctctctctctctctctctctctctctctcatgtcgactgagcaagcaagtactatttcatctctcttagccacaggcttcgtgcaggctcgagaccaaagggaaagtgaggccacgcactatcatctctgtctctccccctagctctctattggattggcttgctcccccaataggagaaaagcgaggattcagaatcctcctcttcctcctccccttccacgccatctctctcttcagctagatagcttctcgattcaccttctttccttgcactcgtctctagcagccgtggtgcagctaggtgattgagtatatacgagatgcagcgcacgaccgatagggagctgtagctagagatcgatcgagacatgatacgtaccaccacacggtcgcggccagcagcaccagcaagaggaggaggaggaggaggctgtcgccgccatggtcccaacaactaggaacctgttgttgcaccatgacgtcgacggcaagagcagccgcggcaggccgtgctaccacccggccggccaccagtactacgtcggcatcgccgcccaactggaggcctcggcggcatccgccgcgtggcagcaggaccaccagagcaagccgtcgagatcccctcggctgctgggcatggcagacgacgacgagcagccggacgcggcggcagggcccagcacgagctccgcatcaccgggcggcgccggcgcaggaaacggacgaggaggagactggctccagcttggcctagccgcagccgcggcgtcggcgtcgtcctccggcgacaacagcaccatggatccggatcccccggctcccacggagctggagctttccgcctatgacaagcggaacgcctgcaggatgaggcggccgccgttgttcccgctgccgcttaggagctaccacccgccctacggctacggacggtatcgaccggcggcggcagcagctagccggtccatgccgttcatgcctccgtccaggtgctccagcagcgatgccataataagagtcatcagcccgccgcggcggcggacggaggcgcccaggctgtggctgacgcttcaggcagctcccaaccaaagtagagagcctgttttgcctcagatagcaaagagctacctaagaatcaaggacagcaacatgacggtggaggtggtgatgaagtacttggccgagaagctaggggtcgcgcggtctcggtctcggtctcggtctcatcaggtatgcatcaactcctgcaccattacgttattattcggagtgctctaatttgcaaagcataataaacacgcgtcgtcgtggttttacgtattcgactaatagtcaatagcgaactaaacagtggtaattaataagcatgcactcttgctgaaatcgatctgcagcacaacttgaactgcgtatatttatttatttatttatataatcgtcatgaaagaaacattatacctaagcatacgtagggccctataggcttgttgtttctttctttttcttttttcccttttttgtttttgctttccaaatcacagtacgcggagggggactgaaggggctaaaatctccttattcaattttaaataagaaggtaattttagctccttaatctactccagcattttagtttccaaagtagccgttcaggtgaggtagtcgaaaactaacaccggaaacgtctcgtgcgtttaattccatatacgatggagacttgtaattaagagagttgaaaagggattggaaatggaccgagtatgtatatatatgttcagatcagcaaaggtaaccgttgaatcatgaaagaggctaggctatagctgctcatcaggtgtcttcaaaccatatcaggaggctataggccagcttgattattacatattatgaatgcattagttaatatttgtccgaagacgatatatgcctccaagaaccggttgtttacactaaagaagccggttcggattaaaaaaaagccaagcgaaggggccagcatgcaggggcgtccatgggcctgtgcaggctgggcgaccgcacagggcccccaaagttgaagggcccccaagttaatctaaaacatcaagccggcgggactgcaagaaccgagagcgcgcggccaaggccggaggccagagagactgcgggagcgggagcgcaccgtcaacccgtcgtgcccagtgcgtcaatgcccaccggccaccgccaaggcgacgtcggccagccgccagccgtagagcagagtggagctgacatgcagagggcaggtccttcctccctttctgctggtgagagacgtgtgggagacaatctggtgctccacggcggcggcggcggcgcctagggaaggagtagaagaagagacaccagccgacgaccacctgactgcgcggcggcgctcgtcagctgctactgaccatgtcatgacactgtgttacagcacaagtaggaacagcattgcaagctagctagcaccactagatctgtaattaactccacttattggccgacatgttctttgggggggttttaccaactccgatcactgatggctggctaaccgatgatgcgatgcttggacgttggaccaaccaaccaaa

SEQ ID NO: 30875 - DNA, 2654 bp, Zea Mays
atacatttacacacacatcattttcttaatttgtttcctctctctctctctctctctctctctctctctctctctctcatgtcgactgagcaagcaagtactatttcatctctcttagccacaggcttcgtgcaggctcgagaccaaagggaaagtgaggccacgcactatcatctctgtctctccccctagctctctattggattggcttgctcccccaataggagaaaagcgaggattcagaatcctcctcttcctcctccccttccacgccatctctctcttcagctagatagcttctcgattcaccttctttccttgcactcgtctctagcagccgtggtgcagctaggtgattgagtatatacgagatgcagcgcacgaccgatagggagctgtagctagagatcgatcgagacatgatacgtaccaccacacggtcgcggccagcagcaccagcaagaggaggaggaggaggaggctgtcgccgccatggtcccaacaactaggaacctgttgttgcaccatgacgtcgacggcaagagcagccgcggcaggccgtgctaccacccggccggccaccagtactacgtcggcatcgccgcccaactggaggcctcggcggcatccgccgcgtggcagcaggaccaccagagcaagccgtcgagatcccctcggctgctgggcatggcagacgacgacgagcagccggacgcggcggcagggcccagcacgagctccgcatcaccgggcggcgccggcgcaggaaacggacgaggaggagactggctccagcttggcctagccgcagccgcggcgtcggcgtcgtcctccggcgacaacagcaccatggatccggatcccccggctcccacggagctggagctttccgcctatgacaagcggaacgcctgcaggatgaggcggccgccgttgttcccgctgccgcttaggagctaccacccgccctacggctacggacggtatcgaccggcggcggcagcagctagccggtccatgccgttcatgcctccgtccaggtgctccagcagcgatgccataataagagtcatcagcccgccgcggcggcggacggaggcgcccaggctgtggctgacgcttcaggcagctcccaaccaaagtagagagcctgttttgcctcagatagcaaagagctacctaagaatcaaggacagcaacatgacggtggaggtggtgatgaagtacttggccgagaagctaggggtcgcgcggtctcggtctcggtctcggtctcatcaggtatgcatcaactcctgcaccattacgttattattcggagtgctctaatttgcaaagcataataaacacgcgtcgtcgtggttttacgtattcgactaatagtcaatagcgaactaaacagtggtaattaataagcatgcactcttgctgaaatcgatctgcagcacaacttgaactgcgtatatttatttatttatttatataatcgtcatgaaagaaacattatacctaagcatacgtagggccctataggcttgttgtttctttctttttcttttttcccttttttgtttttgctttccaaatcacagtacgcggagggggactgaaggggctaaaatctccttattcaattttaaataagaaggtaattttagctccttaatctactccagcattttagtttccaaagtagccgttcaggtgaggtagtcgaaaactaacaccggaaacgtctcgtgcgtttaattccatatacgatggagacttgtaattaagagagttgaaaagggattggaaatggaccgagtatgtatatatatgttcagatcagcaaaggtaaccgttgaatcatgaaagaggctaggctatagctgctcatcaggtgtcttcaaaccatatcaggaggctataggccagcttgattattacatattatgaatgcattagttaatatttgtccgaagacgatatatgcctccaagaaccggttgtttacactaaagaagccggttcggattaaaaaaaagccaagcgaaggggccagcatgcaggggcgtccatgggcctgtgcaggctgggcgaccgcacagggcccccaaagttgaagggcccccaagttaatctaaaacatcaagccggcgggactgcaagaaccgagagcgcgcggccaaggccggaggccagagagactgcgggagcgggagcgcaccgtcaacccgtcgtgcccagtgcgtcaatgcccaccggccaccgccaaggcgacgtcggccagccgccagccgtagagcagacaggtggagctgacatgcagagggcaggtccttcctccctttctgctggtgagagacgtgtgggagacaatctggtgctccacggcggcggcggcggcgcctagggaaggagtagaagaagagacaccagccgacgaccacctgactgcgcggcggcgctcgtcagctgctactgaccatgtcatgacactgtgttacagcacaagtaggaacagcattgcaagctagctagcaccactagatctgtaattaactccacttattggccgacatgttctttgggggggttttaccaactccgatcactgatggctggctaaccgatgatgcgatgcttggacgttggaccaaccaaccaaa

SEQ ID NO: 30876 - DNA, 1298 bp, Zea Mays
cgagaccaaagggaaagtgaggccacgcactatcatctctgtctctccccctagctctctattggattggcttgctcccccaataggagaaaagcgaggattcagaatcctcctcttcctcctccccttccacgccatctctctcttcagctagatagcttctcgattcaccttctttccttgcactcgtctctagcagccgtggtgcagctaggtgattgagtatatacgagatgcagcgcacgaccgatagggagctgtagctagagatcgatcgagacatgatacgtaccaccacacggtcgcggccagcagcaccagcaagaggaggaggaggaggaggctgtcgccgccatggtcccaacaactaggaacctgttgttgcaccatgacgtcgacggcaagagcagccgcggcaggccgtgctaccacccggccggccaccagtactacgtcggcatcgccgcccaactggaggcctcggcggcatccgccgcgtggcagcaggaccaccagagcaagccgtcgagatcccctcggctgctgggcatggcagacgacgacgagcagccggacgcggcggcagggcccagcacgagctccgcatcaccgggcggcgccggcgcaggaaacggacgaggaggagactggctccagcttggcctagccgcagccgcggcgtcggcgtcgtcctccggcgacaacagcaccatggatccggatcccccggctcccacggagctggagctttccgcctatgacaagcggaacgcctgcaggatgaggcggccgccgttgttcccgctgccgcttaggagctaccacccgccctacggctacggacggtatcgaccggcggcggcagcagctagccggtccatgccgttcatgcctccgtccaggtgctccagcagcgatgccataataagagtcatcagcccgccgcggcggcggacggaggcgcccaggctgtggctgacgcttcaggcagctcccaaccaaagtagagagcctgttttgcctcagatagcaaagagctacctaagaatcaaggacagcaacatgacggtggaggtggtgatgaagtacttggccgagaagctaggggtcgcgcggtctcggtctcggtctcggtctcatcagccggcgggactgcaagaaccgagagcgcgcggccaaggccggaggccagagagactgcgggagcgggagcgcaccgtcaacccgtcgtgcccagtgcgtcaatgcccaccggccaccgccaaggcgacgtcggccagccgccagccgtagagcag

SEQ ID NO: 30877 - DNA, 2824 bp, Zea Mays
agaagagcaaaaactgaaagctctccagcggcgtcgcgagcgtgctctcccccacttccttcccactctccctcgccccggcatcgccatctccgcgccgcagccgcccgcccgccggcccagatcccaccggcgagccgcagcatggaccgtctccgggcgggaagccccgtctacgggcggcagcggagcggcagcagcacgggctcctcctcccccggcggcgtctccccctcgcaccaccgctcctcctccacctcctccgctgcctccgccgcgggcgcgcccggcacctccaacatccgccgcacgcagaacgtcgccgcgcgcgccgcggccgcgaggctcgcgcaggtcatggcctcgcagaacgccgccgcggccgccggcgacgatgacgacgacgatgactacccgcccccggctcctgggaggttcggaagtggaagagtggcgcacggcagcaacggcgtgtccctgcttggacgctccgcgagatctccctctcctgcggtcggaatattgtagagccacctcctacggcccgctcatcatcggcaggcaggccagctgttgcatcacgacccaccaccacagtggtgccgccaatcaaaaccaacacgacgctgcgaacaccgtcccctattccaccggtggctgtggagcctccagcggatcgcactcgaccgaaaagatttgatgcagcgcttcatagctcaagagaatcaggactgaaaagagaggcatctacacttcacgatgagcttgatatgctacaagaggagaatgaaagtgttctagaaaagttgcgacttgctgaagaaagatgtgaggaagctgaagctagagccaaggagcttgagaaacaggtagctgctcttggagaaggagtatcattagaggctcgcctcttgagcaggaaggaagcagcacttaaacagagggaggctgcgctaaaagctgcaagagaatcaaaggatggcagagatggggaagtaacaacactaaggcaagaacttgagtctgccaaagaagaggttgcatcagcaatggaccagctaaaggaggcagagtctgaaacgaaggctctccgatctatgactcagagaacggtcttaactcaagaagaaatggaggaggttgtcctaaaaagatgctggcttgcacgctattggggcttagcagttcaatatggtgtgtatcccgaaattgcggtatcaaagcatgaacattggtcatcattggctcctcttcctcttgaggttgttctttccgccggtcaaaaagctaaggaggaacctcgaaaacaaggtgacaatgttcaagggagaaataaacttgcacgagaaatgagtgatgtaatgggagaaggcaatatagagagcatgctttcagttgaaatgggccttagagagctttcttcattgaaggtggaagatgctgttgtagttgcagttggccaacatcgcagacctagcatagttcgtcagttcacatcagatttcaaatcacctggtgaacctaaatacttggaggcatttgatcttagcccagaagaggctgaagatgttagctttaagcaggcatggcttatatacttctggagaagagccaaaactcatggtgttgaggaagatattgctgatgaccggcttcagctttggattggtcgcaacgcacaagctccaaattctcatgacgctatcgatgtggagagaggtctaacagagctgaggaaattgggcatagagcagcaactgtgggagggctcgcgagcagatatagatcaagcttctttggcgatggagaatcagtaagaattttccacggctgtctatgcttcgtgtatcatcccagttttggagaaacgggaactccatttcccagcaggtctcggccctttgcatcatcaggtatcacagtcacaggattgtgctccgatcttggggtgtgaccgatggacttccgatgagtttgtgtagtgcatgtgcaagccattcatctgttgttattaaaatagctttgtgaaatgtgtaatagctctgctttggcaagagaaacgatggcaacgacgaccccacttccagcaattgtgaattttgtgattatcccaccttgtttgttctctgctgtcgagcccaacctctccgcaccagggaacgtgtgtgttcctgcaacggatgaacgaaatggtttttgtgtatctctgggtagtatgagttctgtgcaaatggttctggagttttctataagatcttaaaaaccatcacccttcgatccagcatcatctctgttttatggctggtcttcatcatgtcaagtcaagcagaagatgtgacatttgcatggccctccgctcctgtgctactcccttcccttgcagttggaaggacggccacactacaaggtaggtcacacgttacaagcggatttggagccgattcctcatcgccacccacaggccacaggcgattcctcatcatctcacaccttgacctgaagtaaagtaacgcgagccgcaggtacgctgttggcgccgcccgtccctttcgagttcgtcacatgccgtcgttaccaaacacgcagcggaacagaacccagcccagacttgtccttgcacggacgccacatgcagaaacataccgccggcgccgcctgcctgcctatctgcatccagtatggcatgggacgccccacattcactctcacccttggttttcacgaccaagacatgatgtgtgtatactgtgctgtgcccgtgcaactctctccaacggagccggcgcttgttccagccagacactgagcaccaccaagatctact

SEQ ID NO: 30878 - DNA, 1848 bp, Zea Mays
cttaggagccagagccgtttgcatgaggagcaaggcagcaagccttcgttcaagtgtcttctactacacctcctctctcctccgcggcaccgcctataagaggcgcaaccagggccacggcactctgggttgagagaagggagagagagagagttgccagtgaaccaggataagtgaggaggagatcggcaaggagcggacggccgtggcggtagccatggacgactcggcggaggtgaagctggtggacgagatcacgggagagggaggggcggcgggggactggggctacctgggctccgacgggatgggctccggctcctacccggcgttccccttctccagagacgtcctatccacgccgacctccgcgtcgttgctcctctccatggaccccgcggcgctcttcgacttcaacggcaccttccctccctcctccgcggccgcggccaccgccggctcctcgctgtccgccttccacgacttcagctgcatcaaccccttcgacgacgccggccacttcctcggcgctcccccgccggtgccggcggcggcggcgcctcagcagcaggggcagaaaggtgggttctttgcgccgctgccggcctcggacttcaacgacgccgggatgagctgggacgacgaggacgagatcgaccaaagcgtcgacgcctcctcgatggccatctcggcctccatggagaatgctgcgggcgcggtggcgggggcaagtggcgccggcggtggcagcgggagaggcaagaagaaagggatgccggccaagaacctcatggcggagcgccggcgtcgcaagaagctcaatgaccgcctctacatgctgcgctcggtggtgccgaagatcagcaagatggatagggcttctatccttggcgacgcaattgagtatctgaaggagctcctgcagaggatcagcgatcttcacaatgaacttgagtcagctccgagctcttcgcttgttggaccaacatcagctagcttcaacccatcaacaccgacattgcagacatttcctggccaggtcaaggaagaactttgcccgggctcattcccaagccctactggacaacaagccacagtcgaagtcaggatgagggaagggcatgcagtcaatatccacatgttctgtgcgcgtaggccaggcatcctgctgtcgacaatgacggccctcgacagcctaggcctcgacatcgagcaggcggtcatcagctgcttcaatggctttgcgatggacgtgttccgagctgagtgcgcggatggtcctggaatggtgcctgaagaaattaaggccgtgctgatgcacaccgccggcctccacaacgcaatgtagccggtccgaaaacgggccaccgccaggatgacgacgatcctcctcctttctactaagggcttcggttcggaagcggcataagattaagctgtggtggccattggttttctggggcaagtgatgaattttaagatgatgaggctcgccatctcgggcatgaggcatgagtgatgatgtaactatgggattcttttttttcttctcattagcctaatgtcggattttctcctctctgatacacttgtggtgtaatagaatctatgctgcgtgttgaacaatatatggtggtgaatggtgatgcggtagctagcatcaaactcagtgcctgttggtcagagatcgatggtgcaaagagagacgagttcattcatcagcgtccagcaatgattttgactggctatgggtccgtccgtccttgattcgaatcaaatgaattgaatcctctggcttcttgttatttatgcacactgtcttgcagaattcgccagtcagtgaagcct

SEQ ID NO: 30879 - DNA, 2089 bp, Zea Mays
gaaaatctcccataggtttccgcctcgatggccctattgcgtaaaacaataaacccgccttccccaccactggtcatcagtctccactccacgcccgacagagcaggaggactcagaaatggcaatcccagtgcgatcggctgccgcgccccgccgcctcgttccgtcgatacctccggcgagctctggacatgttcgaggactggcgtgcttcggtacccgaaccgggcctcgcggtgcaagagggttgtcaatggtggtcgccgactccaccagccgtcgggccaagcaagcggacggcggggacggcgtccttggggcgcctgttctcggagggctcgggatggagggattgggggatcagctcagcgtggtgatgaagttcggggggtcctcggtgtcgtcggccgcgaggatggctgaggtggccggcctcatcctgacgttccccgaggagcgccccgtcgtcgttctctctgccatggggaaaaccaccaacaaccttctccttgctggagagaaggcagtagggtgtggagttatccatgtttctgaaatcgaagagtggaatatggtcaaaagcctacatatcaagacggtggatgaacttggacttccaagatctgtaatacaagacatgctagatgaactggagcaactattgaaaggtatcgctatgatgaaagagctgacgcctaggaccagtgactaccttgtttcatttggagaatgcatgtccaccaggattttttctgcttatttgaacaaaattcgtgtcaaggcacggcagtatgacgcatttgatattggtttcattacaactgatgaatttggtaatgcggatatcttagaagcaacctatcctgctgttgcgaagagacttcatggggactggatacaggatccagcgatacctgttgttactgggttccttgggaagggctggaaatctggtgctgtaactactttaggccgaggtggtagtgacttgactgctacaaccattggtaaagccttgggactgagagaaattcaggtatggaaagatgttgatggtgtacttacttgtgatccaaatatctacccacatgcaaagactgttccatacttaacatttgaagaggccacagaacttgcttattttggtgctcaggttttgcatccacaatcgatgagacctgctagagaaggtgatattccagttagggttaagaattcatacaaccctaaagctccaggcacccttattaccagacaaagagacatggataaggttgtactaactagcatagtgctcaagtcaaatgtcactatgttggacattgtgagcactcggatgcttggtcagtatggtttttctggcaagggtatttgctatatttgaagatctatgtatatctgtggattgtgttgctaccagtgaagttagtgtttctgtgtcacttgatccatcaaagatctggagtagggaactgatacagcaggaacttgaccatgtagttgaagagcttgagaaaatagcaattgttcgtctacttcagcagagggcgataatttcacttatcggaaatgtggagcaatcgtctctcatactagaaaagacgggacgtgtgctgaggaaaagtggggttaatgttcagatgatctcgcaaggagcgtcaaaggttaacatgtcgctgatagtccatgatagcgatgcaaaggcactcgtagaagcccttcatcaggcgttctttgaagacgatgtcctatcacaagtcgaagcggagaacctactcgtgggctgatcaacgtaggctttgctgggtccaggcgtgttatctgttatagattcccactcgcctccatgaacggcatgggcattggatcattgatcatgttttgcttgaaacaagtatgtcttccaggttctcagccaatgactgcaaaactgtgtttctgttttagaactgtttgcagacaccacagtctgagctgcgagcaccgattgtcaacaagatggcaagcctgtgatataattccaactgtctctaatcaatatatataataaacattatcaatatctattaattataagctgttttagttt

SEQ ID NO: 30880 - DNA, 1741 bp, Zea Mays
tcgatggccctattgcgtaaaacaataaacccgccttccccaccactggtcatcagtctccactccacgcccgacagagcaggaggactcagaaatggcaatcccagtgcgatcggctgccgcgccccgccgcctcgttccgtcgatacctccggcgagctctggacatgttcgaggactggcgtgcttcggtacccgaaccgggcctcgcggtgcaagagggttgtcaatggtggtcgccgactccaccagccgtcgggccaagcaagcggacggcggggacggcgtccttggggcgcctgttctcggagggctcgggatggagggattgggggatcagctcagcgtggtgatgaagttcggggggtcctcggtgtcgtcggccgcgaggatggctgaggtggccggcctcatcctgacgttccccgaggagcgccccgtcgtcgttctctctgccatggggaaaaccaccaacaaccttctccttgctggagagaaggcagtagggtgtggagttatccatgtttctgaaatcgaagagtggaatatggtcaaaagcctacatatcaagacggtggatgaacttggacttccaagatctgtaatacaagacatgctagatgaactggagcaactattgaaaggtatcgctatgatgaaagagctgacgcctaggaccagtgactaccttgtttcatttggagaatgcatgtccaccaggattttttctgcttatttgaacaaaattcgtgtcaaggcacggcaggtacttcttgatattttcttgatttgcacagtgattcagtgagcttttcaggttatgaatgcagcagcctacaagaatttgctatagtatccctgccctatggtgggggtgtcttgaaactttgattagtcattgatatttttactacatatgcacttcgtgatctcaagtttcagctcattatgttagttgattgccactagtattctgcggaaatttcacatttcgataatgattcgttcattgtccttttatgtgtgcgtggaaaatattcttagtattttttagattttgtgattaatttggtattgccataaaattgtaaccttttagatgatggagataatctccgtccacttcaccaaccaggttacacaaaccattttatcctttaaaatgtggacaacaggatttgaacccttatagtagtggagtcacacacccacaactcaattgagtgtttgactatgatctggatttccctttatttaatatctcaatttgatacaggggccatgtaaccagcctagctgcaaatccccagtacatccatatacatcccccattcttctacattatgcaatgatgtgaactcacgttcattattaattttatttgaaattttttgcagtatgacgcatttgatattggtttcattacaactgatgaatttggtaatgcggatatcttagaagcaacctatcctgctgttgcgaagagacttcatggggactggatacaggatccagcgatacctgttgttactgggttccttgggaagggctggaaatctggtgctgtaactactttaggccgaggtggtagtgacttgactgctacaaccattggacttgaaccctgtatagtgtgaccaggctgcttctcagtgaataaacaaatctttcagttgcatacttctcaaaaacgaaagatcctgttcagtagataaacctctgttccctttttaccttttaa

SEQ ID NO: 30881 - DNA, 2608 bp, Zea Mays
tcgatggccctattgcgtaaaacaataaacccgccttccccaccactggtcatcagtctccactccacgcccgacagagcaggaggactcagaaatggcaatcccagtgcgatcggctgccgcgccccgccgcctcgttccgtcgatacctccggcgagctctggacatgttcgaggactggcgtgcttcggtacccgaaccgggcctcgcggtgcaagagggttgtcaatggtggtcgccgactccaccagccgtcgggccaagcaagcggacggcggggacggcgtccttggggcgcctgttctcggagggctcgggatggagggattgggggatcagctcagcgtggtgatgaagttcggggggtcctcggtgtcgtcggccgcgaggatggctgaggtggccggcctcatcctgacgttccccgaggagcgccccgtcgtcgttctctctgccatggggaaaaccaccaacaaccttctccttgctggagagaaggcagtagggtgtggagttatccatgtttctgaaatcgaagagtggaatatggtcaaaagcctacatatcaagacggtggatgaacttggacttccaagatctgtaatacaagacatgctagatgaactggagcaactattgaaaggtatcgctatgatgaaagagctgacgcctaggaccagtgactaccttgtttcatttggagaatgcatgtccaccaggattttttctgcttatttgaacaaaattcgtgtcaaggcacggcaggtacttcttgatattttcttgatttgcacagtgattcagtgagcttttcaggttatgaatgcagcagcctacaagaatttgctatagtatccctgccctatggtgggggtgtcttgaaactttgattagtcattgatatttttactacatatgcacttcgtgatctcaagtttcagctcattatgttagttgattgccactagtattctgcggaaatttcacatttcgataatgattcgttcattgtccttttatgtgtgcgtggaaaatattcttagtattttttagattttgtgattaatttggtattgccataaaattgtaaccttttagatgatggagataatctccgtccacttcaccaaccaggttacacaaaccattttatcctttaaaatgtggacaacaggatttgaacccttatagtagtggagtcacacacccacaactcaattgagtgtttgactatgatctggatttccctttatttaatatctcaatttgatacaggggccatgtaaccagcctagctgcaaatccccatatgacgcatttgatattggtttcattacaactgatgaatttggtaatgcggatatcttagaagcaacctatcctgctgttgcgaagagacttcatggggactggatacaggatccagcgatacctgttgttactgggttccttgggaagggctggaaatctggtgctgtaactactttaggccgaggtggtagtgacttgactgctacaaccattggtaaagccttgggactgagagaaattcaggtatggaaagatgttgatggtgtacttacttgtgatccaaatatctacccacatgcaaagactgttccatacttaacatttgaagaggccacagaacttgcttattttggtgctcaggttttgcatccacaatcgatgagacctgctagagaaggtgatattccagttagggttaagaattcatacaaccctaaagctccaggcacccttattaccagacaaagagacatggataaggttgtactaactagcatagtgctcaagtcaaatgtcactatgttggacattgtgagcactcggatgcttggtcagtatggtttttctggcaagggtatttgctatatttgaagatctatgtatatctgtggattgtgttgctaccagtgaagttagtgtttctgtgtcacttgatccatcaaagatctggagtagggaactgatacagcaggaacttgaccatgtagttgaagagcttgagaaaatagcaattgttcgtctacttcagcagagggcgataatttcacttatcggaaatgtggagcaatcgtctctcatactagaaaagacgggacgtgtgctgaggaaaagtggggttaatgttcagatgatctcgcaaggagcgtcaaaggttaacatgtcgctgatagtccatgatagcgatgcaaaggcactcgtagaagcccttcatcaggcgttctttgaagacgatgtcctatcacaagtcgaagcggagaacctactcgtgggctgatcaacgtaggctttgctgggtccaggcgtgttatctgttatagattcccactcgcctccatgaacggcatgggcattggatcattgatcatgttttgcttgaaacaagtatgtcttccaggttctcagccaatgactgcaaaactgtgtttctgttttagaactgtttgcagacaccacagtctgagctgcgagcaccgattgtcaacaagatggcaagcctgtgatataattccaactgtctctaatcaatatatataataaacattatcaatatctattaattataagctgttttagttt

SEQ ID NO: 30882 - DNA, 2925 bp, Zea Mays
tcgatggccctattgcgtaaaacaataaacccgccttccccaccactggtcatcagtctccactccacgcccgacagagcaggaggactcagaaatggcaatcccagtgcgatcggctgccgcgccccgccgcctcgttccgtcgatacctccggcgagctctggacatgttcgaggactggcgtgcttcggtacccgaaccgggcctcgcggtgcaagagggttgtcaatggtggtcgccgactccaccagccgtcgggccaagcaagcggacggcggggacggcgtccttggggcgcctgttctcggagggctcgggatggagggattgggggatcagctcagcgtggtgatgaagttcggggggtcctcggtgtcgtcggccgcgaggatggctgaggtggccggcctcatcctgacgttccccgaggagcgccccgtcgtcgttctctctgccatggggaaaaccaccaacaaccttctccttgctggagagaaggcagtagggtgtggagttatccatgtttctgaaatcgaagagtggaatatggtcaaaagcctacatatcaaacggtggatgaacttggacttccaagatctgtaatacaagacatgctagatgaactggagcaactattgaaaggtatcgctatgatgaaagagctgacgcctaggaccagtgactaccttgtttcatttggagaatgcatgtccaccaggattttttctgcttatttgaacaaaattcgtgtcaaggcacggcaggtacttcttgatattttcttgatttgcacagtgattcagtgagcttttcaggttatgaatgcagcagcctacaagaatttgctatagtatccctgccctatggtgggggtgtcttgaaactttgattagtcattgatatttttactacatatgcacttcgtgatctcaagtttcagctcattatgttagttgattgccactagtattctgcggaaatttcacatttcgataatgattcgttcattgtccttttatgtgtgcgtggaaaatattcttagtattttttagattttgtgattaatttggtattgccataaaattgtaaccttttagatgatggagataatctccgtccacttcaccaaccaggttacacaaaccattttatcctttaaaatgtggacaacaggatttgaacccttatagtagtggagtcacacacccacaactcaattgagtgtttgactatgatctggatttccctttatttaatatctcaatttgatacaggggccatgtaaccagcctagctgcaaatccccagtacatccatatacatcccccattcttctacattatgcaatgatgtgaactcacgttcattattaattttatttgaaattttttgcagtatgacgcatttgatattggtttcattacaactgatgaatttggtaatgcggatatcttagaagcaacctatcctgctgttgcgaagagacttcatggggactggatacaggatccagcgatacctgttgttactgggttccttgggaagggctggaaatctggtgctgtaactactttaggccgaggtggtagtgacttgactgctacaaccattggtatggaaagatgttgatggtgtacttacttgtgatccaaatatctacccacatgcaaagactgttccatacttaacatttgaagaggccacagaacttgcttattttggtgctcaggacttgaaccctgtatagtgtgaccaggctgcttctcagtgaataaacaaatctttcagttgcatacttctcaaaaacgaaagatcctgttcagtagataaacctctgttccctttttaccttttaaagctatattgattgttgtttggcatttgctttactaaccatcatgaattgaacatatagctcatgatgtcagtctcctgaacagaagcgagaaatttaggatcgttattgtggactgttcactccaatgcaggttttgcatccacaatcgatgagacctgctagagaaggtgatattccagttagggttaagaattcatacaaccctaaagctccaggcacccttattaccagacaaagagacatggataaggttgtactaactagcatagtgctcaagtcaaatgtcactatgttggacattgtgagcactcggatgcttggtcagtatggtttttctggcaagggtatttgctatatttgaagatctatgtatatctgtggattgtgttgctaccagtgaagttagtgtttctgtgtcacttgatccatcaaagatctggagtagggaactgatacagcaggaacttgaccatgtagttgaagagcttgagaaaatagcaattgttcgtctacttcagcagagggcgataatttcacttatcggaaatgtggagcaatcgtctctcatactagaaaagacgggacgtgtgctgaggaaaagtggggttaatgttcagatgatctcgcaaggagcgtcaaaggttaacatgtcgctgatagtccatgatagcgatgcaaaggcactcgtagaagcccttcatcaggcgttctttgaagacgatgtcctatcacaagtcgaagcggagaacctactcgtgggctgatcaacgtaggctttgctgggtccaggcgtgttatctgttatagattcccactcgcctccatgaacggcatgggcattggatcattgatcatgttttgcttgaaacaagtatgtcttccaggttctcagccaatgactgcaaaactgtgtttctgttttagaactgtttgcagacaccacagtctgagctgcgagcaccgattgtcaacaagatggcaagcctgtgatataattccaactgtctctaatcaatatatataataaacattatcaatatctattaattataagctgttttagttt

SEQ ID NO: 30883 - DNA, 2036 bp, Zea Mays
tcgatggccctattgcgtaaaacaataaacccgccttccccaccactggtcatcagtctccactccacgcccgacagagcaggaggactcagaaatggcaatcccagtgcgatcggctgccgcgccccgccgcctcgttccgtcgatacctccggcgagctctggacatgttcgaggactggcgtgcttcggtacccgaaccgggcctcgcggtgcaagagggttgtcaatggtggtcgccgactccaccagccgtcgggccaagcaagcggacggcggggacggcgtccttggggcgcctgttctcggagggctcgggatggagggattgggggatcagctcagcgtggtgatgaagttcggggggtcctcggtgtcgtcggccgcgaggatggctgaggtggccggcctcatcctgacgttccccgaggagcgccccgtcgtcgttctctctgccatggggaaaaccaccaacaaccttctccttgctggagagaaggcagtagggtgtggagttatccatgtttctgaaatcgaagagtggaatatggtcaaaagcctacatatcaagacggtggatgaacttggacttccaagatctgtaatacaagacatgctagatgaactggagcaactattgaaaggtatcgctatgatgaaagagctgacgcctaggaccagtgactaccttgtttcatttggagaatgcatgtccaccaggattttttctgcttatttgaacaaaattcgtgtcaaggcacggcagtatgacgcatttgatattggtttcattacaactgatgaatttggtaatgcggatatcttagaagcaacctatcctgctgttgcgaagagacttcatggggactggatacaggatccagcgatacctgttgttactgggttccttgggaagggctggaaatctggtgctgtaactactttaggccgaggtggtagtgacttgactgctacaaccattggtatggaaagatgttgatggtgtacttacttgtgatccaaatatctacccacatgcaaagactgttccatacttaacatttgaagaggccacagaacttgcttattttggtgctcaggttttgcatccacaatcgatgagacctgctagagaaggtgatattccagttagggttaagaattcatacaaccctaaagctccaggcacccttattaccagacaaagagacatggataaggttgtactaactagcatagtgctcaagtcaaatgtcactatgttggacattgtgagcactcggatgcttggtcagtatggtttttctggcaagggtatttgctatatttgaagatctatgtatatctgtggattgtgttgctaccagtgaagttagtgtttctgtgtcacttgatccatcaaagatctggagtagggaactgatacagcaggaacttgaccatgtagttgaagagcttgagaaaatagcaattgttcgtctacttcagcagagggcgataatttcacttatcggaaatgtggagcaatcgtctctcatactagaaaagacgggacgtgtgctgaggaaaagtggggttaatgttcagatgatctcgcaaggagcgtcaaaggttaacatgtcgctgatagtccatgatagcgatgcaaaggcactcgtagaagcccttcatcaggcgttctttgaagacgatgtcctatcacaagtcgaagcggagaacctactcgtgggctgatcaacgtaggctttgctgggtccaggcgtgttatctgttatagattcccactcgcctccatgaacggcatgggcattggatcattgatcatgttttgcttgaaacaagtatgtcttccaggttctcagccaatgactgcaaaactgtgtttctgttttagaactgtttgcagacaccacagtctgagctgcgagcaccgattgtcaacaagatggcaagcctgtgatataattccaactgtctctaatcaatatatataataaacattatcaatatctattaattataagctgttttagttt

SEQ ID NO: 30884 - DNA, 2584 bp, Zea Mays
tcgatggccctattgcgtaaaacaataaacccgccttccccaccactggtcatcagtctccactccacgcccgacagagcaggaggactcagaaatggcaatcccagtgcgatcggctgccgcgccccgccgcctcgttccgtcgatacctccggcgagctctggacatgttcgaggactggcgtgcttcggtacccgaaccgggcctcgcggtgcaagagggttgtcaatggtggtcgccgactccaccagccgtcgggccaagcaagcggacggcggggacggcgtccttggggcgcctgttctcggagggctcgggatggagggattgggggatcagctcagcgtggtgatgaagttcggggggtcctcggtgtcgtcggccgcgaggatggctgaggtggccggcctcatcctgacgttccccgaggagcgccccgtcgtcgttctctctgccatggggaaaaccaccaacaaccttctccttgctggagagaaggcagtagggtgtggagttatccatgtttctgaaatcgaagagtggaatatggtcaaaagcctacatatcaagacggtggatgaacttggacttccaagatctgtaatacaagacatgctagatgaactggagcaactattgaaaggtatcgctatgatgaaagagctgacgcctaggaccagtgactaccttgtttcatttggagaatgcatgtccaccaggattttttctgcttatttgaacaaaattcgtgtcaaggcacggcaggtacttcttgatattttcttgatttgcacagtgattcagtgagcttttcaggttatgaatgcagcagcctacaagaatttgctatagtatccctgccctatggtgggggtgtcttgaaactttgattagtcattgatatttttactacatatgcacttcgtgatctcaagtttcagctcattatgttagttgattgccactagtattctgcggaaatttcacatttcgataatgattcgttcattgtccttttatgtgtgcgtggaaaatattcttagtattttttagattttgtgattaatttggtattgccataaaattgtaaccttttagatgatggagataatctccgtccacttcaccaaccaggttacacaaaccattttatcctttaaaatgtggacaacaggatttgaacccttatagtagtggagtcacacacccacaactcaattgagtgtttgactatgatctggatttccctttatttaatatctcaatttgatacaggggccatgtaaccagcctagctgcaaatccccatatgacgcatttgatattggtttcattacaactgatgaatttggtaatgcggatatcttagaagcaacctatcctgctgttgcgaagagacttcatggggactggatacaggatccagcgatacctgttgttactgggttccttgggaagggctggaaatctggtgctgtaactactttaggccgaggtggtagtgacttgactgctacaaccattggtaaagccttgggactgagagaaattcaggtatggaaagatgttgatggtgtacttacttgtgatccaaatatctacccacatgcaaagactgttccatacttaacatttgaagaggccacagaacttgcttattttggtgctcaggttttgcatccacaatcgatgagacctgctagagaaggtgatattccagttagggttaagaattcatacaaccctaaagctccaggcacccttattaccagacaaagagacatggataaggttgtactaactagcatagtgctcaagtcaaatgtcactatgttggacattgtgagcactcggatgcttggtatttgctatatttgaagatctatgtatatctgtggattgtgttgctaccagtgaagttagtgtttctgtgtcacttgatccatcaaagatctggagtagggaactgatacagcaggaacttgaccatgtagttgaagagcttgagaaaatagcaattgttcgtctacttcagcagagggcgataatttcacttatcggaaatgtggagcaatcgtctctcatactagaaaagacgggacgtgtgctgaggaaaagtggggttaatgttcagatgatctcgcaaggagcgtcaaaggttaacatgtcgctgatagtccatgatagcgatgcaaaggcactcgtagaagcccttcatcaggcgttctttgaagacgatgtcctatcacaagtcgaagcggagaacctactcgtgggctgatcaacgtaggctttgctgggtccaggcgtgttatctgttatagattcccactcgcctccatgaacggcatgggcattggatcattgatcatgttttgcttgaaacaagtatgtcttccaggttctcagccaatgactgcaaaactgtgtttctgttttagaactgtttgcagacaccacagtctgagctgcgagcaccgattgtcaacaagatggcaagcctgtgatataattccaactgtctctaatcaatatatataataaacattatcaatatctattaattataagctgttttagttt

SEQ ID NO: 30885 - DNA, 2555 bp, Zea Mays
tcgatggccctattgcgtaaaacaataaacccgccttccccaccactggtcatcagtctccactccacgcccgacagagcaggaggactcagaaatggcaatcccagtgcgatcggctgccgcgccccgccgcctcgttccgtcgatacctccggcgagctctggacatgttcgaggactggcgtgcttcggtacccgaaccgggcctcgcggtgcaagagggttgtcaatggtggtcgccgactccaccagccgtcgggccaagcaagcggacggcggggacggcgtccttggggcgcctgttctcggagggctcgggatggagggattgggggatcagctcagcgtggtgatgaagttcggggggtcctcggtgtcgtcggccgcgaggatggctgaggtggccggcctcatcctgacgttccccgaggagcgccccgtcgtcgttctctctgccatggggaaaaccaccaacaaccttctccttgctggagagaaggcagtagggtgtggagttatccatgtttctgaaatcgaagagtggaatatggtcaaaagcctacatatcaagacggtggatgaacttggacttccaagatctgtaatacaagacatgctagatgaactggagcaactattgaaaggtatcgctatgatgaaagagctgacgcctaggaccagtgactaccttgtttcatttggagaatgcatgtccaccaggattttttctgcttatttgaacaaaattcgtgtcaaggcacggcaggtacttcttgatattttcttgatttgcacagtgattcagtgagcttttcaggttatgaatgcagcagcctacaagaatttgctatagtatccctgccctatggtgggggtgtcttgaaactttgattagtcattgatatttttactacatatgcacttcgtgatctcaagtttcagctcattatgttagttgattgccactagtattctgcggaaatttcacatttcgataatgattcgttcattgtccttttatgtgtgcgtggaaaatattcttagtattttttagattttgtgattaatttggtattgccataaaattgtaaccttttagatgatggagataatctccgtccacttcaccaaccaggttacacaaaccattttatcctttaaaatgtggacaacaggatttgaacccttatagtagtggagtcacacacccacaactcaattgagtgtttgactatgatctggatttccctttatttaatatctcaatttgatacaggggccatgtaaccagcctagctgcaaatccccatatgacgcatttgatattggtttcattacaactgatgaatttggtaatgcggatatcttagaagcaacctatcctgctgttgcgaagagacttcatggggactggatacaggatccagcgatacctgttgttactgggttccttgggaagggctggaaatctggtgctgtaactactttaggccgaggtggtagtgacttgactgctacaaccattggtatggaaagatgttgatggtgtacttacttgtgatccaaatatctacccacatgcaaagactgttccatacttaacatttgaagaggccacagaacttgcttattttggtgctcaggttttgcatccacaatcgatgagacctgctagagaaggtgatattccagttagggttaagaattcatacaaccctaaagctccaggcacccttattaccagacaaagagacatggataaggttgtactaactagcatagtgctcaagtcaaatgtcactatgttggacattgtgagcactcggatgcttggtatttgctatatttgaagatctatgtatatctgtggattgtgttgctaccagtgaagttagtgtttctgtgtcacttgatccatcaaagatctggagtagggaactgatacagcaggaacttgaccatgtagttgaagagcttgagaaaatagcaattgttcgtctacttcagcagagggcgataatttcacttatcggaaatgtggagcaatcgtctctcatactagaaaagacgggacgtgtgctgaggaaaagtggggttaatgttcagatgatctcgcaaggagcgtcaaaggttaacatgtcgctgatagtccatgatagcgatgcaaaggcactcgtagaagcccttcatcaggcgttctttgaagacgatgtcctatcacaagtcgaagcggagaacctactcgtgggctgatcaacgtaggctttgctgggtccaggcgtgttatctgttatagattcccactcgcctccatgaacggcatgggcattggatcattgatcatgttttgcttgaaacaagtatgtcttccaggttctcagccaatgactgcaaaactgtgtttctgttttagaactgtttgcagacaccacagtctgagctgcgagcaccgattgtcaacaagatggcaagcctgtgatataattccaactgtctctaatcaatatatataataaacattatcaatatctattaattataagctgttttagttt

SEQ ID NO: 30886 - DNA, 2579 bp, Zea Mays
tcgatggccctattgcgtaaaacaataaacccgccttccccaccactggtcatcagtctccactccacgcccgacagagcaggaggactcagaaatggcaatcccagtgcgatcggctgccgcgccccgccgcctcgttccgtcgatacctccggcgagctctggacatgttcgaggactggcgtgcttcggtacccgaaccgggcctcgcggtgcaagagggttgtcaatggtggtcgccgactccaccagccgtcgggccaagcaagcggacggcggggacggcgtccttggggcgcctgttctcggagggctcgggatggagggattgggggatcagctcagcgtggtgatgaagttcggggggtcctcggtgtcgtcggccgcgaggatggctgaggtggccggcctcatcctgacgttccccgaggagcgccccgtcgtcgttctctctgccatggggaaaaccaccaacaaccttctccttgctggagagaaggcagtagggtgtggagttatccatgtttctgaaatcgaagagtggaatatggtcaaaagcctacatatcaagacggtggatgaacttggacttccaagatctgtaatacaagacatgctagatgaactggagcaactattgaaaggtatcgctatgatgaaagagctgacgcctaggaccagtgactaccttgtttcatttggagaatgcatgtccaccaggattttttctgcttatttgaacaaaattcgtgtcaaggcacggcaggtacttcttgatattttcttgatttgcacagtgattcagtgagcttttcaggttatgaatgcagcagcctacaagaatttgctatagtatccctgccctatggtgggggtgtcttgaaactttgattagtcattgatatttttactacatatgcacttcgtgatctcaagtttcagctcattatgttagttgattgccactagtattctgcggaaatttcacatttcgataatgattcgttcattgtccttttatgtgtgcgtggaaaatattcttagtattttttagattttgtgattaatttggtattgccataaaattgtaaccttttagatgatggagataatctccgtccacttcaccaaccaggttacacaaaccattttatcctttaaaatgtggacaacaggatttgaacccttatagtagtggagtcacacacccacaactcaattgagtgtttgactatgatctggatttccctttatttaatatctcaatttgatacaggggccatgtaaccagcctagctgcaaatccccatatgacgcatttgatattggtttcattacaactgatgaatttggtaatgcggatatcttagaagcaacctatcctgctgttgcgaagagacttcatggggactggatacaggatccagcgatacctgttgttactgggttccttgggaagggctggaaatctggtgctgtaactactttaggccgaggtggtagtgacttgactgctacaaccattggtatggaaagatgttgatggtgtacttacttgtgatccaaatatctacccacatgcaaagactgttccatacttaacatttgaagaggccacagaacttgcttattttggtgctcaggttttgcatccacaatcgatgagacctgctagagaaggtgatattccagttagggttaagaattcatacaaccctaaagctccaggcacccttattaccagacaaagagacatggataaggttgtactaactagcatagtgctcaagtcaaatgtcactatgttggacattgtgagcactcggatgcttggtcagtatggtttttctggcaagggtatttgctatatttgaagatctatgtatatctgtggattgtgttgctaccagtgaagttagtgtttctgtgtcacttgatccatcaaagatctggagtagggaactgatacagcaggaacttgaccatgtagttgaagagcttgagaaaatagcaattgttcgtctacttcagcagagggcgataatttcacttatcggaaatgtggagcaatcgtctctcatactagaaaagacgggacgtgtgctgaggaaaagtggggttaatgttcagatgatctcgcaaggagcgtcaaaggttaacatgtcgctgatagtccatgatagcgatgcaaaggcactcgtagaagcccttcatcaggcgttctttgaagacgatgtcctatcacaagtcgaagcggagaacctactcgtgggctgatcaacgtaggctttgctgggtccaggcgtgttatctgttatagattcccactcgcctccatgaacggcatgggcattggatcattgatcatgttttgcttgaaacaagtatgtcttccaggttctcagccaatgactgcaaaactgtgtttctgttttagaactgtttgcagacaccacagtctgagctgcgagcaccgattgtcaacaagatggcaagcctgtgatataattccaactgtctctaatcaatatatataataaacattatcaatatctattaattataagctgttttagttt

SEQ ID NO: 30887 - DNA, 2632 bp, Zea Mays
tcgatggccctattgcgtaaaacaataaacccgccttccccaccactggtcatcagtctccactccacgcccgacagagcaggaggactcagaaatggcaatcccagtgcgatcggctgccgcgccccgccgcctcgttccgtcgatacctccggcgagctctggacatgttcgaggactggcgtgcttcggtacccgaaccgggcctcgcggtgcaagagggttgtcaatggtggtcgccgactccaccagccgtcgggccaagcaagcggacggcggggacggcgtccttggggcgcctgttctcggagggctcgggatggagggattgggggatcagctcagcgtggtgatgaagttcggggggtcctcggtgtcgtcggccgcgaggatggctgaggtggccggcctcatcctgacgttccccgaggagcgccccgtcgtcgttctctctgccatggggaaaaccaccaacaaccttctccttgctggagagaaggcagtagggtgtggagttatccatgtttctgaaatcgaagagtggaatatggtcaaaagcctacatatcaagacggtggatgaacttggacttccaagatctgtaatacaagacatgctagatgaactggagcaactattgaaaggtatcgctatgatgaaagagctgacgcctaggaccagtgactaccttgtttcatttggagaatgcatgtccaccaggattttttctgcttatttgaacaaaattcgtgtcaaggcacggcagtatgacgcatttgatattggtttcattacaactgatgaatttggtaatgcggatatcttagaagcaacctatcctgctgttgcgaagagacttcatggggactggatacaggatccagcgatacctgttgttactgggttccttgggaagggctggaaatctggtgctgtaactactttaggccgaggtggtagtgacttgactgctacaaccattggtatggaaagatgttgatggtgtacttacttgtgatccaaatatctacccacatgcaaagactgttccatacttaacatttgaagaggccacagaacttgcttattttggtgctcaggacttgaaccctgtatagtgtgaccaggctgcttctcagtgaataaacaaatctttcagttgcatacttctcaaaaacgaaagatcctgttcagtagataaacctctgttccctttttaccttttaaagctatattgattgttgtttggcatttgctttactaaccatcatgaattgaacatatagctcatgatgtcagtctcctgaacagaagcgagaaatttaggatcgttattgtggactgttcactccaatgcaggttttgcatccacaatcgatgagacctgctagagaaggtgatattccagttagggttaagaattcatacaaccctaaagctccaggcacccttattaccagacaaagagacatggataaggttgtactaactagcatagtgctcaagtcaaatgtcactatgttggacattgtgagcactcggatgcttggtcagtatggtttttctggcaagggtatgttgaacactgagccatttttgtatttatattacactgttctgatcactgcatgtatgaccttgagcaggtatttgctatatttgaagatctatgtatatctgtggattgtgttgctaccagtgaagttagtgtttctgtgtcacttgatccatcaaagatctggagtagggaactgatacagcaggcaagtgtttccattccttcattgtattagcatgtagaagcacatgaaaaattgtttttggtgacttgatagtgcatttccaagagaaatatttttattccaattctctacgcttccacattgttaacaaattttcaggaacttgacaatgtagttgaagagctagcaagtagaaacacgagatatttttttttttgcaagtgacttatcccatgcctgaacattttagttctctgtgcttcacaattgttaacaatctttcaggaacttgaccatgtagttgaagagcttgagaaaatagcaattgttcgtctacttcagcagagggcgataatttcacttatcggaaatgtggagcaatcgtctctcatactagaaaagacgggacgtgtgctgaggaaaagtggggttaatgttcagatgatctcgcaaggagcgtcaaaggttaacatgtcgctgatagtccatgatagcgatgcaaaggcactcgtagaagcccttcatcaggcgttctttgaagacgatgtcctatcacaagtcgaagcggagaacctactcgtgggctgatcaacgtaggctttgctgggtccaggcgtgttatctgttatagattcccactcgcctccatgaacggcatgggcattggatcattgatcatgttttgcttgaaacaagtatgtcttccaggttctcagccaatgactgcaaaactgtgtttctgttttagaactgtttgcagacaccacagtctgagctgcgagcaccgattgtcaacaagatggcaagcctgtgatataattccaactgtctctaatcaatatatataataaacattatcaatatctattaattataagctgttttagttt

SEQ ID NO: 30888 - DNA, 2585 bp, Zea Mays
tcgatggccctattgcgtaaaacaataaacccgccttccccaccactggtcatcagtctccactccacgcccgacagagcaggaggactcagaaatggcaatcccagtgcgatcggctgccgcgccccgccgcctcgttccgtcgatacctccggcgagctctggacatgttcgaggactggcgtgcttcggtacccgaaccgggcctcgcggtgcaagagggttgtcaatggtggtcgccgactccaccagccgtcgggccaagcaagcggacggcggggacggcgtccttggggcgcctgttctcggagggctcgggatggagggattgggggatcagctcagcgtggtgatgaagttcggggggtcctcggtgtcgtcggccgcgaggatggctgaggtggccggcctcatcctgacgttccccgaggagcgccccgtcgtcgttctctctgccatggggaaaaccaccaacaaccttctccttgctggagagaaggcagtagggtgtggagttatccatgtttctgaaatcgaagagtggaatatggtcaaaagcctacatatcaagacggtggatgaacttggacttccaagatctgtaatacaagacatgctagatgaactggagcaactattgaaaggtatcgctatgatgaaagagctgacgcctaggaccagtgactaccttgtttcatttggagaatgcatgtccaccaggattttttctgcttatttgaacaaaattcgtgtcaaggcacggcaggtacttcttgatattttcttgatttgcacagtgattcagtgagcttttcaggttatgaatgcagcagcctacaagaatttgctatagtatccctgccctatggtgggggtgtcttgaaactttgattagtcattgatatttttactacatatgcacttcgtgatctcaagtttcagctcattatgttagttgattgccactagtattctgcggaaatttcacatttcgataatgattcgttcattgtccttttatgtgtgcgtggaaaatattcttagtattttttagattttgtgattaatttggtattgccataaaattgtaaccttttagatgatggagataatctccgtccacttcaccaaccaggttacacaaaccattttatcctttaaaatgtggacaacaggatttgaacccttatagtagtggagtcacacacccacaactcaattgagtgtttgactatgatctggatttccctttatttaatatctcaatttgatacaggggccatgtaaccagcctagctgcaaatccccatatgacgcatttgatattggtttcattacaactgatgaatttggtaatgcggatatcttagaagcaacctatcctgctgttgcgaagagacttcatggggactggatacaggatccagcgatacctgttgttactgggttccttgggaagggctggaaatctggtgctgtaactactttaggccgaggtggtagtgacttgactgctacaaccattggtaaagccttgggactgagagaaattcaggtatggaaagatgttgatggtgtacttacttgtgatccaaatatctacccacatgcaaagactgttccatacttaacatttgaagaggccacagaacttgcttattttggtgctcaggttttgcatccacaatcgatgagacctgctagagaaggtgatattccagttagggttaagaattcatacaaccctaaagctccaggcacccttattaccagacaaagagacatggataaggttgtactaactagcatagtgctcaagtcaaatgtcactatgttggacattgtgagcactcggatgcttgggtatttgctatatttgaagatctatgtatatctgtggattgtgttgctaccagtgaagttagtgtttctgtgtcacttgatccatcaaagatctggagtagggaactgatacagcaggaacttgaccatgtagttgaagagcttgagaaaatagcaattgttcgtctacttcagcagagggcgataatttcacttatcggaaatgtggagcaatcgtctctcatactagaaaagacgggacgtgtgctgaggaaaagtggggttaatgttcagatgatctcgcaaggagcgtcaaaggttaacatgtcgctgatagtccatgatagcgatgcaaaggcactcgtagaagcccttcatcaggcgttctttgaagacgatgtcctatcacaagtcgaagcggagaacctactcgtgggctgatcaacgtaggctttgctgggtccaggcgtgttatctgttatagattcccactcgcctccatgaacggcatgggcattggatcattgatcatgttttgcttgaaacaagtatgtcttccaggttctcagccaatgactgcaaaactgtgtttctgttttagaactgtttgcagacaccacagtctgagctgcgagcaccgattgtcaacaagatggcaagcctgtgatataattccaactgtctctaatcaatatatataataaacattatcaatatctattaattataagctgttttagttt

SEQ ID NO: 30889 - DNA, 2398 bp, Zea Mays
tcgatggccctattgcgtaaaacaataaacccgccttccccaccactggtcatcagtctccactccacgcccgacagagcaggaggactcagaaatggcaatcccagtgcgatcggctgccgcgccccgccgcctcgttccgtcgatacctccggcgagctctggacatgttcgaggactggcgtgcttcggtacccgaaccgggcctcgcggtgcaagagggttgtcaatggtggtcgccgactccaccagccgtcgggccaagcaagcggacggcggggacggcgtccttggggcgcctgttctcggagggctcgggatggagggattgggggatcagctcagcgtggtgatgaagttcggggggtcctcggtgtcgtcggccgcgaggatggctgaggtggccggcctcatcctgacgttccccgaggagcgccccgtcgtcgttctctctgccatggggaaaaccaccaacaaccttctccttgctggagagaaggcagtagggtgtggagttatccatgtttctgaaatcgaagagtggaatatggtcaaaagcctacatatcaagacggtggatgaacttggacttccaagatctgtaatacaagacatgctagatgaactggagcaactattgaaaggtatcgctatgatgaaagagctgacgcctaggaccagtgactaccttgtttcatttggagaatgcatgtccaccaggattttttctgcttatttgaacaaaattcgtgtcaaggcacggcagtatgacgcatttgatattggtttcattacaactgatgaatttggtaatgcggatatcttagaagcaacctatcctgctgttgcgaagagacttcatggggactggatacaggatccagcgatacctgttgttactgggttccttgggaagggctggaaatctggtgctgtaactactttaggccgaggtggtagtgacttgactgctacaaccattggtatggaaagatgttgatggtgtacttacttgtgatccaaatatctacccacatgcaaagactgttccatacttaacatttgaagaggccacagaacttgcttattttggtgctcaggacttgaaccctgtatagtgtgaccaggctgcttctcagtgaataaacaaatctttcagttgcatacttctcaaaaacgaaagatcctgttcagtagataaacctctgttccctttttaccttttaaagctatattgattgttgtttggcatttgctttactaaccatcatgaattgaacatatagctcatgatgtcagtctcctgaacagaagcgagaaatttaggatcgttattgtggactgttcactccaatgcaggttttgcatccacaatcgatgagacctgctagagaaggtgatattccagttagggttaagaattcatacaaccctaaagctccaggcacccttattaccagacaaagagacatggataaggttgtactaactagcatagtgctcaagtcaaatgtcactatgttggacattgtgagcactcggatgcttggtcagtatggtttttctggcaagggtatttgctatatttgaagatctatgtatatctgtggattgtgttgctaccagtgaagttagtgtttctgtgtcacttgatccatcaaagatctggagtagggaactgatacagcaggaacttgaccatgtagttgaagagcttgagaaaatagcaattgttcgtctacttcagcagagggcgataatttcacttatcggaaatgtggagcaatcgtctctcatactagaaaaggtataacgctatctacattaaatatttcttctttgggttttcctctctaatgttattttcattggacatcagcatatatattaaccatttaataaatcttcagacgggacgtgtgctgaggaaaagtggggttaatgttcagatgatctcgcaaggagcgtcaaaggttaacatgtcgctgatagtccatgatagcgatgcaaaggcactcgtagaagcccttcatcaggcgttctttgaagacgatgtcctatcacaagtcgaagcggagaacctactcgtgggctgatcaacgtaggctttgctgggtccaggcgtgttatctgttatagattcccactcgcctccatgaacggcatgggcattggatcattgatcatgttttgcttgaaacaagtatgtcttccaggttctcagccaatgactgcaaaactgtgtttctgttttagaactgtttgcagacaccacagtctgagctgcgagcaccgattgtcaacaagatggcaagcctgtgatataattccaactgtctctaatcaatatatataataaacattatcaatatctattaattataagctgttttagttt

SEQ ID NO: 30890 - DNA, 2150 bp, Zea Mays
tcgatggccctattgcgtaaaacaataaacccgccttccccaccactggtcatcagtctccactccacgcccgacagagcaggaggactcagaaatggcaatcccagtgcgatcggctgccgcgccccgccgcctcgttccgtcgatacctccggcgagctctggacatgttcgaggactggcgtgcttcggtacccgaaccgggcctcgcggtgcaagagggttgtcaatggtggtcgccgactccaccagccgtcgggccaagcaagcggacggcggggacggcgtccttggggcgcctgttctcggagggctcgggatggagggattgggggatcagctcagcgtggtgatgaagttcggggggtcctcggtgtcgtcggccgcgaggatggctgaggtggccggcctcatcctgacgttccccgaggagcgccccgtcgtcgttctctctgccatggggaaaaccaccaacaaccttctccttgctggagagaaggcagtagggtgtggagttatccatgtttctgaaatcgaagagtggaatatggtcaaaagcctacatatcaagacggtggatgaacttggacttccaagatctgtaatacaagacatgctagatgaactggagcaactattgaaaggtatcgctatgatgaaagagctgacgcctaggaccagtgactaccttgtttcatttggagaatgcatgtccaccaggattttttctgcttatttgaacaaaattcgtgtcaaggcacggcagtatgacgcatttgatattggtttcattacaactgatgaatttggtaatgcggatatcttagaagcaacctatcctgctgttgcgaagagacttcatggggactggatacaggatccagcgatacctgttgttactgggttccttgggaagggctggaaatctggtgctgtaactactttaggccgaggtggtagtgacttgactgctacaaccattggtaaagccttgggactgagagaaattcaggtatggaaagatgttgatggtgtacttacttgtgatccaaatatctacccacatgcaaagactgttccatacttaacatttgaagaggccacagaacttgcttattttggtgctcaggttttgcatccacaatcgatgagacctgctagagaaggtgatattccagttagggttaagaattcatacaaccctaaagctccaggcacccttattaccagacaaagagacatggataaggtctggtagtaggttgtactaactagcatagtgctcaagtcaaatgtcactatgttggacattgtgagcactcggatgcttggtcagtatggtttttctggcaagggtatgttgaacactgagccatttttgtatttatattacactgttctgatcactgcatgtatgaccttgagcaggtatttgctatatttgaagatctatgtatatctgtggattgtgttgctaccagtgaagttagtgtttctgtgtcacttgatccatcaaagatctggagtagggaactgatacagcaggaacttgaccatgtagttgaagagcttgagaaaatagcaattgttcgtctacttcagcagagggcgataatttcacttatcggaaatgtggagcaatcgtctctcatactagaaaagacgggacgtgtgctgaggaaaagtggggttaatgttcagatgatctcgcaaggagcgtcaaaggttaacatgtcgctgatagtccatgatagcgatgcaaaggcactcgtagaagcccttcatcaggcgttctttgaagacgatgtcctatcacaagtcgaagcggagaacctactcgtgggctgatcaacgtaggctttgctgggtccaggcgtgttatctgttatagattcccactcgcctccatgaacggcatgggcattggatcattgatcatgttttgcttgaaacaagtatgtcttccaggttctcagccaatgactgcaaaactgtgtttctgttttagaactgtttgcagacaccacagtctgagctgcgagcaccgattgtcaacaagatggcaagcctgtgatataattccaactgtctctaatcaatatatataataaacattatcaatatctattaattataagctgttttagttt

SEQ ID NO: 30891 - DNA, 2315 bp, Zea Mays
tcgatggccctattgcgtaaaacaataaacccgccttccccaccactggtcatcagtctccactccacgcccgacagagcaggaggactcagaaatggcaatcccagtgcgatcggctgccgcgccccgccgcctcgttccgtcgatacctccggcgagctctggacatgttcgaggactggcgtgcttcggtacccgaaccgggcctcgcggtgcaagagggttgtcaatggtggtcgccgactccaccagccgtcgggccaagcaagcggacggcggggacggcgtccttggggcgcctgttctcggagggctcgggatggagggattgggggatcagctcagcgtggtgatgaagttcggggggtcctcggtgtcgtcggccgcgaggatggctgaggtggccggcctcatcctgacgttccccgaggagcgccccgtcgtcgttctctctgccatggggaaaaccaccaacaaccttctccttgctggagagaaggcagtagggtgtggagttatccatgtttctgaaatcgaagagtggaatatggtcaaaagcctacatatcaagacggtggatgaacttggacttccaagatctgtaatacaagacatgctagatgaactggagcaactattgaaaggtatcgctatgatgaaagagctgacgcctaggaccagtgactaccttgtttcatttggagaatgcatgtccaccaggattttttctgcttatttgaacaaaattcgtgtcaagtatgacgcatttgatattggtttcattacaactgatgaatttggtaatgcggatatcttagaagcaacctatcctgctgttgcgaagagacttcatggggactggatacaggatccagcgatacctgttgttactgggttccttgggaagggctggaaatctggtgctgtaactactttaggccgaggtggtagtgacttgactgctacaaccattggtaaagccttgggactgagagaaattcaggtatggaaagatgttgatggtgtacttacttgtgatccaaatatctacccacatgcaaagactgttccatacttaacatttgaagaggccacagaacttgcttattttggtgctcaggacttgaaccctgtatagtgtgaccaggctgcttctcagtgaataaacaaatctttcagttgcatacttctcaaaaacgaaagatcctgttcagtagataaacctctgttccctttttaccttttaaagctatattgattgttgtttggcatttgctttactaaccatcatgaattgaacatatagctcatgatgtcagtctcctgaacagaagcgagaaatttaggatcgttattgtggactgttcactccaatgcaggttttgcatccacaatcgatgagacctgctagagaaggtgatattccagttagggttaagaattcatacaaccctaaagctccaggcacccttattaccagacaaagagacatggataaggttgtactaactagcatagtgctcaagtcaaatgtcactatgttggacattgtgagcactcggatgcttggtcagtatggtttttctggcaagggtatttgctatatttgaagatctatgtatatctgtggattgtgttgctaccagtgaagttagtgtttctgtgtcacttgatccatcaaagatctggagtagggaactgatacagcaggaacttgaccatgtagttgaagagcttgagaaaatagcaattgttcgtctacttcagcagagggcgataatttcacttatcggaaatgtggagcaatcgtctctcatactagaaaagacgggacgtgtgctgaggaaaagtggggttaatgttcagatgatctcgcaaggagcgtcaaaggttaacatgtcgctgatagtccatgatagcgatgcaaaggcactcgtagaagcccttcatcaggcgttctttgaagacgatgtcctatcacaagtcgaagcggagaacctactcgtgggctgatcaacgtaggctttgctgggtccaggcgtgttatctgttatagattcccactcgcctccatgaacggcatgggcattggatcattgatcatgttttgcttgaaacaagtatgtcttccaggttctcagccaatgactgcaaaactgtgtttctgttttagaactgtttgcagacaccacagtctgagctgcgagcaccgattgtcaacaagatggcaagcctgtgatataattccaactgtctctaatcaatatatataataaacattatcaatatctattaattataagctgttttagttt

SEQ ID NO: 30892 - DNA, 3145 bp, Zea Mays
tcgatggccctattgcgtaaaacaataaacccgccttccccaccactggtcatcagtctccactccacgcccgacagagcaggaggactcagaaatggcaatcccagtgcgatcggctgccgcgccccgccgcctcgttccgtcgatacctccggcgagctctggacatgttcgaggactggcgtgcttcggtacccgaaccgggcctcgcggtgcaagagggttgtcaatggtggtcgccgactccaccagccgtcgggccaagcaagcggacggcggggacggcgtccttggggcgcctgttctcggagggctcgggatggagggattgggggatcagctcagcgtggtgatgaagttcggggggtcctcggtgtcgtcggccgcgaggatggctgaggtggccggcctcatcctgacgttccccgaggagcgccccgtcgtcgttctctctgccatggggaaaaccaccaacaaccttctccttgctggagagaaggcagtagggtgtggagttatccatgtttctgaaatcgaagagtggaatatggtcaaaagcctacatatcaagacggtggatgaacttggacttccaagatctgtaatacaagacatgctagatgaactggagcaactattgaaaggtatcgctatgatgaaagagctgacgcctaggaccagtgactaccttgtttcatttggagaatgcatgtccaccaggattttttctgcttatttgaacaaaattcgtgtcaaggcacggcaggtacttcttgatattttcttgatttgcacagtgattcagtgagcttttcaggttatgaatgcagcagcctacaagaatttgctatagtatccctgccctatggtgggggtgtcttgaaactttgattagtcattgatatttttactacatatgcacttcgtgatctcaagtttcagctcattatgttagttgattgccactagtattctgcggaaatttcacatttcgataatgattcgttcattgtccttttatgtgtgcgtggaaaatattcttagtattttttagattttgtgattaatttggtattgccataaaattgtaaccttttagatgatggagataatctccgtccacttcaccaaccaggttacacaaaccattttatcctttaaaatgtggacaacaggatttgaacccttatagtagtggagtcacacacccacaactcaattgagtgtttgactatgatctggatttccctttatttaatatctcaatttgatacaggggccatgtaaccagcctagctgcaaatccccagtacatccatatacatcccccattcttctacattatgcaatgatgtgaactcacgttcattattaattttatttgaaattttttgcagtatgacgcatttgatattggtttcattacaactgatgaatttggtaatgcggatatcttagaagcaacctatcctgctgttgcgaagagacttcatggggactggatacaggatccagcgatacctgttgttactgggttccttgggaagggctggaaatctggtgctgtaactactttaggccgaggtggtagtgacttgactgctacaaccattggtaaagccttgggactgagagaaattcaggtatggaaagatgttgatggtgtacttacttgtgatccaaatatctacccacatgcaaagactgttccatacttaacatttgaagaggccacagaacttgcttattttggtgctcaggacttgaaccctgtatagtgtgaccaggctgcttctcagtgaataaacaaatctttcagttgcatacttctcaaaaacgaaagatcctgttcagtagataaacctctgttccctttttaccttttaaagctatattgattgttgtttggcatttgctttactaaccatcatgaattgaacatatagctcatgatgtcagtctcctgaacagaagcgagaaatttaggatcgttattgtggactgttcactccaatgcaggttttgcatccacaatcgatgagacctgctagagaaggtgatattccagttagggttaagaattcatacaaccctaaagctccaggcacccttattaccagacaaagagacatggataaggtctggtagtaggtaacttcaaatatatcctcacatctgcttgactttcgaggcattgatttttgcgcccctctttttcactactaggttgtactaactagcatagtgctcaagtcaaatgtcactatgttggacattgtgagcactcggatgcttggtcagtatggtttttctggcaagggtatttgctatatttgaagatctatgtatatctgtggattgtgttgctaccagtgaagttagtgtttctgtgtcacttgatccatcaaagatctggagtagggaactgatacagcaggaacttgaccatgtagttgaagagcttgagaaaatagcaattgttcgtctacttcagcagagggcgataatttcacttatcggaaatgtggagcaatcgtctctcatactagaaaaggtataacgctatctacattaaatatttcttctttgggttttcctctctaatgttattttcattggacatcagcatatatattaaccatttaataaatcttcagacgggacgtgtgctgaggaaaagtggggttaatgttcagatgatctcgcaaggagcgtcaaaggttaacatgtcgctgatagtccatgatagcgatgcaaaggcactcgtagaagcccttcatcaggcgttctttgaagacgatgtcctatcacaagtcgaagcggagaacctactcgtgggctgatcaacgtaggctttgctgggtccaggcgtgttatctgttatagattcccactcgcctccatgaacggcatgggcattggatcattgatcatgttttgcttgaaacaagtatgtcttccaggttctcagccaatgactgcaaaactgtgtttctgttttagaactgtttgcagacaccacagtctgagctgcgagcaccgattgtcaacaagatggcaagcctgtgatataattccaactgtctctaatcaatatatataataaacattatcaatatctattaattataagctgttttagttt

SEQ ID NO: 30893 - DNA, 2886 bp, Zea Mays
tcgatggccctattgcgtaaaacaataaacccgccttccccaccactggtcatcagtctccactccacgcccgacagagcaggaggactcagaaatggcaatcccagtgcgatcggctgccgcgccccgccgcctcgttccgtcgatacctccggcgagctctggacatgttcgaggactggcgtgcttcggtacccgaaccgggcctcgcggtgcaagagggttgtcaatggtggtcgccgactccaccagccgtcgggccaagcaagcggacggcggggacggcgtccttggggcgcctgttctcggagggctcgggatggagggattgggggatcagctcagcgtggtgatgaagttcggggggtcctcggtgtcgtcggccgcgaggatggctgaggtggccggcctcatcctgacgttccccgaggagcgccccgtcgtcgttctctctgccatggggaaaaccaccaacaaccttctccttgctggagagaaggcagtagggtgtggagttatccatgtttctgaaatcgaagagtggaatatggtcaaaagcctacatatcaagacggtggatgaacttggacttccaagatctgtaatacaagacatgctagatgaactggagcaactattgaaaggtatcgctatgatgaaagagctgacgcctaggaccagtgactaccttgtttcatttggagaatgcatgtccaccaggattttttctgcttatttgaacaaaattcgtgtcaaggcacggcaggtacttcttgatattttcttgatttgcacagtgattcagtgagcttttcaggttatgaatgcagcagcctacaagaatttgctatagtatccctgccctatggtgggggtgtcttgaaactttgattagtcattgatatttttactacatatgcacttcgtgatctcaagtttcagctcattatgttagttgattgccactagtattctgcggaaatttcacatttcgataatgattcgttcattgtccttttatgtgtgcgtggaaaatattcttagtattttttagattttgtgattaatttggtattgccataaaattgtaaccttttagatgatggagataatctccgtccacttcaccaaccaggttacacaaaccattttatcctttaaaatgtggacaacaggatttgaacccttatagtagtggagtcacacacccacaactcaattgagtgtttgactatgatctggatttccctttatttaatatctcaatttgatacaggggccatgtaaccagcctagctgcaaatccccagtacatccatatacatcccccattcttctacattatgcaatgatgtgaactcacgttcattattaattttatttgaaattttttgcagtatgacgcatttgatattggtttcattacaactgatgaatttggtaatgcggatatcttagaagcaacctatcctgctgttgcgaagagacttcatggggactggatacaggatccagcgatacctgttgttactgggttccttgggaagggctggaaatctggtgctgtaactactttaggccgaggtggtagtgacttgactgctacaaccattggtatggaaagatgttgatggtgtacttacttgtgatccaaatatctacccacatgcaaagactgttccatacttaacatttgaagaggccacagaacttgcttattttggtgctcaggacttgaaccctgtatagtgtgaccaggctgcttctcagtgaataaacaaatctttcagttgcatacttctcaaaaacgaaagatcctgttcagtagataaacctctgttccctttttaccttttaaagctatattgattgttgtttggcatttgctttactaaccatcatgaattgaacatatagctcatgatgtcagtctcctgaacagaagcgagaaatttaggatcgttattgtggactgttcactccaatgcaggttttgcatccacaatcgatgagacctgctagagaaggtgatattccagttagggttaagaattcatacaaccctaaagctccaggcacccttattaccagacaaagagacatggataaggttgtactaactagcatagtgctcaagtcaaatgtcactatgttggacattgtgagcactcggatgcttggtatttgctatatttgaagatctatgtatatctgtggattgtgttgctaccagtgaagttagtgtttctgtgtcacttgatccatcaaagatctggagtagggaactgatacagcagttgaagagcttgagaaaatagcaattgttcgtctacttcagcagagggcgataatttcacttatcggaaatgtggagcaatcgtctctcatactagaaaagacgggacgtgtgctgaggaaaagtggggttaatgttcagatgatctcgcaaggagcgtcaaaggttaacatgtcgctgatagtccatgatagcgatgcaaaggcactcgtagaagcccttcatcaggcgttctttgaagacgatgtcctatcacaagtcgaagcggagaacctactcgtgggctgatcaacgtaggctttgctgggtccaggcgtgttatctgttatagattcccactcgcctccatgaacggcatgggcattggatcattgatcatgttttgcttgaaacaagtatgtcttccaggttctcagccaatgactgcaaaactgtgtttctgttttagaactgtttgcagacaccacagtctgagctgcgagcaccgattgtcaacaagatggcaagcctgtgatataattccaactgtctctaatcaatatatataataaacattatcaatatctattaattataagctgttttagttt

SEQ ID NO: 30894 - DNA, 3339 bp, Zea Mays
tcgatggccctattgcgtaaaacaataaacccgccttccccaccactggtcatcagtctccactccacgcccgacagagcaggaggactcagaaatggcaatcccagtgcgatcggctgccgcgccccgccgcctcgttccgtcgatacctccggcgagctctggacatgttcgaggactggcgtgcttcggtacccgaaccgggcctcgcggtgcaagagggttgtcaatggtggtcgccgactccaccagccgtcgggccaagcaagcggacggcggggacggcgtccttggggcgcctgttctcggagggctcgggatggagggattgggggatcagctcagcgtggtgatgaagttcggggggtcctcggtgtcgtcggccgcgaggatggctgaggtggccggcctcatcctgacgttccccgaggagcgccccgtcgtcgttctctctgccatggggaaaaccaccaacaaccttctccttgctggagagaaggcagtagggtgtggagttatccatgtttctgaaatcgaagagtggaatatggtcaaaagcctacatatcaagacggtggatgaacttggacttccaagatctgtaatacaagacatgctagatgaactggagcaactattgaaaggtatcgctatgatgaaagagctgacgcctaggaccagtgactaccttgtttcatttggagaatgcatgtccaccaggattttttctgcttatttgaacaaaattcgtgtcaaggcacggcaggtacttcttgatattttcttgatttgcacagtgattcagtgagcttttcaggttatgaatgcagcagcctacaagaatttgctatagtatccctgccctatggtgggggtgtcttgaaactttgattagtcattgatatttttactacatatgcacttcgtgatctcaagtttcagctcattatgttagttgattgccactagtattctgcggaaatttcacatttcgataatgattcgttcattgtccttttatgtgtgcgtggaaaatattcttagtattttttagattttgtgattaatttggtattgccataaaattgtaaccttttagatgatggagataatctccgtccacttcaccaaccaggttacacaaaccattttatcctttaaaatgtggacaacaggatttgaacccttatagtagtggagtcacacacccacaactcaattgagtgtttgactatgatctggatttccctttatttaatatctcaatttgatacaggggccatgtaaccagcctagctgcaaatccccagtacatccatatacatcccccattcttctacattatgcaatgatgtgaactcacgttcattattaattttatttgaaattttttgcagtatgacgcatttgatattggtttcattacaactgatgaatttggtaatgcggatatcttagaagcaacctatcctgctgttgcgaagagacttcatggggactggatacaggatccagcgatacctgttgttactgggttccttgggaagggctggaaatctggtgctgtaactactttaggccgaggtggtagtgacttgactgctacaaccattggtaaagccttgggactgagagaaattcaggtatggaaagatgttgatggtgtacttacttgtgatccaaatatctacccacatgcaaagactgttccatacttaacatttgaagaggccacagaacttgcttattttggtgctcaggtactctttcttttgagtgaagaatcaaaagtaacatttcccccaagaaaaattatttgtcttggactgttaaaggggctatgatggttgacatgcgatgattcatttttgtcactaatgaatctttgtacaaattatattttgaatgctcaagaaaaaagttctggaactaaacaacaatgatatcgggtacatgatatttcatctttattgcacgttttcaggacttgaaccctgtatagtgtgaccaggctgcttctcagtgaataaacaaatctttcagttgcatacttctcaaaaacgaaagatcctgttcagtagataaacctctgttccctttttaccttttaaagctatattgattgttgtttggcatttgctttactaaccatcatgaattgaacatatagctcatgatgtcagtctcctgaacagaagcgagaaatttaggatcgttattgtggactgttcactccaatgcaggttttgcatccacaatcgatgagacctgctagagaaggtgatattccagttagggttaagaattcatacaaccctaaagctccaggcacccttattaccagacaaagagacatggataaggtctggtagtaggtaacttcaaatatatcctcacatctgcttgactttcgaggcattgatttttgcgcccctctttttcactactaggttgtactaactagcatagtgctcaagtcaaatgtcactatgttggacattgtgagcactcggatgcttggtcagtatggtttttctggcaagggtatgttgaacactgagccatttttgtatttatattacactgttctgatcactgcatgtatgaccttgagcaggtatttgctatatttgaagatctatgtatatctgtggattgtgttgctaccagtgaagttagtgtttctgtgtcacttgatccatcaaagatctggagtagggaactgatacagcaggaacttgaccatgtagttgaagagcttgagaaaatagcaattgttcgtctacttcagcagagggcgataatttcacttatcggaaatgtggagcaatcgtctctcatactagaaaagacgggacgtgtgctgaggaaaagtggggttaatgttcagatgatctcgcaaggagcgtcaaaggttaacatgtcgctgatagtccatgatagcgatgcaaaggcactcgtagaagcccttcatcaggcgttctttgaagacgatgtcctatcacaagtcgaagcggagaacctactcgtgggctgatcaacgtaggctttgctgggtccaggcgtgttatctgttatagattcccactcgcctccatgaacggcatgggcattggatcattgatcatgttttgcttgaaacaagtatgtcttccaggttctcagccaatgactgcaaaactgtgtttctgttttagaactgtttgcagacaccacagtctgagctgcgagcaccgattgtcaacaagatggcaagcctgtgatataattccaactgtctctaatcaatatatataataaacattatcaatatctattaattataagctgttttagttt

SEQ ID NO: 30895 - DNA, 2041 bp, Zea Mays
tcgatggccctattgcgtaaaacaataaacccgccttccccaccactggtcatcagtctccactccacgcccgacagagcaggaggactcagaaatggcaatcccagtgcgatcggctgccgcgccccgccgcctcgttccgtcgatacctccggcgagctctggacatgttcgaggactggcgtgcttcggtacccgaaccgggcctcgcggtgcaagagggttgtcaatggtggtcgccgactccaccagccgtcgggccaagcaagcggacggcggggacggcgtccttggggcgcctgttctcggagggctcgggatggagggattgggggatcagctcagcgtggtgatgaagttcggggggtcctcggtgtcgtcggccgcgaggatggctgaggtggccggcctcatcctgacgttccccgaggagcgccccgtcgtcgttctctctgccatggggaaaaccaccaacaaccttctccttgctggagagaaggcagtagggtgtggagttatccatgtttctgaaatcgaagagtggaatatggtcaaaagcctacatatcaagacggtggatgaacttggacttccaagatctgtaatacaagacatgctagatgaactggagcaactattgaaaggtatcgctatgatgaaagagctgacgcctaggaccagtgactaccttgtttcatttggagaatgcatgtccaccaggattttttctgcttatttgaacaaaattcgtgtcaaggcacggcagtatgacgcatttgatattggtttcattacaactgatgaatttggtaatgcggatatcttagaagcaacctatcctgctgttgcgaagagacttcatggggactggatacaggatccagcgatacctgttgttactgggttccttgggaagggctggaaatctggtgctgtaactactttaggccgaggtggtagtgacttgactgctacaaccattggtaaagccttgggactgagagaaattcaggtatggaaagatgttgatggtgtacttacttgtgatccaaatatctacccacatgcaaagactgttccatacttaacatttgaagaggccacagaacttgcttattttggtgctcaggttttgcatccacaatcgatgagacctgctagagaaggtgatattccagttagggttaagaattcatacaaccctaaagctccaggcacccttattaccagacaaagagacatggataaggttgtactaactagcatagtgctcaagtcaaatgtcactatgttggacattgtgagcactcggatgcttggtatttgctatatttgaagatctatgtatatctgtggattgtgttgctaccagtgaagttagtgtttctgtgtcacttgatccatcaaagatctggagtagggaactgatacagcaggaacttgaccatgtagttgaagagcttgagaaaatagcaattgttcgtctacttcagcagagggcgataatttcacttatcggaaatgtggagcaatcgtctctcatactagaaaagacgggacgtgtgctgaggaaaagtggggttaatgttcagatgatctcgcaaggagcgtcaaaggttaacatgtcgctgatagtccatgatagcgatgcaaaggcactcgtagaagcccttcatcaggcgttctttgaagacgatgtcctatcacaagtcgaagcggagaacctactcgtgggctgatcaacgtaggctttgctgggtccaggcgtgttatctgttatagattcccactcgcctccatgaacggcatgggcattggatcattgatcatgttttgcttgaaacaagtatgtcttccaggttctcagccaatgactgcaaaactgtgtttctgttttagaactgtttgcagacaccacagtctgagctgcgagcaccgattgtcaacaagatggcaagcctgtgatataattccaactgtctctaatcaatatatataataaacattatcaatatctattaattataagctgttttagttt

SEQ ID NO: 30896 - DNA, 3229 bp, Zea Mays
tcgatggccctattgcgtaaaacaataaacccgccttccccaccactggtcatcagtctccactccacgcccgacagagcaggaggactcagaaatggcaatcccagtgcgatcggctgccgcgccccgccgcctcgttccgtcgatacctccggcgagctctggacatgttcgaggactggcgtgcttcggtacccgaaccgggcctcgcggtgcaagagggttgtcaatggtggtcgccgactccaccagccgtcgggccaagcaagcggacggcggggacggcgtccttggggcgcctgttctcggagggctcgggatggagggattgggggatcagctcagcgtggtgatgaagttcggggggtcctcggtgtcgtcggccgcgaggatggctgaggtggccggcctcatcctgacgttccccgaggagcgccccgtcgtcgttctctctgccatggggaaaaccaccaacaaccttctccttgctggagagaaggcagtagggtgtggagttatccatgtttctgaaatcgaagagtggaatatggtcaaaagcctacatatcaagacggtggatgaacttggacttccaagatctgtaatacaagacatgctagatgaactggagcaactattgaaaggtatcgctatgatgaaagagctgacgcctaggaccagtgactaccttgtttcatttggagaatgcatgtccaccaggattttttctgcttatttgaacaaaattcgtgtcaaggcacggcaggtacttcttgatattttcttgatttgcacagtgattcagtgagcttttcaggttatgaatgcagcagcctacaagaatttgctatagtatccctgccctatggtgggggtgtcttgaaactttgattagtcattgatatttttactacatatgcacttcgtgatctcaagtttcagctcattatgttagttgattgccactagtattctgcggaaatttcacatttcgataatgattcgttcattgtccttttatgtgtgcgtggaaaatattcttagtattttttagattttgtgattaatttggtattgccataaaattgtaaccttttagatgatggagataatctccgtccacttcaccaaccaggttacacaaaccattttatcctttaaaatgtggacaacaggatttgaacccttatagtagtggagtcacacacccacaactcaattgagtgtttgactatgatctggatttccctttatttaatatctcaatttgatacaggggccatgtaaccagcctagctgcaaatccccagtacatccatatacatcccccattcttctacattatgcaatgatgtgaactcacgttcattattaattttatttgaaattttttgcagtatgacgcatttgatattggtttcattacaactgatgaatttggtaatgcggatatcttagaagcaacctatcctgctgttgcgaagagacttcatggggactggatacaggatccagcgatacctgttgttactgggttccttgggaagggctggaaatctggtgctgtaactactttaggccgaggtggtagtgacttgactgctacaaccattggtatggaaagatgttgatggtgtacttacttgtgatccaaatatctacccacatgcaaagactgttccatacttaacatttgaagaggccacagaacttgcttattttggtgctcaggtactctttcttttgagtgaagaatcaaaagtaacatttcccccaagaaaaattatttgtcttggactgttaaaggggctatgatggttgacatgcgatgattcatttttgtcactaatgaatctttgtacaaattatattttgaatgctcaagaaaaaagttctggaactaaacaacaatgatatcgggtacatgatatttcatctttattgcacgttttcaggacttgaaccctgtatagtgtgaccaggctgcttctcagtgaataaacaaatctttcagttgcatacttctcaaaaacgaaagatcctgttcagtagataaacctctgttccctttttaccttttaaagctatattgattgttgtttggcatttgctttactaaccatcatgaattgaacatatagctcatgatgtcagtctcctgaacagaagcgagaaatttaggatcgttattgtggactgttcactccaatgcaggttttgcatccacaatcgatgagacctgctagagaaggtgatattccagttagggttaagaattcatacaaccctaaagctccaggcacccttattaccagacaaagagacatggataaggttgtactaactagcatagtgctcaagtcaaatgtcactatgttggacattgtgagcactcggatgcttggtatttgctatatttgaagatctatgtatatctgtggattgtgttgctaccagtgaagttagtgtttctgtgtcacttgatccatcaaagatctggagtagggaactgatacagcaggaacttgaccatgtagttgaagagcttgagaaaatagcaattgttcgtctacttcagcagagggcgataatttcacttatcggaaatgtggagcaatcgtctctcatactagaaaaggtataacgctatctacattaaatatttcttctttgggttttcctctctaatgttattttcattggacatcagcatatatattaaccatttaataaatcttcagacgggacgtgtgctgaggaaaagtggggttaatgttcagatgatctcgcaaggagcgtcaaaggttaacatgtcgctgatagtccatgatagcgatgcaaaggcactcgtagaagcccttcatcaggcgttctttgaagacgatgtcctatcacaagtcgaagcggagaacctactcgtgggctgatcaacgtaggctttgctgggtccaggcgtgttatctgttatagattcccactcgcctccatgaacggcatgggcattggatcattgatcatgttttgcttgaaacaagtatgtcttccaggttctcagccaatgactgcaaaactgtgtttctgttttagaactgtttgcagacaccacagtctgagctgcgagcaccgattgtcaacaagatggcaagcctgtgatataattccaactgtctctaatcaatatatataataaacattatcaatatctattaattataagctgttttagttt

SEQ ID NO: 30897 - DNA, 2910 bp, Zea Mays
tcgatggccctattgcgtaaaacaataaacccgccttccccaccactggtcatcagtctccactccacgcccgacagagcaggaggactcagaaatggcaatcccagtgcgatcggctgccgcgccccgccgcctcgttccgtcgatacctccggcgagctctggacatgttcgaggactggcgtgcttcggtacccgaaccgggcctcgcggtgcaagagggttgtcaatggtggtcgccgactccaccagccgtcgggccaagcaagcggacggcggggacggcgtccttggggcgcctgttctcggagggctcgggatggagggattgggggatcagctcagcgtggtgatgaagttcggggggtcctcggtgtcgtcggccgcgaggatggctgaggtggccggcctcatcctgacgttccccgaggagcgccccgtcgtcgttctctctgccatggggaaaaccaccaacaaccttctccttgctggagagaaggcagtagggtgtggagttatccatgtttctgaaatcgaagagtggaatatggtcaaaagcctacatatcaagacggtggatgaacttggacttccaagatctgtaatacaagacatgctagatgaactggagcaactattgaaaggtatcgctatgatgaaagagctgacgcctaggaccagtgactaccttgtttcatttggagaatgcatgtccaccaggattttttctgcttatttgaacaaaattcgtgtcaaggcacggcaggtacttcttgatattttcttgatttgcacagtgattcagtgagcttttcaggttatgaatgcagcagcctacaagaatttgctatagtatccctgccctatggtgggggtgtcttgaaactttgattagtcattgatatttttactacatatgcacttcgtgatctcaagtttcagctcattatgttagttgattgccactagtattctgcggaaatttcacatttcgataatgattcgttcattgtccttttatgtgtgcgtggaaaatattcttagtattttttagattttgtgattaatttggtattgccataaaattgtaaccttttagatgatggagataatctccgtccacttcaccaaccaggttacacaaaccattttatcctttaaaatgtggacaacaggatttgaacccttatagtagtggagtcacacacccacaactcaattgagtgtttgactatgatctggatttccctttatttaatatctcaatttgatacaggggccatgtaaccagcctagctgcaaatccccagtacatccatatacatcccccattcttctacattatgcaatgatgtgaactcacgttcattattaattttatttgaaattttttgcagtatgacgcatttgatattggtttcattacaactgatgaatttggtaatgcggatatcttagaagcaacctatcctgctgttgcgaagagacttcatggggactggatacaggatccagcgatacctgttgttactgggttccttgggaagggctggaaatctggtgctgtaactactttaggccgaggtggtagtgacttgactgctacaaccattggtatggaaagatgttgatggtgtacttacttgtgatccaaatatctacccacatgcaaagactgttccatacttaacatttgaagaggccacagaacttgcttattttggtgctcaggacttgaaccctgtatagtgtgaccaggctgcttctcagtgaataaacaaatctttcagttgcatacttctcaaaaacgaaagatcctgttcagtagataaacctctgttccctttttaccttttaaagctatattgattgttgtttggcatttgctttactaaccatcatgaattgaacatatagctcatgatgtcagtctcctgaacagaagcgagaaatttaggatcgttattgtggactgttcactccaatgcaggttttgcatccacaatcgatgagacctgctagagaaggtgatattccagttagggttaagaattcatacaaccctaaagctccaggcacccttattaccagacaaagagacatggataaggttgtactaactagcatagtgctcaagtcaaatgtcactatgttggacattgtgagcactcggatgcttggtcagtatggtttttctggcaagggtatttgctatatttgaagatctatgtatatctgtggattgtgttgctaccagtgaagttagtgtttctgtgtcacttgatccatcaaagatctggagtagggaactgatacagcagttgaagagcttgagaaaatagcaattgttcgtctacttcagcagagggcgataatttcacttatcggaaatgtggagcaatcgtctctcatactagaaaagacgggacgtgtgctgaggaaaagtggggttaatgttcagatgatctcgcaaggagcgtcaaaggttaacatgtcgctgatagtccatgatagcgatgcaaaggcactcgtagaagcccttcatcaggcgttctttgaagacgatgtcctatcacaagtcgaagcggagaacctactcgtgggctgatcaacgtaggctttgctgggtccaggcgtgttatctgttatagattcccactcgcctccatgaacggcatgggcattggatcattgatcatgttttgcttgaaacaagtatgtcttccaggttctcagccaatgactgcaaaactgtgtttctgttttagaactgtttgcagacaccacagtctgagctgcgagcaccgattgtcaacaagatggcaagcctgtgatataattccaactgtctctaatcaatatatataataaacattatcaatatctattaattataagctgttttagttt

SEQ ID NO: 30898 - DNA, 1608 bp, Zea Mays
ccaagagtgttatgaaaacttctatttttatcataacacgccagatgatgccaatggacaaacgcaggatgaaaccagagacaataggtctctggttgataataatacagctcaaaatttatctagcgatgacatagaggcaatgaagagggatggtgcaactggtgacgagattgtagaagctttaatagcaaacagctcaacatttggaaataaaactgtcttctcacaggagaagtacaagttaaagaaacaaaagaaatatgcgcctaaagttcttttgcgacgcccttctgctcgaagcatttgtgagacatacttcaagaaaactccagctcgtatagggtttatgcgagttgacacactatctctcttgttgtctatggcaaacattggtgcgtattcagatgtgcttgtggttgatatggttggaggtttagttgttggagctgtagccgaacgtttaggaggtacagggtatgtttgcagcacatatcttggttcagcacccagctccatcgacattataagaatgtacaatttgagcagtgatatggtcagcaggattgttcaggcgccaattagtgccctatgttcaatgcaaagttctgggaataccccttctgttgtcaatagtagcgctgaaggggagatgatagaacctgctgtagatgaggatgcacaatcatctttggcacagcaagtggacacagcagtgccagatgagaaggcacagttatcaacagatcagccaagtgatatggaggtctcggagccttctttggatgagcatcttgttcaagatgagaattcttcattaggtggcaaagacagcgacggtaccttaaatgcttcaaaacctcctaaacctggaaaagcaccgtcaccagaaaagatgaaatattggaaggaacatggctttagtagtttgattgttgctgcccctggccacgaagtagagcgtcttgttgctgatatgcttccacttttgtcttattcagccccatttgctatatatcaccagcatctcgagcctcttgcaaagtgcatgcacagcttgcagttatcaaagatggctattggattgcagctttctgaaccctggctgcgtgaataccaggtccttccatctcgcacccatccacacatgcaaatgaatgcttttggtggttatatcttgaacggcataaggatacacaatccagatcgtgtggtagcaaacaagtgagtcgtcaataaaggcatgctccagcctttcaagcaaaaaaagaaaaggatggcacgccatttttttttaccttaaaaggtggtcaaagttttgtggtgaacttgcgtgtaaaccagtgtgtgttttatcagacagacatacgtcgccatgtttacagagaatagcatacgtcgccatgtttacagagaatagcacctgggagtaggacaagggcatcgctaccaatatgtatgcacctgagaatagcctgcgttgcttgtttgctgtagtttttagttaattcgtgcggaacttatttacgatatttgaatcgtgtgaaatctgtttccatgatatactactacttacaagggtgattctagaagtcggtttattttagt

SEQ ID NO: 30899 - DNA, 1486 bp, Zea Mays
cgacccaacccgacccgctcgctccttaaaccctcgcttgtcgtcgcttcgctttctccccaactccaactcccgcttcacgcccacaccaatggacccgcagccgccaccgatttgccgggaggcgtgggagggctgcagcgtcctcctcgacatcaatgacggcgaccgcctagccttcttccgcctcacccccggcgcgacggtgaagattgggaacaagacttgttcactgaagccgctcgtgggacgcccctttggctccctattccgcctcggcgccggcggactcgttccctgcgccgccgcggacgccacatctcgtgatcataacacgccagatgatgccaatggacaaacgcaggatgaaaccagagacaataggtctctggttgataataatacagctcaaaatttatctagcgatgacatagaggcaatgaagagggatggtgcaactggtgacgagattgtagaagctttaatagcaaacagctcaacatttggaaataaaactgtcttctcacaggagaagtacaagttaaagaaacaaaagaaatatgcgcctaaagttcttttgcgacgcccttctgctcgaagcatttgtgagacatacttcaagaaaactccagctcgtatagggtttatgcgagttgacacactatctctcttgttgtctatggcaaacattggtgcgtattcagatgtgcttgtggttgatatggttggaggtttagttgttggagctgtagccgaacgtttaggaggtacagggtatgtttgcagcacatatcttggttcagcacccagctccatcgacattataagaatgtacaatttgagcagtgatatggtcagcaggattgttcaggcgccaattagtgccctatgttcaatgcaaagttctgggaataccccttctgttgtcaatagtagcgctgaaggggagatgatagaacctgctgtagatgaggatgcacaatcatctttggcacagcaagtggacacagcagtgccagatgagaaggcacagttatcaacagatcagccaagtgatatggaggtctcggagccttctttggatgagcatcttgttcaagatgagaattcttcattaggtggcaaagacagcgacggtaccttaaatgcttcaaaacctcctaaacctggaaaagcaccgtcaccagaaaagatgaaatattggaaggaacatggctttagtagtttgattgttgctgcccctggccacgaagtagagcgtcttgttgctgatatgcttccacttttgtcttattcagccccatttgctatatatcaccagcatctcgagcctcttgcaaagtgcatgcacagcttgcagttatcaaagatggctattggattgcagctttctgaaccctggctgcgtgaataccagatatagcaacttgaaggactattgtcttcgagccttggaggaaatactggcatacatatgcgaacttac

SEQ ID NO: 30900 - DNA, 1798 bp, Zea Mays
ctcgcttgtcgtcgcttcgctttctccccaactccaactcccgcttcacgcccacaccaatggacccgcagccgccaccgatttgccgggaggcgtgggagggctgcagcgtcctcctcgacatcaatgacggcgaccgcctagccttcttccgcctcacccccggcgcgacggtgaagattgggaacaagacttgttcactgaagccgctcgtgggacgcccctttggctccctattccgcctcggcgccggcggactcgttccctgcgccgccgcggacgccacatctcgtgatcataacacgccagatgatgccaatggacaaacgcaggatgaaaccagagacaataggtctctggttgataataatacagctcaaaatttatctagcgatgacatagaggcaatgaagagggatggtgcaactggtgacgagattgtagaagctttaatagcaaacagctcaacatttggaaataaaactgtcttctcacaggagaagtacaagttaaagaaacaaaagaaatatgcgcctaaagttcttttgcgacgcccttctgctcgaagcatttgtgagacatacttcaagaaaactccagctcgtatagggtttatgcgagttgacacactatctctcttgttgtctatggcaaacattggtacagggtatgtttgcagcacatatcttggttcagcacccagctccatcgacattataagaatgtacaatttgagcagtgatatggtcagcaggattgttcaggcgccaattagtgccctatgttcaatgcaaagttctgggaataccccttctgttgtcaatagtagcgctgaaggggagatgatagaacctgctgtagatgaggatgcacaatcatctttggcacagcaagtggacacagcagtgccagatgagaaggcacagttatcaacagatcagccaagtgatatggaggtctcggagccttctttggatgagcatcttgttcaagatgagaattcttcattaggtggcaaagacagcgacggtaccttaaatgcttcaaaacctcctaaacctggaaaagcaccgtcaccagaaaagatgaaatattggaaggaacatggctttagtagtttgattgttgctgcccctggccacgaagtagagcgtcttgttgctgatatgcttccacttttgtcttattcagccccatttgctatatatcaccagcatctcgagcctcttgcaaagtgcatgcacagcttgcagttatcaaagatggctattggattgcagctttctgaaccctggctgcgtgaataccaggtccttccatctcgcacccatccacacatgcaaatgaatgcttttggtggttatatcttgaacggcataaggatacacaatccagatcgtgtggtagcaaacaagtgagtcgtcaataaaggcatgctccagcctttcaagcaaaaaaagaaaaggatggcacgccatttttttttaccttaaaaggtggtcaaagttttgtggtgaacttgcgtgtaaaccagtgtgtgttttatcagacagacatacgtcgccatgtttacagagaatagcatacgtcgccatgtttacagagaatagcacctgggagtaggacaagggcatcgctaccaatatgtatgcacctgagaatagcctgcgttgcttgtttgctgtagtttttagttaattcgtgcggaacttatttacgatatttgaatcgtgtgaaatctgtttccatgatatactactacttacaagggtgattctagaagtcggtttattttagt

SEQ ID NO: 30901 - DNA, 1853 bp, Zea Mays
gtcgcttcgctttctccccaactccaactcccgcttcacgcccacaccaatggacccgcagccgccaccgatttgccgggaggcgtgggagggctgcagcgtcctcctcgacatcaatgacggcgaccgcctagccttcttccgcctcacccccggcgcgacggtgaagattgggaacaagacttgttcactgaagccgctcgtgggacgcccctttggctccctattccgcctcggcgccggcggactcgttccctgcgccgccgcggacgccacatctcgtgatcataacacgccagatgatgccaatggacaaacgcaggatgaaaccagagacaataggtctctggttgataataatacagctcaaaatttatctagcgatgacatagaggcaatgaagagggatggtgcaactggtgacgagattgtagaagctttaatagcaaacagctcaacatttggaaataaaactgtcttctcacaggagaagtacaagttaaagaaacaaaagaaatatgcgcctaaagttcttttgcgacgcccttctgctcgaagcatttgtgagacatacttcaagaaaactccagctcgtatagggtttatgcgagttgacacactatctctcttgttgtctatggcaaacattggtgcgtattcagatgtgcttgtggttgatatggttggaggtttagttgttggagctgtagccgaacgtttaggaggtacagggtatgtttgcagcacatatcttggttcagcacccagctccatcgacattataagaatgtacaatttgagcagtgatatggtcagcaggcgccaattagtgccctatgttcaatgcaaagttctgggaataccccttctgttgtcaatagtagcgctgaaggggagatgatagaacctgctgtagatgaggatgcacaatcatctttggcacagcaagtggacacagcagtgccagatgagaaggcacagttatcaacagatcagccaagtgatatggaggtctcggagccttctttggatgagcatcttgttcaagatgagaattcttcattaggtggcaaagacagcgacggtaccttaaatgcttcaaaacctcctaaacctggaaaagcaccgtcaccagaaaagatgaaatattggaaggaacatggctttagtagtttgattgttgctgcccctggccacgaagtagagcgtcttgttgctgatatgcttccacttttgtcttattcagccccatttgctatatatcaccagcatctcgagcctcttgcaaagtgcatgcacagcttgcagttatcaaagatggctattggattgcagctttctgaaccctggctgcgtgaataccaggtccttccatctcgcacccatccacacatgcaaatgaatgcttttggtggttatatcttgaacggcataaggatacacaatccagatcgtgtggtagcaaacaagtgagtcgtcaataaaggcatgctccagcctttcaagcaaaaaaagaaaaggatggcacgccatttttttttaccttaaaaggtggtcaaagttttgtggtgaacttgcgtgtaaaccagtgtgtgttttatcagacagacatacgtcgccatgtttacagagaatagcatacgtcgccatgtttacagagaatagcacctgggagtaggacaagggcatcgctaccaatatgtatgcacctgagaatagcctgcgttgcttgtttgctgtagtttttagttaattcgtgcggaacttatttacgatatttgaatcgtgtgaaatctgtttccatgatatactactacttacaagggtgattctagaagtcggtttattttagt

SEQ ID NO: 30902 - DNA, 1722 bp, Zea Mays
cccaactccaactcccgcttcacgcccacaccaatggacccgcagccgccaccgatttgccgggaggcgtgggagggctgcagcgtcctcctcgacatcaatgacggcgaccgcctagccttcttccgcctcacccccggcgcgacggtgaagattgggaacaagacttgttcactgaagccgctcgtgggacgcccctttggctccctattccgcctcggcgccggcggactcgttccctgcgccgccgcggacgccacatctcgtgatcataacacgccagatgatgccaatggacaaacgcaggatgaaaccagagacaataggtctctggttgataataatacagctcaaaatttatctagcgatgacatagaggcaatgaagagggatggtgcaactggtgacgagattgtagaagctttaatagcaaacagctcaacatttggaaataaaactgtcttctcacaggagaagtacaagttaaagaaacaaaagaaatatgcgcctaaagttcttttgcgacgcccttctgctcgaagcatttgtgagacatacttcaagaaaactccagctcgtatagggtacagggtatgtttgcagcacatatcttggttcagcacccagctccatcgacattataagaatgtacaatttgagcagtgatatggtcagcaggattgttcaggcgccaattagtgccctatgttcaatgcaaagttctgggaataccccttctgttgtcaatagtagcgctgaaggggagatgatagaacctgctgtagatgaggatgcacaatcatctttggcacagcaagtggacacagcagtgccagatgagaaggcacagttatcaacagatcagccaagtgatatggaggtctcggagccttctttggatgagcatcttgttcaagatgagaattcttcattaggtggcaaagacagcgacggtaccttaaatgcttcaaaacctcctaaacctggaaaagcaccgtcaccagaaaagatgaaatattggaaggaacatggctttagtagtttgattgttgctgcccctggccacgaagtagagcgtcttgttgctgatatgcttccacttttgtcttattcagccccatttgctatatatcaccagcatctcgagcctcttgcaaagtgcatgcacagcttgcagttatcaaagatggctattggattgcagctttctgaaccctggctgcgtgaataccaggtccttccatctcgcacccatccacacatgcaaatgaatgcttttggtggttatatcttgaacggcataaggatacacaatccagatcgtgtggtagcaaacaagtgagtcgtcaataaaggcatgctccagcctttcaagcaaaaaaagaaaaggatggcacgccatttttttttaccttaaaaggtggtcaaagttttgtggtgaacttgcgtgtaaaccagtgtgtgttttatcagacagacatacgtcgccatgtttacagagaatagcatacgtcgccatgtttacagagaatagcacctgggagtaggacaagggcatcgctaccaatatgtatgcacctgagaatagcctgcgttgcttgtttgctgtagtttttagttaattcgtgcggaacttatttacgatatttgaatcgtgtgaaatctgtttccatgatatactactacttacaagggtgattctagaagtcggtttattttagt

SEQ ID NO: 30903 - DNA, 1785 bp, Zea Mays
cccaactccaactcccgcttcacgcccacaccaatggacccgcagccgccaccgatttgccgggaggcgtgggagggctgcagcgtcctcctcgacatcaatgacggcgaccgcctagccttcttccgcctcacccccggcgcgacggtgaagattgggaacaagacttgttcactgaagccgctcgtgggacgcccctttggctccctattccgcctcggcgccggcggactcgttccctgcgccgccgcggacgccacatctcgtgatcataacacgccagatgatgccaatggacaaacgcaggatgaaaccagagacaataggtctctggttgataataatacagctcaaaatttatctagcgatgacatagaggcaatgaagagggatggtgcaactggtgacgagattgtagaagctttaatagcaaacagctcaacatttggaaataaaactgtcttctcacaggagaagtacaagttaaagaaacaaaagaaatatgcgcctaaagttcttttgcgacgcccttctgctcgaagcatttgtgagacatacttcaagaaaactccagctcgtataggatgtgcttgtggttgatatggttggaggtttagttgttggagctgtagccgaacgtttaggaggtacagggtatgtttgcagcacatatcttggttcagcacccagctccatcgacattataagaatgtacaatttgagcagtgatatggtcagcaggattgttcaggcgccaattagtgccctatgttcaatgcaaagttctgggaataccccttctgttgtcaatagtagcgctgaaggggagatgatagaacctgctgtagatgaggatgcacaatcatctttggcacagcaagtggacacagcagtgccagatgagaaggcacagttatcaacagatcagccaagtgatatggaggtctcggagccttctttggatgagcatcttgttcaagatgagaattcttcattaggtggcaaagacagcgacggtaccttaaatgcttcaaaacctcctaaacctggaaaagcaccgtcaccagaaaagatgaaatattggaaggaacatggctttagtagtttgattgttgctgcccctggccacgaagtagagcgtcttgttgctgatatgcttccacttttgtcttattcagccccatttgctatatatcaccagcatctcgagcctcttgcaaagtgcatgcacagcttgcagttatcaaagatggctattggattgcagctttctgaaccctggctgcgtgaataccaggtccttccatctcgcacccatccacacatgcaaatgaatgcttttggtggttatatcttgaacggcataaggatacacaatccagatcgtgtggtagcaaacaagtgagtcgtcaataaaggcatgctccagcctttcaagcaaaaaaagaaaaggatggcacgccatttttttttaccttaaaaggtggtcaaagttttgtggtgaacttgcgtgtaaaccagtgtgtgttttatcagacagacatacgtcgccatgtttacagagaatagcatacgtcgccatgtttacagagaatagcacctgggagtaggacaagggcatcgctaccaatatgtatgcacctgagaatagcctgcgttgcttgtttgctgtagtttttagttaattcgtgcggaacttatttacgatatttgaatcgtgtgaaatctgtttccatgatatactactacttacaagggtgattctagaagtcggtttattttagt

SEQ ID NO: 30904 - DNA, 1832 bp, Zea Mays
cccaactccaactcccgcttcacgcccacaccaatggacccgcagccgccaccgatttgccgggaggcgtgggagggctgcagcgtcctcctcgacatcaatgacggcgaccgcctagccttcttccgcctcacccccggcgcgacggtgaagattgggaacaagacttgttcactgaagccgctcgtgggacgcccctttggctccctattccgcctcggcgccggcggactcgttccctgcgccgccgcggacgccacatctcgtgatgatgccaatggacaaacgcaggatgaaaccagagacaataggtctctggttgataataatacagctcaaaatttatctagcgatgacatagaggcaatgaagagggatggtgcaactggtgacgagattgtagaagctttaatagcaaacagctcaacatttggaaataaaactgtcttctcacaggagaagtacaagttaaagaaacaaaagaaatatgcgcctaaagttcttttgcgacgcccttctgctcgaagcatttgtgagacatacttcaagaaaactccagctcgtatagggtttatgcgagttgacacactatctctcttgttgtctatggcaaacattggtgcgtattcagatgtgcttgtggttgatatggttggaggtttagttgttggagctgtagccgaacgtttaggaggtacagggtatgtttgcagcacatatcttggttcagcacccagctccatcgacattataagaatgtacaatttgagcagtgatatggtcagcaggattgttcaggcgccaattagtgccctatgttcaatgcaaagttctgggaataccccttctgttgtcaatagtagcgctgaaggggagatgatagaacctgctgtagatgaggatgcacaatcatctttggcacagcaagtggacacagcagtgccagatgagaaggcacagttatcaacagatcagccaagtgatatggaggtctcggagccttctttggatgagcatcttgttcaagatgagaattcttcattaggtggcaaagacagcgacggtaccttaaatgcttcaaaacctcctaaacctggaaaagcaccgtcaccagaaaagatgaaatattggaaggaacatggctttagtagtttgattgttgctgcccctggccacgaagtagagcgtcttgttgctgatatgcttccacttttgtcttattcagccccatttgctatatatcaccagcatctcgagcctcttgcaaagtgcatgcacagcttgcagttatcaaagatggctattggattgcagctttctgaaccctggctgcgtgaataccaggtccttccatctcgcacccatccacacatgcaaatgaatgcttttggtggttatatcttgaacggcataaggatacacaatccagatcgtgtggtagcaaacaagtgagtcgtcaataaaggcatgctccagcctttcaagcaaaaaaagaaaaggatggcacgccatttttttttaccttaaaaggtggtcaaagttttgtggtgaacttgcgtgtaaaccagtgtgtgttttatcagacagacatacgtcgccatgtttacagagaatagcatacgtcgccatgtttacagagaatagcacctgggagtaggacaagggcatcgctaccaatatgtatgcacctgagaatagcctgcgttgcttgtttgctgtagtttttagttaattcgtgcggaacttatttacgatatttgaatcgtgtgaaatctgtttccatgatatactactacttacaagggtgattctagaagtcggtttattttagt

SEQ ID NO: 30905 - DNA, 1165 bp, Zea Mays
ccattttcatttccagccccacctgccgtacagggtatgtttgcagcacatatcttggttcagcacccagctccatcgacattataagaatgtacaatttgagcagtgatatggtcagcaggattgttcaggcgccaattagtgccctatgttcaatgcaaagttctgggaataccccttctgttgtcaatagtagcgctgaaggggagatgatagaacctgctgtagatgaggatgcacaatcatctttggcacagcaagtggacacagcagtgccagatgagaaggcacagttatcaacagatcagccaagtgatatggaggtctcggagccttctttggatgagcatcttgttcaagatgagaattcttcattaggtggcaaagacagcgacggtaccttaaatgcttcaaaacctcctaaacctggaaaagcaccgtcaccagaaaagatgaaatattggaaggaacatggctttagtagtttgattgttgctgcccctggccacgaagtagagcgtcttgttgctgatatgcttccacttttgtcttattcagccccatttgctatatatcaccagcatctcgagcctcttgcaaagtgcatgcacagcttgcagttatcaaagatggctattggattgcagctttctgaaccctggctgcgtgaataccaggtccttccatctcgcacccatccacacatgcaaatgaatgcttttggtggttatatcttgaacggcataaggatacacaatccagatcgtgtggtagcaaacaagtgagtcgtcaataaaggcatgctccagcctttcaagcaaaaaaagaaaaggatggcacgccatttttttttaccttaaaaggtggtcaaagttttgtggtgaacttgcgtgtaaaccagtgtgtgttttatcagacagacatacgtcgccatgtttacagagaatagcatacgtcgccatgtttacagagaatagcacctgggagtaggacaagggcatcgctaccaatatgtatgcacctgagaatagcctgcgttgcttgtttgctgtagtttttagttaattcgtgcggaacttatttacgatatttgaatcgtgtgaaatctgtttccatgatatactactacttacaagggtgattctagaagtcggtttattttagt

SEQ ID NO: 30906 - DNA, 2995 bp, Zea Mays
gttgcaagatgagcacgagtgcataattggctatgatacagtctggaaaggaaaagaaaaggctttggctgaattgtatgattcatgccaagagagttttcagctgttgtacaattggaggtcaggggtcacgaaggttttcggtagaccatggcttggcagacagcagactactactagcaacaaaatcagtcattaaatcgatccgatcggttcacatcccgcgagataatccatggctgggtgctagggtttacggcttcctccattcgcacgcacccctgggcgctgcgggctcgcggagcaggatcgatcagttcggatggaggatggggagacggaggaggcgcagcgggacgcgatcacggcgaggatgcgggcccaggactacgcgggcgcgagggcgctgctgctgcggacgcttcagacgaaccccaggctggagggtgccctggagatgctcccggtgctcgaggtcctctgctgcgccgccgccggccgtgggggcgtggactggtacagagtcctccaggtgctgcctgtggatgacgccgccaggatcgaggcgcgctacaagagcatcgtggcccaggtggagccggccatgggggctctgcccggcgccgaattggccctcaagctcgtcgacgaggcttacgcggtgctgtctgatccagagaagcgagaggggtttgattcgagcaacgttttcacccggttcgttcggtccggtgtcgttgatgctccaccgcccggtggcacactcgtccgtcctgacagggtgagcagccttcacacaaacaagattatggcgttaaatggtacgagcaatgcagtctcgcgtaccaaccacgccgacaggccatgctttgatggaagggattcccgtctttcaaatgtggcgagttcatccgggactaagaggatggatccttgctttcttgctgatgacggtgagttgcagtcacctgatggcactcatgttaacaaggggcaaaagagtgtcagtgaaaaggatgtttattgcatgtctccctcacaggaaaactgggatacctgctttgatgatccatcacatgctaaggaagaagatttggatgcctgctttgatgatccatctggtaccaaagaaggtgagctatgcagtagcaagtcgtatgaataccataattttgaagaagatcgagcgatcgagaattttgctcctggccaggtttgggcagcatatgactgggggaggtttcctcgtagatatgcactgattgttaaagtactgacggataaaatgcagttgtatgtctcatggttcatgccctgtccgcaaactcctgaagagaagaaatggtcccttgtggggttgccattggtttgtggaactttcgttgcagatgaacaccgaatctcgttaacatgtccaactatgttctgtcaccaaatttccaacaacaacatgaatcaagatcttgaagtgtatccacaggaaggtgaaatatgggccatttatagaaattgggatatcggatggtacactgatcctaggatgtggaagaatagtgacttctctattgttgaaattcttactagctattctaatgaatcaggttacactgttgcacatttgacaaaggtggatggttatggaagtgttttccagaggcattttaagagtggaacagaacatttgttacacatacatggtcaaaatcttatcatgttttctcacaggatcccttctttcaaatttactcatgatgctggaactatgttcgagcttgatcattctgcagttccagaaaaaatgcaccaaaaaaatacatctgcgtgtatttctcatttgtctgagctttcaggtttacctgatgacacagatggcttccctgaaactgctgttgcacaattctcaaatccttcagcaacaagcaaaatggaagcaggttccccgacgcaagccatgatgagctacaataccaagtggtttcccaaggattttctagagggccaaatatgggctgtatttgattctcgggaccggatgcctaggtcttatgtcaggataatccatgtggtttcatctacttcagtttttgtattgaagttggaacctcaccctatgcttaatgaagagatacagtgggttgaagatggtctaccggttgcttctggagtatttcgcgctggtactgaaactacttacaaggatatctgggaattctcacaccctgtagagtgtgactggagtgcaaaaagatctttttaccgtatattcccccaaaagggggaaatatgggcaatgctaaaaaattggaggatcaccttgaataccactgacattgacaaatgtgaacctcgcatggttgagatcctctcggaatactctgatgaaaatggagtaaatgtttgcagcttggctcgggtaaaaggttgctttaccttttttcatagggtagcagtggaggatttctgtttgacaaggtggattccaaggtctgaaatgctcagcttttcccaccgtgttcctgcttttgacattgttgacatcaaagatcatgatataccacaagggtcatggtatctggaaccaagtgcccttcctacaaggatcatacattaacacatgtatagtagcagaagtagccatagccctattgtaatgaactaatgactccacccttctctatccctccattttgaattgttctacttatctccattaatcatcttgtacttactgactcatttgtgaagagaactgtttgatcaactcttcaaaattcccatgtatgaccaattgcagatcaggtctgacaagtgttaaaatttggaaatgaactcttttaccatgaaatacaaaacgagaaagtaacgtaacttaaagtaaggtttactgcatctgtatttgagatttgaccgctgccatcgactgccaattggtgctgctacaggctccctggttgtccaaattatcgtttttgcttgtcactgctctggagaggtg

SEQ ID NO: 30907 - DNA, 1206 bp, Zea Mays
catgggatcctctctctctctctctctccatgtctagaatagctagtataaaaaggagaagccttgggtgctgtcgccggacaggaaagggagggggagctcaagcatcaagaagagcccacgcgcacgccgccatggacatggagctggagcacggagggaatgaagacgacagggggagtgagtcctcctcctcctcctccaagcggagcttcggcgcctcgtcggacgcaaccgtcagcagcacgccaagcaagctacaggctctgaggtgcaggtggtggtgatgagcgccaacatgggttgctcgcactgccggcagcgggtcgccgacgtcgtctccaagatgaacgggctgctggactacatggtggacttcgggaagaaggaggtgacggtgcgcgggaaggtggcgcacaccaagaacaagaggaagcacaggaaggcactgctgggtgctccagcaggttgggacgacgccagatcggcggcggccgcgtcgtcgtcttcgcccggcggccatgccaggacgacgctgtcatggtttttgggatgctacggctcatgaccaccacaccatagtccatagctagtatatataagtctccgcatagatatagtatcatcatatatactgctgtatgtatgtatgtgcttgttatgttcatatataactagtagcagctgcatatatagtttgtaatgatagtaataatctattgatttccattgctttctttctttttcattccgaataatgtatcgttcatgcatgttatgtatgcagcaaccagccatgcccatacatacatatatatcagtgaacagtgctgacagtcttcagagtcttataggacgacaactggggtacccaccatagataaccattgatcgatgaggcagcatcaggcgtgttcgttcagatcgattcattctgctagcggcagcggtaggccctagctagcacgccggaataaccggatccgtgctggggacgcgccgggctccggggtgacgacgcctcggagagttcccatgccatggacctgtgtcgcagttgcagtgactgacagacaaggcgagaagagcagagcatcagagttagctgactgctgcctggtcgcctcctgaatattctcccctcacgtggcgctgcttgtgaagctgtagccactttgtctgatgagacgcgagcagagacaggca

SEQ ID NO: 30908 - DNA, 3365 bp, Zea Mays
acaggaaagggagggggagctcaagcatcaagaagagcccacgcgcacgccgccatggacatggagctggagcacggagggaatgaagacgacagggggagtgagtcctcctcctcctcctccaagcggagcttcggcgcctcgtcggacgcaaccgtcagcagcacgccaagcaagctacaggctctgaggtttgcggaagatctctccctcccatcggtacgcgctctccctttcttcctcatcattgccagcaagctgatcagcgccaagaaatgagaactccgcaatggcttgcatgtcgttgggttcttgaaacccagctgcgactatcaatcactctgctagcgactctgtctttctgccggagcaggactctgtgctctctccttcctgcctcgttgaggatatgatgctagcctttgctgttcaggcttcagtggtagtgtcgtagcacagtaaagtcactccatccttcaccgcatttcgacagacagtctccatctccacacgttcagtgtccgttgttccactgcacacatcgagggagaagaggaagagagagatgctggagcctggctgctggtttgatctccttggattctcaaaagggacccggtcgctttttgccctcccagtccggcttttagcgtaaaggtgagaagtccagcccctgttactgttagtggcttagtgccaatccgccaaacaactccagtgcagggagcaagtttgcttccctgtctgtctgtctgtctctctttctttctactgtagtatcttttaacttgctctgatgatcctggagatgagaatctgtgagctacacattattgttcttgtccacatgcaaatcaatggcagtaacttgttggcaagaccaagagactgaatctgctggtagcagacaccgggcacgcatgcagcgcctgtagcctgtttcttgcgccgctctatgcaatgcaatgcaatgctatgctattgcagccacttgtttgttgcgccgttctcggccacagctgatgagctgttattagctgttggctgttgccgggagagagctcgagctgcttgtctggcggccaggagcccataacgaaggtgaaagtgaaaccgtctgtctttgaccggtgagcatgccaggcagtagacgaataggctaaggcacgagcaggttcactgtacaggcagccgccatgcctgatgaatgctcctcgtttataaccccctcaccaactacgcttgcacacgcttcctttgacctgataataataaattaattaagcgcacacgcttctccttctcatcccaacatcatatgatatactggcgggcgttcctgcctgcatgtgcagtgtgtgtttttgaccattatatttgactcagtcatttacagtatttcaccatcatcagttagctagctgctatgaccgaacattatatttcttaatctctagaattcctcctgcacgagtttaatctgtatgggaatgggactagatctccggaggagtctttgcattggcctgttgcctgatcagagaagatcgcaacggtaagatgccatgcgatgcgactagtattcatctactatatataatataatgcaagtggcttgcgtagctgatagattagcacgcacggcatatgctgctatatactactacctccgttatcgttcttgttccttgttcgttagtttatttttaaactaaaacgtgacaaataaaaaagaacgaatggagtatatataataccgctagctgcctagctggtggctgcctgtggctgtgtaggattagattattagaacaatctgcattagggttcaagagtggcagcagctagccatgtgacttttggagaggaacatatgcatctcttccctcctagcttccctgtgctacgtacgaatatattcccctcaactatatacaatgaactctagccgtacgtacgtcctgatcgatcagtggaaggtgggattaatatactctttactttttactctatttatctgtctataaagattaaactctatatataacatttcattcgaacagactcttaaacatgtaagttagtttaactggcgagagttgctagccaaatttagctagtgagagggtcaatttaaagagccggatagcttggcaagttaaacggatagtctgttgaagagctattttgctattaaatagctaaaatttaacttgacaagccatttatccagtctcttggagatgctcttaattaactagctttttattaattacgtataggctagttttgttttgttttgtttttttagaaaacggaacgtgtgttttatttcgagagaagcaacattttcttttattcattacgcgcgtagaggcaatgcggatgcgaatgaatgaatgatgcgtcgctggaaccatgcatgcgcaggtgcaggtggtggtgatgagcgccaacatgggttgctcgcactgccggcagcgggtcgccgacgtcgtctccaagatgaacgggctgctggactacatggtggacttcgggaagaaggaggtgacggtgcgcgggaaggtggcgcacaccaagaacaagaggaagcacaggaaggcactgctgggtgctccagcaggttgggacgacgccagatcggcggcggccgcgtcgtcgtcttcgcccggcggccatgccaggacgacgctgtcatggtttttgggatgctacggctcatgaccaccacaccatagtccatagctagtatatataagtctccgcatagatatagtatcatcatatatactgctgtatgtatgtatgtgcttgttatgttcatatataactagtagcagctgcatatatagtttgtaatgatagtaataatctattgatttccattgctttctttctttttcattccgaataatgtatcgttcatgcatgttatgtatgcagcaaccagccatgcccatacatacatatatatcagtgaacagtgctgacagtcttcagagtcttataggacgacaactggggtacccaccatagataaccattgatcgatgaggcagcatcaggcgtgttcgttcagatcgattcattctgctagcggcagcggtaggccctagctagcacgccggaataaccggatccgtgctggggacgcgccgggctccggggtgacgacgcctcggagagttcccatgccatggacctgtgtcgcagttgcagtgactgacagacaaggcgagaagagcagagcatcagagttagctgactgctgcctggtcgcctcctgaatattctcccctcacgtggcgctgcttgtgaagctgtagccactttgtctgatgagacgcgagcagagacaggca

SEQ ID NO: 30909 - DNA, 451 bp, Zea Mays
aaacatgtaacgtatatatatttatccagaggataagtgttgcaggaccagatgtccagatatatcagttaatcgaagattgtcggcaaaatatgctaccatgaccaccatgtcctctaaatctctaattatcacaaaacaagaatgctatattatatcaatagggtgtttgtttgatgaatcacttcatccaaattaaggtggtacatcataagctcattccttaaatttgataagatgacttcatttctaatgttagtgctaactaactaactatgaggaataaggtggtgatagatcgactcattttattacataaaccaagcaaaaatagtaaatgagaagatgatatactaactcattcttaaaccgaacaccccataaattgctcctcttttgctatatatgatcaagagcatgtcaactacataggtaccatgactgtttttcc

SEQ ID NO: 30910 - DNA, 2137 bp, Zea Mays
tgctattctacaacagtaaattaaaatgagattgataaaaacaaaaaagaatcaagagcttagtttacatatatgtttgagatcaattcattcagaagtgtaaggcaaaacatttgtgatcggcaagaaaaaaatgacggaccctgaatgattggcctcccttggggtataccacagaagaaagaaatttgatcaaactgcaaggtcaagaaaaggcttgaaagttggctgcctaggacacgcctgcagtttaacccctggttggcagcctcccaataggaggacctaccaccgcgctaaaccaacatgttgagtatataaattaactcatgtattaaaatgttaaatgttccaaacatgccatgagctatagcttgaacaactagaaaatcataatgtctgattggttgcttacgataacattagcttgcatgtagtgtcatgtggggcaaacgatatacacgcttccagggataagtcaagtcagttgagatttagtaggagtcggtttagataaagataggagagtaagattaggatgagagtatttaggagagttagttatcaggaatactatatataagtcgtatgggcaacatgaatgaatcaagcaagaagttatatcatcttcctcacctcctctccagcaaagatatgtaatcgaggggcaaaaccttgcgctgccaactccggcagctacgccctgcgcagccaggggtcacccatcccctctactagaacacgccacgccatgtaatcacatccatgttctagttgaggtgtcatgtttttaatgaaggtatgaagacaggtgaaacccctagagtggtgcttgtcatctcagcaacttagagataggtgaaacccttagagtggttgggttggtttcttttgctaatatgtaattgacaagaacatatatcagggataacccaatcaagctcaacaaaaagggcatgtacagataggtccatgggtttggtcaagagcccatggactcgagcatcatgatcagggggaggtctaccaccaggaggattctagaagcacaaacatgacaaagatcttattagaatagaagagatggtcaagatcctaacagttaaggcaaagattctaacgaataaagcaaagaccctaacgaataagacaagatcctagtggataaggaatacacacttgtaatcatagagtaggattcatgtacaactaggttaccgacatggtaccgtcatggaatagaaaaccaacttggtgtctatcatgtagccgctccgcttcttagactataaaaggaggggcgagggagcctcctaggggcatgagatcatcagctcgtgagcaatagccaccaatatatagaacgtagagcattgccttctatcgagagcctgaacctatctaaatcttcgtctaccatgcatttacctttggctttcggtctcgtgacataccccataaatttactgccgaaaaattctaatctcttttcttttgtgagggtgaggatcttcatcagtagggtcatgttaatgtaggactcagtctttttctctctctattatataatgatgtgcaactctatagtactatcaaattttgaaccaactaagattctatgttggtatttctcaacctatgcaagcaagatgggactaaacacccaacttatcatacacacgtgcacatgatccacgatccaccatcgacaaatcaaatcaggttggtatcacattacaacatatttaatatttttgttgtagaaatataaccctccctctatcccgaattccaattcactttggttgctctaaatcaatattttctaactttgaccgagtttttaacatatatggacatctacaagttgaaataaaatcactactgaattttttttatgaacagaatggcagaactaacttgaccatttgatgttctagttgtttggcatttttgtataaacttagtcaaagctaagaaagtttgacttaggataaaaccaaagtgaattataactttgaacggaaatgtgaaacatagcaagttacatgcaaatgatataactaagtaacaaatatgaaccactgaaaccaaccttcaacgctaaattcccacgtttcaactgttgagagccaat

SEQ ID NO: 30911 - DNA, 1599 bp, Zea Mays
cgccggctggacctcgcctggcctggaagtgctggtgatgtgctcgaagacgatcccgttgggaggctcaaggtgtatgtctacgagttgccgaccaagtacaacaagaagatggtggctaaagactctaggtgtctcagccacatgtttgccgcggagatcttcatgcaccgcttcctactgtctagcgcgatccggactttaaatccagaagtagccgattggttctatactccggtatacaccacgtgtgatctcacaccgtggggtcatcccttgcccttcaagtcaccacggataatgcggagcgcgattcagttcatttccaaccggtggccatactggaacaggacagagggagcagaccacttctttgtcgtgccacatgactttggcgcatgcttccactaccaggaagagaaggccatcgagcggggcgtccttccgttgcttcgccgtgctacactggtccagacttttgggcagaaggatcatgtctgcctgaaggaaggctccatcaccatcccgccatatgctcctcctcagaagatgaaaacccacctcgttcccccagggacccctaggtcgatcttcgtgtatttccgcggtttattctatgacactgcaaatgatcctgagggtggttactatgcaaggggcgcccgtgcatcagtctgggagaacttcaagaacaacccgctcttcgacatctcaacggaccacccacccacgtactacgaggacatgcagcgtgccgtcttctgcctgtgcccgctgggctgggccccgtggagcccccgtctggtggaggcggtggtgttcggctgcatcccggtgatcatcgccgacgacatcgtccttcccttcgcggacgcgatcccgtgggaggagatcggtgtcttcgtggccgaggacgacgtcccgaggctggacaccatcctgacgtccataccgatggaggtgatcctccggaagcagaggctgctcgcgaatccgtccatgaagcaggccatgctgttcccgcagcccgcccaggctggggacgccttccaccagatcctgaacgggctggcgcggaagctgccgcacggtgaggacgtgttcctcaagcccgggcagaaggtgctcaactggaccgagggcccccgcggcgacctgaagccatggtaggtgtactggaaaaaaacagcacaaccagatgggaagctgatcgacgacgaggacgatgagtactcccatgtcactgatgtaaatgtaaagcgtcttccagcccaccaggcactgtgcttcttcaggcgacgtgtctggtttgcttgtgttgtgtctgttctgaactttactttagcgttaacctattaacgatcggagatcatgtaatttatggctgttgtattctccctatagtatcaaggacatgtttgattagtttagtctagggactaaaatttagttaggagactaaagtttactccctactctatttagttgtagggactaaaaatattcagagcatattaaatgaatcataagaagaataaaatatcccttagcattctcgtgtaattagtgtaactgaaataaataacggacaaaaaaaaa

SEQ ID NO: 30912 - DNA, 1656 bp, Zea Mays
accctcagattgtgtgcatctgagcataagcaaggcataatcctgccttgcttatgctcggcagcagagcttcactgcacaggaagtgctggtgatgtgctcgaagacgatcccgttgggaggctcaaggtgtatgtctacgagttgccgaccaagtacaacaagaagatggtggctaaagactctaggtgtctcagccacatgtttgccgcggagatcttcatgcaccgcttcctactgtctagcgcgatccggactttaaatccagaagtagccgattggttctatactccggtatacaccacgtgtgatctcacaccgtggggtcatcccttgcccttcaagtcaccacggataatgcggagcgcgattcagttcatttccaaccggtggccatactggaacaggacagagggagcagaccacttctttgtcgtgccacatgactttggcgcatgcttccactaccaggaagagaaggccatcgagcggggcgtccttccgttgcttcgccgtgctacactggtccagacttttgggcagaaggatcatgtctgcctgaaggaaggctccatcaccatcccgccatatgctcctcctcagaagatgaaaacccacctcgttcccccagggacccctaggtcgatcttcgtgtatttccgcggtttattctatgacactgcaaatgatcctgagggtggttactatgcaaggggcgcccgtgcatcagtctgggagaacttcaagaacaacccgctcttcgacatctcaacggaccacccacccacgtactacgaggacatgcagcgtgccgtcttctgcctgtgcccgctgggctgggccccgtggagcccccgtctggtggaggcggtggtgttcggctgcatcccggtgatcatcgccgacgacatcgtccttcccttcgcggacgcgatcccgtgggaggagatcggtgtcttcgtggccgaggacgacgtcccgaggctggacaccatcctgacgtccataccgatggaggtgatcctccggaagcagaggctgctcgcgaatccgtccatgaagcaggccatgctgttcccgcagcccgcccaggctggggacgccttccaccagatcctgaacgggctggcgcggaagctgccgcacggtgaggacgtgttcctcaagcccgggcagaaggtgctcaactggaccgagggcccccgcggcgacctgaagccatggtaggtgtactggaaaaaaacagcacaaccagatgggaagctgatcgacgacgaggacgatgagtactcccatgtcactgatgtaaatgtaaagcgtcttccagcccaccaggcactgtgcttcttcaggcgacgtgtctggtttgcttgtgttgtgtctgttctgaactttactttagcgttaacctattaacgatcggagatcatgtaatttatggctgttgtattctccctatagtatcaaggacatgtttgattagtttagtctagggactaaaatttagttaggagactaaagtttactccctactctatttagttgtagggactaaaaatattcagagcatattaaatgaatcataagaagaataaaatatcccttagcattctcgtgtaattagtgtaactgaaataaataacggacaaaaaaaaa

SEQ ID NO: 30913 - DNA, 1803 bp, Zea Mays
tcagcatgtgcggggcagcaattggacccgcacaacacacccttgcctgtcttggttctgcgtcaagccacccgccgcgtgcggtgcgggcaactctgccgtcagcgctgcgtgcgagcggagcgcatcagcagcaccagattcgacgcccgaattctccctcattggctcgccaccgccgcgcccttgactagcccgcctcatccaatctccctcctcggggtcagggtcctgacggcgacatcctaccgcacacgcagccgcagccgcagctgagaaacaaacagggctgggctgggcaggaggagagcagcggcgggcctgctcgagcgagcgagcgagcaaccagcaccagctccttagtcagcagcagcgacagggggtcggatcaggccgctctctctgctacactcgggcgcctccaccagcagcagcagcagcaggaggatcaaaaggccaatgggggcgcacgccaccgcggccgcggccgccgtcctgctcgtcgccacctgcgtcgcggcggcggcggcggcgccgctgcagcagcacgagcccggcaggatctcaggggacgcggtgggcgtgctggacgacgaccccgtggggaagctgaaggtgttcgtgtacgagatgccgcgcaagtacaacaggatgctgctggacaaggacagccggtgcctgcaccacatgttcgcggcggagatcttcatgcaccagttcctgctgtcgagcgcggtgcggacgctggacccggaggaggccgactggttctacacgcccgcgtacaccacctgcgacctcacgccgcagggcttcccgctgccgttccgggcgccgcggatcatgcgcagcgccatccgctacgtggccaccacgtggcccttctggaaccgcaccgacggcgccgaccacttcttcctcacgccgcacgacttcggcgcctgcttccactaccaggaggagcgcgccatggagcggggcatcctgccgctgctccgccgcgccacgctggtgcagacgttcggccagcgcacctcatcagccccggcacgccgcgctccatcttcgtctacttcaggggcctcttctacgacatgggcaacgaccccgagggcggctactacgccaggggcgctcgcgcgtcggtgtgggagaacttcaaggacaacccgctgttcgacatctcgacggagcacccgtcgacgtactacgaggacatgcagcgcgccatcttctgcctgtgcccgctggggtgggcgccctggagcccccggctggtggaggcggtggtgttcgggtgcatccccgtcatcatcgccgacgacatcgtgctgccgttcgcggacgccatcccctgggaggacatcagcgtgttcgtggcggagcgggacgtgccgcgcctcgactccatcctcacctccatcccgctgcccgacatcctgcggaggcagcgcctgctggcgcgggactccgtcaagcaggcgctgctgttccaccagcccgccaggcccggggacgccttccaccaggtgctcaacgggctggcgcggaagctgccgcacggcgagggcgtgttcctgcagcccggggagaaggcgctcgactgggacgccggactccagagcgacctcaagccctggtagtggactggactcgttgtacatctcttcgtgttcctttgtactctttcatttgacatgacatcgatggatggatggatcacgcattagtttttgtaccacggcccgtttacatgcagcagcaatatactaatatatagtgtattttccctgctctccacta

SEQ ID NO: 30914 - DNA, 657 bp, Zea Mays
aaacctcgcaacaaccccgtgacacccacacccatccgccctgcccctcctcgcgctccccaccaaccccgacgagcggcgatgaccggcacggtgtccaagctggcgggcgccccggcctgcggcgccaccgctccggccggcgtccctccgcgccgccgcaatcgccttcgccccctccccgcgccgggtgggaggcgttggccaagaaaggtgccaagaaacagaggttgttgtgggcatccacccggtgtcaagaacccagcttatcccgacactctttacatcgacagtctcattggacctgacacggtcaacacgatgcccgaccaagctttgcacgcattcatagaccacggcactgtctcgaggacagttgatgcgaatgtgtccgaggcggaaggtgtatacagcgccttggagaagcttggcattgactggggcgaggtcggaaagcagcttgagctggaaggtgtggactccttcaagaagagctttgacagcctactcgtgagcctacaggagaagggcaacagcctcaagacggcaactgtgtaaaactgagaagattgggtaccggcgggcttgcctggccgtcattgtgtgaccaacgttcatggcttgtacaagggatcggacgtaaacggttggaaaaca

SEQ ID NO: 30915 - DNA, 523 bp, Zea Mays
aaggctgccgttggcacaggcccaactagcaaatcgggtctaccagaagaaattctctggcccgaggtgggaggcgttggccaagaaaggtgccaagaaacagaggttgttgtgggcatccacccggtgtcaagaacccagcttatcccgacactctttacatcgacagtctcattggacctgacacggtcaacacgatgcccgaccaagctttgcacgcattcatagaccacggcactgtctcgaggacagttgatgcgaatgtgtccgaggcggaaggtgtatacagcgccttggagaagcttggcattgactggggcgaggtcggaaagcagcttgagctggaaggtgtggactccttcaagaagagctttgacagcctactcgtgagcctacaggagaagggcaacagcctcaagacggcaactgtgtaaaactgagaagattgggcttgcctggccgtcattgtgtgaccaacgttcatggcttgtacaagggatcggacgtaaacggttggaaaaca

SEQ ID NO: 30916 - DNA, 2938 bp, Zea Mays
cgagaaggcagttagccaggagccagggcccaggaggccagaagccgcacacgcggtcacgcggaccgcggacgactgccgccgccgtcgtcgtcgattggctcttctgctctccatcccgacacatcgcgccgcttcaagctaaagtgccactgcgccaccatccatcccggcatctcgcgccgtttcagtctcaagagcagatacgcaggtatggagccacgcactgagggagatgcttccaggaacttgcgccaaggtcgattgctagagccgccaccggtacctgctgtgaggacttctccagaaggagtgcagaggcacacaggtcaggatgtgattgctagtagaagtcaaagtgcagcagcatctgagacgggctcttctttgccatgtgaagatggaaatgcaacggctgaaactattggcagcagcacccatcctgtgcacattggtgtgcaaaaccaagacattgaacaagagcaagttcatgagactggaaagagatacaagaggttgacatctgatgtatggaattactttaccaagaaaaaagagataatagaggagaatgggaagaagcgtgagcaaatttggggttattgcaacttcccaaattgtaagcggcgatatagagcagagggccgccaaggtacaactgcatttaagaatcatttgaggtccgcacacagcatagttcgaggccaacaacaacttaaatttgagaaggaccttggtaataacattacccatatccagcctttcatgtatgatcaagaagttagcgtgaagaaacttatcatggcaataattatgcatgattatcctttcaatatagtagagcatggatatttcgttgatttcattaaatcacttcatcctagctttccaatcaagagttgtaatgctgttggtaaagaagtaatggatacatatttggaagagaaggagaaattatatgcacatttaaaaactgtgcattgtcgctttagtgtaaccatggatatgtggacatcatgctcgaataaatcatacatgtgtgttactgttcattggataaatgatgattggtgtattcagaagaggattattggtttcttcaatgtcaaaggacgacacactggtaaaaagttgtcagagacctttactgaagctatggttagatggaatcttgataagaagctattttccttgaccttggataatgctagtgcgaatgaattggcagtcaaagatataatttcagatctaaaagatggccaggcttccttagtttgtgatggtctgttttttcatgtaagatgtgcatgtcatatactaaatttagttgctagagatggcctgaaagtaatttcgaaaacaattgacaagatcaaagctcttgtactagctgtgaagggatctccattgcagtggaaggaacttatgaagtgtgctagcgagtcagaattagatacaaagaggggcatctcacttgatgtttcagcaagatggaattcaacttatttaatgctgcgggatgccttgtactacaaggatgcttttgcaaggcttaagtcttcaaatcgtcatatgtatgtaaaaaattatccatctccggatgagtgggacatggcactaaaaatctttcaatgcttgaaaaaagtttatagtctcgctgaaattctctctggcacttcatatccaacagcaaacttgttctatagaggtttttgtgacataaaagtattgctagatgactggtgttctagtgatgatgccaccatcagtgaaatggcaattgccatgagtcaaaaaattgagaaatattgggaacattctaacttggctcttgctgtggcatgctttcttgatcctcgatacaagaaaaaagttatagagtattacatgaagaaattccacggtgatgggtaccatgtggaacttgaaaaaattgttaatgtggtaagagggctctattgtttttattctagctctacacctgcaccagcaaagagtacatcaccggaaccagctaatagtgcatcagatattttaatggcaagtgtatctgatgaactggacagttttctgtatggtacaaatgaacctactctagttcggtccaatgagttggaaaagtacatggcagatccacttttgcgtcttggtggtccatttgatggcccatttgatattttagcgtggtggaagagcaagagggaagtgtatcctattctttcacaaattgttcgagatgtgatggccatacaagtatcaacggttgcatctgaatctgtttttaatgctgctggccgttttgttgatccttatcgtaatcgtcttgagccggagatggtagaggcattgatatgcaccaaagattggatagctgcagaaagaaaagattctaagattgttggttcaattgtgagtgaccttgaaattgagactttatctaccgtcatggctaacaaaataagagctgtggatgacaaggacatagaatggaaggaccaggagcatgatggtgagaacgaatatattgatagtgatcttgatgttatggatgaccacaatgaactttgagctatagctgtaggcttctagtttcagcttaatgtctactgcctttgagttactatgttatgtgtcttgggacttttataaactattatcgtgattgtgcatttgtgggtgtctgcttaattaattagacattgatgttgacttgttatatactccgtccgtcccaaaatatagctgtttctagtctactttttttgtccatatttattcaaatgataataaatatagacatatatgcaaactgtattcatatgttacttaatggatgcataattactcatgaattatatttatatttatgggacgggtggagtatttttttatagacctattatcaaaagtacgtgagtttatcagctcgttcttgttt

SEQ ID NO: 30917 - DNA, 2930 bp, Zea Mays
gttagccaggagccagggcccaggaggccagaagccgcacacgcggtcacgcggaccgcggacgactgccgccgccgtcgtcgtcgattggctcttctgctctccatcccgacacatcgcgccgcttcaagctaaagtgccactgcgccaccatccatcccggcatctcgcgccgtttcagtctcaagagcagatacgcaggtatggagccacgcactgagggagatgcttccaggaacttgcgccaaggtcgattgctagagccgccaccggtacctgctgtgaggacttctccagaaggagtgcagaggcacacaggtcaggatgtgattgctagtagaagtcaaagtgcagcagcatctgagacgggctcttctttgccatgtgaagatggaaatgcaacggctgaaactattggcagcagcacccatcctgtgcacattggtgtgcaaaaccaagacattgaacaagagcaagttcatgagactggaaagagatacaagaggttgacatctgatgtatggaattactttaccaagaaaaaagagataatagaggagaatgggaagaagcgtgagcaaatttggggttattgcaacttcccaaattgtaagcggcgatatagagcagagggccgccaaggtacaactgcatttaagaatcatttgaggtccgcacacagcatagttcgaggccaacaacaacttaaatttgagaaggaccttggtaataacattacccatatccagcctttcatgtatgatcaagaagttagcgtgaagaaacttatcatggcaataattatgcatgattatcctttcaatatagtagagcatggatatttcgttgatttcattaaatcacttcatcctagctttccaatcaagagttgtaatgctgttggtaaagaagtaatggatacatatttggaagagaaggagaaattatatgcacatttaaaaactgtgcattgtcgctttagtgtaaccatggatatgtggacatcatgctcgaataaatcatacatgtgtgttactgttcattggataaatgatgattggtgtattcagaagaggattattggtttcttcaatgtcaaaggacgacacactggtaaaaagttgtcagagacctttactgaagctatggttagatggaatcttgataagaagctattttccttgaccttggataatgctagtgcgaatgaattggcagtcaaagatataatttcagatctaaaagatggccaggcttccttagtttgtgatggtctgttttttcatgtaagatgtgcatgtcatatactaaatttagttgctagagatggcctgaaagtaatttcgaaaacaattgacaagatcaaagctcttgtactagctgtgaagggatctccattgcagtggaaggaacttatgaagtgtgctagcgagtcagaattagatacaaagaggggcatctcacttgatgtttcagcaagatggaattcaacttatttaatgctgcgggatgccttgtactacaaggatgcttttgcaaggcttaagtcttcaaatcgtcatatgtatgtaaaaaattatccatctccggatgagtgggacatggcactaaaaatctttcaatgcttgaaaaaagtttatagtctcgctgaaattctctctggcacttcatatccaacagcaaacttgttctatagaggtttttgtgacataaaagtattgctagatgactggtgttctagtgatgatgccaccatcagtgaaatggcaattgccatgagtcaaaaaattgagaaatattgggaacattctaacttggctcttgctgtggcatgctttcttgatcctcgatacaagaaaaaagttatagagtattacatgaagaaattccacggtgatgggtaccatgtggaacttgaaaaaattgttaatgtggtaagagggctctattgtttttattctagctctacacctgcaccagcaaagagtacatcaccggaaccagctaatagtgcatcagatattttaatggcaagtgtatctgatgaactggacagttttctgtatggtacaaatgaacctactctagttcggtccaatgagttggaaaagtacatggcagatccacttttgcgtcttggtggtccatttgatggcccatttgatattttagcgtggtggaagagcaagagggaagtgtatcctattctttcacaaattgttcgagatgtgatggccatacaagtatcaacggttgcatctgaatctgtttttaatgctgctggccgttttgttgatccttatcgtaatcgtcttgagccggagatggtagaggcattgatatgcaccaaagattggatagctgcagaaagaaaagagattctaagattgttggttcaattgtgagtgaccttgaaattgagactttatctaccgtcatggctaacaaaataagagctgtggatgacaaggacatagaatggaaggaccaggagcatgatggtgagaacgaatatattgatagtgatcttgatgttatggatgaccacaatgaactttgagctatagctgtaggcttctagtttcagcttaatgtctactgcctttgagttactatgttatgtgtcttgggacttttataaactattatcgtgattgtgcatttgtgggtgtctgcttaattaattagacattgatgttgacttgttatatactccgtccgtcccaaaatatagctgtttctagtctactttttttgtccatatttattcaaatgataataaatatagacatatatgcaaactgtattcatatgttacttaatggatgcataattactcatgaattatatttatatttatgggacgggtggagtatttttttatagacctattatcaaaagtacgtgagtttatcagctcgttcttgttt

SEQ ID NO: 30918 - DNA, 2759 bp, Zea Mays
cagaagccgcacacgcggtcacgcggaccgcggacgactgccgccgccgtcgtcgtcgattggctcgaacttgcgccaaggtcgattgctagagccgccaccggtacctgctgtgaggacttctccagaaggagtgcagaggcacacaggtcaggatgtgattgctagtagaagtcaaagtgcagcagcatctgagacgggctcttctttgccatgtgaagatggaaatgcaacggctgaaactattggcagcagcacccatcctgtgcacattggtgtgcaaaaccaagacattgaacaagagcaagttcatgagactggaaagagatacaagaggttgacatctgatgtatggaattactttaccaagaaaaaagagataatagaggagaatgggaagaagcgtgagcaaatttggggttattgcaacttcccaaattgtaagcggcgatatagagcagagggccgccaaggtacaactgcatttaagaatcatttgaggtccgcacacagcatagttcgaggccaacaacaacttaaatttgagaaggaccttggtaataacattacccatatccagcctttcatgtatgatcaagaagttagcgtgaagaaacttatcatggcaataattatgcatgattatcctttcaatatagtagagcatggatatttcgttgatttcattaaatcacttcatcctagctttccaatcaagagttgtaatgctgttggtaaagaagtaatggatacatatttggaagagaaggagaaattatatgcacatttaaaaactgtgcattgtcgctttagtgtaaccatggatatgtggacatcatgctcgaataaatcatacatgtgtgttactgttcattggataaatgatgattggtgtattcagaagaggattattggtttcttcaatgtcaaaggacgacacactggtaaaaagttgtcagagacctttactgaagctatggttagatggaatcttgataagaagctattttccttgaccttggataatgctagtgcgaatgaattggcagtcaaagatataatttcagatctaaaagatggccaggcttccttagtttgtgatggtctgttttttcatgtaagatgtgcatgtcatatactaaatttagttgctagagatggcctgaaagtaatttcgaaaacaattgacaagatcaaagctcttgtactagctgtgaagggatctccattgcagtggaaggaacttatgaagtgtgctagcgagtcagaattagatacaaagaggggcatctcacttgatgtttcagcaagatggaattcaacttatttaatgctgcgggatgccttgtactacaaggatgcttttgcaaggcttaagtcttcaaatcgtcatatgtatgtaaaaaattatccatctccggatgagtgggacatggcactaaaaatctttcaatgcttgaaaaaagtttatagtctcgctgaaattctctctggcacttcatatccaacagcaaacttgttctatagaggtttttgtgacataaaagtattgctagatgactggtgttctagtgatgatgccaccatcagtgaaatggcaattgccatgagtcaaaaaattgagaaatattgggaacattctaacttggctcttgctgtggcatgctttcttgatcctcgatacaagaaaaaagttatagagtattacatgaagaaattccacggtgatgggtaccatgtggaacttgaaaaaattgttaatgtggtaagagggctctattgtttttattctagctctacacctgcaccagcaaagagtacatcaccggaaccagctaatagtgcatcagatattttaatggcaagtgtatctgatgaactggacagttttctgtatggtacaaatgaacctactctagttcggtccaatgagttggaaaagtacatggcagatccacttttgcgtcttggtggtccatttgatggcccatttgatattttagcgtggtggaagagcaagagggaagtgtatcctattctttcacaaattgttcgagatgtgatggccatacaagtatcaacggttgcatctgaatctgtttttaatgctgctggccgttttgttgatccttatcgtaatcgtcttgagccggagatggtagaggcattgatatgcaccaaagattggatagctgcagaaagaaaagattctaagattgttggttcaattgtgagtgaccttgaaattgagactttatctaccgtcatggctaacaaaataagagctgtggatgacaaggacatagaatggaaggaccaggagcatgatggtgagaacgaatatattgatagtgatcttgatgttatggatgaccacaatgaactttgagctatagctgtaggcttctagtttcagcttaatgtctactgcctttgagttactatgttatgtgtcttgggacttttataaactattatcgtgattgtgcatttgtgggtgtctgcttaattaattagacattgatgttgacttgttatatactccgtccgtcccaaaatatagctgtttctagtctactttttttgtccatatttattcaaatgataataaatatagacatatatgcaaactgtattcatatgttacttaatggatgcataattactcatgaattatatttatatttatgggacgggtggagtatttttttatagacctattatcaaaagtacgtgagtttatcagctcgttcttgttt

SEQ ID NO: 30919 - DNA, 2793 bp, Zea Mays
cagaagccgcacacgcggtcacgcggaccgcggacgactgccgccgccgtcgtcgtcgattggctcgtatggagccacgcactgagggagatgcttccaggaacttgcgccaaggtcgattgctagagccgccaccggtacctgctgtgaggacttctccagaaggagtgcagaggcacacaggtcaggatgtgattgctagtagaagtcaaagtgcagcagcatctgagacgggctcttctttgccatgtgaagatggaaatgcaacggctgaaactattggcagcagcacccatcctgtgcacattggtgtgcaaaaccaagacattgaacaagagcaagttcatgagactggaaagagatacaagaggttgacatctgatgtatggaattactttaccaagaaaaaagagataatagaggagaatgggaagaagcgtgagcaaatttggggttattgcaacttcccaaattgtaagcggcgatatagagcagagggccgccaaggtacaactgcatttaagaatcatttgaggtccgcacacagcatagttcgaggccaacaacaacttaaatttgagaaggaccttggtaataacattacccatatccagcctttcatgtatgatcaagaagttagcgtgaagaaacttatcatggcaataattatgcatgattatcctttcaatatagtagagcatggatatttcgttgatttcattaaatcacttcatcctagctttccaatcaagagttgtaatgctgttggtaaagaagtaatggatacatatttggaagagaaggagaaattatatgcacatttaaaaactgtgcattgtcgctttagtgtaaccatggatatgtggacatcatgctcgaataaatcatacatgtgtgttactgttcattggataaatgatgattggtgtattcagaagaggattattggtttcttcaatgtcaaaggacgacacactggtaaaaagttgtcagagacctttactgaagctatggttagatggaatcttgataagaagctattttccttgaccttggataatgctagtgcgaatgaattggcagtcaaagatataatttcagatctaaaagatggccaggcttccttagtttgtgatggtctgttttttcatgtaagatgtgcatgtcatatactaaatttagttgctagagatggcctgaaagtaatttcgaaaacaattgacaagatcaaagctcttgtactagctgtgaagggatctccattgcagtggaaggaacttatgaagtgtgctagcgagtcagaattagatacaaagaggggcatctcacttgatgtttcagcaagatggaattcaacttatttaatgctgcgggatgccttgtactacaaggatgcttttgcaaggcttaagtcttcaaatcgtcatatgtatgtaaaaaattatccatctccggatgagtgggacatggcactaaaaatctttcaatgcttgaaaaaagtttatagtctcgctgaaattctctctggcacttcatatccaacagcaaacttgttctatagaggtttttgtgacataaaagtattgctagatgactggtgttctagtgatgatgccaccatcagtgaaatggcaattgccatgagtcaaaaaattgagaaatattgggaacattctaacttggctcttgctgtggcatgctttcttgatcctcgatacaagaaaaaagttatagagtattacatgaagaaattccacggtgatgggtaccatgtggaacttgaaaaaattgttaatgtggtaagagggctctattgtttttattctagctctacacctgcaccagcaaagagtacatcaccggaaccagctaatagtgcatcagatattttaatggcaagtgtatctgatgaactggacagttttctgtatggtacaaatgaacctactctagttcggtccaatgagttggaaaagtacatggcagatccacttttgcgtcttggtggtccatttgatggcccatttgatattttagcgtggtggaagagcaagagggaagtgtatcctattctttcacaaattgttcgagatgtgatggccatacaagtatcaacggttgcatctgaatctgtttttaatgctgctggccgttttgttgatccttatcgtaatcgtcttgagccggagatggtagaggcattgatatgcaccaaagattggatagctgcagaaagaaaagattctaagattgttggttcaattgtgagtgaccttgaaattgagactttatctaccgtcatggctaacaaaataagagctgtggatgacaaggacatagaatggaaggaccaggagcatgatggtgagaacgaatatattgatagtgatcttgatgttatggatgaccacaatgaactttgagctatagctgtaggcttctagtttcagcttaatgtctactgcctttgagttactatgttatgtgtcttgggacttttataaactattatcgtgattgtgcatttgtgggtgtctgcttaattaattagacattgatgttgacttgttatatactccgtccgtcccaaaatatagctgtttctagtctactttttttgtccatatttattcaaatgataataaatatagacatatatgcaaactgtattcatatgttacttaatggatgcataattactcatgaattatatttatatttatgggacgggtggagtatttttttatagacctattatcaaaagtacgtgagtttatcagctcgttcttgttt

SEQ ID NO: 30920 - DNA, 8302 bp, Zea Mays
gtagtgcaagagaaacttagaaagggaaagaacaaacaaatcacaagcaataagcacacgagacacgggtgatttgttttaccgaggttcggccctcaaaggcctagtccccgttgaggagtccacttaaggacgggtctttttcaaccctttccctctctccaccgatcacacaaggatcggcgagctcttcttcttttcaaggatcactcttgatcccacaaggaccaccacactctttggtgtctcttgctagcttttacaagcctccaacactttggaggaagttcaatgggagtcaaaactccacgcacaaatgaacacaaagatgtagtacacactatctctcaatgaatctcacaaggcactagtgctaaactcaaatgagtagctctcttttgcttactctctcttttgtggcacttgtgttggttgtagtgatctaaatcttgtgtataggatggatcaatgaatatatttggttgggagggcttgagtatgtcaactagatgacttggaatgttgcttgggctccccctctttgaagtggccggttggggtggtatttatagccaccaaccaaaatctagccgatggtgaagtgtgctggcgaggggcgcaccggacagtgtccggtgcgccgccacgtcatcctgccgttaggtcttggagctggtcgaccgttggaggctctgtcctcatgtggcaccagacagtccggtgtcgcaccggacagtccggtgcccctctgaccgctgctctgacttctgcgcagtactgttcactttgcagagtcgaccgttgcgcgcagatagccgttgctccgctggtgcaccagacagtccggtgaattatagcggagatgcgcctgagaaacccgaaggtgaagagttcgagcagaagcaccctggtgcaccggatactgcccggtggcacaccggactgtccggtgcgctaagccagggcaaccttcggttccctttttgctccttccttttgagacctaacttgttcttttgattggtttgtgttgaacctttggcacctgtagaatgtataatcttgaacaaattagttagtccaattatttgtgttgggcaattcaaccaccaaaatcaattaggaaaaggtttgaccctatttccctttcaatctccccctttttggtgattgatgccaacacaaaccaaagcaaatatataagtgcataattgaactagtttgcataatatatgtgcaaagattgcttggaattaaaccaatttatcattttataagatttgcatgaatgcattctttatatttaatgttttagaccatgcttgcaccaattgttttgtttttgcaaactcttttggaaattcttttcaaagtgttttgcaaaatagtcaaaggtaagtgaataagatttttgcgaagcattttcaaaatttgaaattttctccccctgtttcaaatgcttttcctttgactacacaaaactccccctaaatgaaattctcctcttagtgttcaagagggttttgatatatcaatttttgaaatactactttactcccccttttgaacacaataagatactaatttgaaatttatcatttgagaatactaccaattgaaaaactctctttaaaattaggtggtggtgcggtccttttgctttgggcctaatactttctccccctttggcatgaatcgccaaaaacggatactttgcgtgaaatataagcccttttactttctctccccctttggcaaataatatatgagtgaagattgtaccaaatttgaagagacggcggaataccggcagagagtggataataccaatggagttgagtggaagcgatgtctttgccgaatacgccatttccctttcaatctaagacttaatacatgagatgctcatgaaaacatattagtcttagccttggcataaatagagagaagaaatatgaaaatgtaccaagggaaagagacatgattaaaaaggatatgtcaattaagcttaaacaattctatacaatatagattgctccccctaaatatgtgcatagagagaaaaacaaatttttggtctaaaatgccaagtgcacataattaggttaatgagatcatatctatatcataaagagtgtacagtgcattgtgccaaggtataggtgtgatgctcatgacagtttatgcacatacgaaagcatgctgtgaatatctcaagtattttcccttaaggatttcaaagaggcttaaggaccatccacctttggaacaaaggcagcttatcctcgttacaaagttaagctttaagctctttgacaataaaatcacttcatccagtttaaacaaagatgcaagaatgaatgtttgagaagttaaactaggtatgaagcagggttaatgcatgaacatgctttctcttccttttaaacatgatatgcaagtaatgtaggaagatttaggtacatgtataaataagattaaatagatttacccttttgtaccttgacatagtgatgctcttcttcattgtgctttgtccttagtcttattaaattcgcctaagacttatactcaagacaatgtatgaaaatattttgcacaagagagggttctacaactagtgatccttttctaaatcatgttattatatatcaagtagatcacaaattgcataaatatatcatgaattctccttttaacttagtgcctatcaagatagatatcgattgaaattaccaattgaaatcaatttgagattacatgaggcactaagaagcataagtgataattgaagttattcaatgatcaaacaacagatgcgatcaaaagaacatcataggcattatattttcaatcaagctcaaaaataggagaatccaataaatatgctactttaacattgaaagctacaatccttgataaagatgacattattttaccaagatggattgaaatgtagtagcatgccttatgagaaacttgttctcatataagagactatatgagattactaagataacgtgctagtctcaatataatcaagatatagaaatagactccccctaaagatatgcattaagaatgaaagaaatgggtggatgcactctttttcaaaggcaaaatatggagaagcactatttatcttgatcaaggcttaaaagatttgcaataaacaatttttgcctagttttctcataatgaaaagatttagaatgattacaaccacaccgttgaatgttttgaagatctcattatccaagtaggtgttgttgctcttgatgtcttcctttttcatttgagtgtcctcccttagggctgggcattttaaacccgtgaaccgaacccgaaccgaaccctaacccgaatagaccgatttggtcggtttttcgggtttcggttttcgggttcggtccaaagatcgtttctattcggttatcgggtaagggttcgggttttatagcgtgtaacccgaatagactaaaaaaaccgaaatatacctacgtaggctacacacagcaatcagcccaataaaaaatagctgacggcccagtccgcccaggcttcctgagacttgagtccacagccgccactccgaccggcgaccaggcaaccctagagctagacgctccccgtccggccgccgcctagagctactcgctcgtcgctcctgcgtccggctcgtcgctcctgcgtccggcgtccactgctccccatccggtgttccactccatttctccactgctccccgtccggactccagagttctgctcctgcgtctagcttcggttctccactgctccccggtcggccggtgttctgctcctgcgtccgctgcagctccggcgtccactgctccccgtccaggctccccgtccgattctccactgctcaccgtccaggctcccagtccgctgcagctccggcgtgccactccctcgctgcaagctccggccacattttttaagttaatttgtgcagtattgtgtgaatttgtttctaagttaatttgttatgaactttgtatggacctatgtgcagtattgtatggtattaatttgtgtgaatttgctgagtatttgtacctgattgtgttattcgggttctgtaggaaccgaatagaccgaaccgaatttttcggtctatttgggttcggttcctgtaattttgggttcgggttcggttcctattttatataacccgatttttgtagaaccctaataaaccgaaccgaattacccatattacccgaatgcccagccctatcctccctttatagtcgaccctttttcctttcaaacttattgaaaatacttaagagagatgttaatagcaccagggagtaaatgatgaatgatggtttctttagatagaaaataagaacaattcatcatccatatacataaacatgaagtaaacttcttaacattagtgcacatcaaaagaaatatgcactctctaaacattttgatcaatcacaggaaatttacttcttcatattgaatttattaatcattacttggaagcaaatcaatatgagaacaaatatagcaaaggtatgaaatatattctaatggataagtgcattaatgagaatgagattgaatgcacattttagccaattaagttcaataaagaatctatttcttcacaaagatataattagagtgaacaatcattgatgggaactaaattaaagagatgagttctcatacctttgctttgaccttttcttccttttgggtgaagagtaccctttgaggcttgtggctttaaccttgcacttactctcttgtagattttcataagtaggctcaagagaaatgttaatagcaacacaagcactagtttccctttttgtaatcatttttgataaggaatgaaaagtgaattactaaagcatggaaactttataatatgaactagattatccctttaagtatgcttagttttaacttatggaacaagcatagttagttcttttaagattatggggaaaaaatctaattcataacatgaagagcgataaatgtagaagaatcatatctgtggcagaacctcccaagttattgggcccacatgcacctgtccttgtctcaaagacctcagacgactatgcatgtgcaccaaataacttaacaggatccgtccgattgacccaaggacatcggataaaccacttacaaccagaaccgcgggattaagtaacacaaatcacacacacaacatttttgcagcggaaatcttattaccaaattttacaggttacaaaaattttacattattttatcggagtgattacaaaagtataagtttgaaatatatgctagctcaagtgatcatcctcaataagaagataaagacggggtatacttatataagaaggccgagcccaccggcacttaacaccatcacaacagcacaaggttagaacctgaaaaacaacagggaataaaaccctgagtatggaattactcagcaagtcttacccgactaaggaaaagactctcaagggtatgctggataaataggaatcaaggagaggctttagcaagaatcaacttagatacttttgcagaaatagcttactaaagtgagtccttactttcaatcttttaacgccatattaagtattaatagactctatttgtatctagtctaatttcaacatctcatcaatacaacatcatttttatctatagtgttcacatcctgactttaggttgtagaaaagtgaccaagtcttcataaccgcgaaggtacgtcgatctgaatcgattatactcagctgaggatctccaatcacacgacatatgtagcacttaacccttgcatatgtcaacccgccaccggggttcttaagaccagatcaggttcacgcaaaccgagagcacagatacaccaccgaccggcctcttgccacggagggtacatgctactctcgccaccgctccacgcccatttcatgttatcttattctggccttagtctgcccgaggcaaggcttacccatgacgaggcatgtgaccagttaaagggtcctcggtcagcatgcctacatacacattaatccttaaccaacctgggtagaacatcacctgttcctaacccaagtctcaatttaagtctttccatccttaggattgtgtctgttccttaggatgaaagagcatcacagggaactttgcagtaagatcccactattgctccaaatgaaaatattcttgcaggtagaagccatcctctcccgggttagactgaggacaacctctatccacaagatctaagcaaggctaagcatttttgtaaatcatattttgatacttcacagaagtatctataaaggtatggatatcaaggaaagcaatgcatcaaagggttccaagcaattcctatgaacataatgcacatttcactagacttaaagtgtgcgaaaagtatttaaaaacacaaggaaaggggttgcatgcaccggggcttgcctgagtaacactaggttagtgtttgttaggcgaccacttggcgagtatcctttggcttggcactcattcagattatccatcttccggttcatccatcagtgcggagtagtccgtgcttagggtcaacttggcttgtcttccgcatcgcgcgattatttatcgtacctcatgagatgcatgatgcacatgtatgagcacgagtataatatatataatctacactaaaaaggatgaaacacttaaaaccaaacattaagcaccatggatatcacaacagggcatcgactacatccattgacataataacactagaatatctatttttattcctagctttttattaactctttaaactgtgtatcttaattacttgatttacctatttatctaaatcgaacatcacaatatgcgtatactaaattaataacaatcatcgcgactaataattctattaatctatttatagatctagttgacagaaaaacgaatcaacttaccctgactaattcgacgcgatagtcgcaagcacgactacgggttccggttgacgtcacccaggggctttcttttcttcgataatcaattgctgaagatcttttcctcgactgaataattttgacgaatcgaacttgagtcgcagaggatgtccgagctttttgtcgcgcacttggtgaacaccatgctgctggctccgtcttcacccgattcttggggtttcttggtgacttgcggacgacgagatcgtgtttagagcgagctggcgaggtgggggttgagcaagggatgacgggttcgacgactcgacggcaaacgacaagcacacgcgaagcccgatggatgaggagcgaacgcacggatgggtcgaaccgggactagaggacaacgaacgacggcgaatgacgaagtcgacgacgcaattgagaattaaagccgagcgagccgagagggcgcactggtatggcaagcaggaaacaggacgcgacaacagagctgggcgagctcaaccaccagagaacaagacgcgacggcggattcgcgcgcgcagaaagcggaagaccaattcgagctggggccgaacagaagaactccggcgttcatggcagacagaggaaaattagagcagggagttggccgggcaccataggagcagctgagagcaggcgcgccatggcgaactgcacggccgcgagctcggctgaagagttgggaggtcgcgtgcgtgcagcagagaagccaggggcgagcagtaaggcgacggcgcggtgagcatcagggaaacggacgagcggctaccatgggagggactccgagtaggggaccagagaccttcacggcgcgcggccaggatcccggcacgcgacccgcagaagaactcgcgcgcgtgacaggggagagaggagcggctgcgcgcggctggaagaagagcgcggctgcgcgctactggaaagacggcgcgcgcagggaagataagcacgacgcgcggctgaaaaaaatcaggagcagcggcagataaggccaggcctgtgattgagcgagcatagacaaatcgatggccggagaaaatcaagcagaagctacgtacgaagagataagaagaggagcctagacggtggaggataaagatccgagcggcttcaagaaaatctcagggagacggtaccatgggagatttataggcacgagctaggagggacacggtggagcagggaactggggaagatgcagcccggcgaggatgaagacgaggaggtgaactgcaccagcgcggcgagaaaagatcaggacggcaacaaaaatctgtgcgcgagagaaatcagtccggg

SEQ ID NO: 30921 - DNA, 3585 bp, Zea Mays
ggccttgaaactgtcgacgatacctgtcatcgtaagcaacagaacccaaacctcgccgattcgctccccttcctcaccgcgcgcgtacgccgccgccgcgctcacctcaccgaaccctaaacctgagccaccgccctcccccggaggtccgccgctccgtgtgggactctaggcgtcgccggagccccctccaggggctagcggcggaggaagtcggaaaccgattacccctcccctccccttaccgggggagggagaaactagcggaggaggcgaatcaggtcagagtggggcacgatgaggatcatgatcaagggaggcgtgtggaagaacacggaggacgagatcctcaaggcggccgtgatgaagtacggcaagaaccagtgggcgcgcatctcgtcgctgctcgtccgcaagtccgccaagcagtgcaaggcccgctggtatgagtggctcgatccgtccatcaagaagaccgagtggacaagggaggaggatgagaaattacttcatcttgctaaactcatgcctactcagtggaggacaattgcacctattgtaggtcgaacaccatctcagtgtcttgaacgttatgaaaagctgcttgacgccgcatgtgcaaaggatgaaaattatgaggctaatgatgatcctaggaagctgcggcctggcgagattgacccaaaccctgagtcaaagcccgcacgtcctgatcctgttgatatggatgaagatgaaaaagaaatgctttctgaggctagggcccgcttagctaacactaggggtaaaaaggccaaacggaaggcaagggagaaacaacttgaagaagcaagaaggcttgcttcactacaaaaaaggagagaattgaaggcagctggtattgatacacgccacagaaaaagaaagagaaaggggattgactacaatgctgagattccatttgaaaagagaccaccttcaggtttttatgatactgttggtgaagacagaccacctgaacatgtacagtttccaacaaccattgaggagcttgaagggaagagaagagcagatatagaggcacaattaagaaaacaggatattgccaggaacaagatcctgcagcgacaggatgcccctgctgctataatgcaagcgaataaactaaatgatccagaagctgtcacaaagaggtcaaagctaatgctgccgcctcctcaaatttctgaccacgagctagaggagatagcaaagatgggcagtgctggtgatcctgctttagctgatgagcttggtgaaggaagcactgccacaagaaccttgcttgccagctattctcagactccaaggcttggtatgacaccattgcgaactccgcagcgaactccagctgggaagggtgatgcaatcatgatggaggcagaaaatcttgcacgtctcagagaatcacaaacacctctattaggaggtgataacccagagcttcatccatcagatttctctggtgttacaccacgcaagaaggagatacagactccaaatccaatggcaacacctttagcaagccctggccctggtattactccaaggattagtatgacaccatccagagaggggcacagctttggtttaacaccgaaagcaactcctcttcgtgatgaacttaacataaatgaagtggaaatgcaggacaacactaaacttgagcttcgtaggcaagccgaactgaggaaaagcctgcgatctggttttgcttctattccacaaccaaagaatgagtaccagatagtcatgccacctattacggaagatgagaaagaagaagctgaagagaaaattgaagaggacatgtcagacagactggcacgagaaagggctgaggaacaagctaggcatgaggcattgctcagaaagagatccaaagtgttgcagaggagtctgcctaggccaccggctgtttcagtagagattatccggcaatctcttattagaagtggagaaagcagaagcagaagcacctttatgcctcctacatcacttgaacaagctgatgaactaataaatgaggaactccttaggcttcttgagcatgataatgcaaaatatcctcttgatgaaaaaactcaaaaagagaaaaagaaaggaagcaagcgtcagcaaaatggaggacctcttgtccctgaaattgatgattttgatgaagatgaactaaaagaggctagctctatggttgaagaggagattcaataccttcgagtggccatgggtcatgaaaatgaatcttttgaggacttcgtgaaagcacatgatgcatgccaagacgaccttatgttttttcctaccagcaatagctatggtttagctagtgtggctggaaatgctgataagatttctgctttgcaaaatgagtttgaaactgtgaagaagcgaatggatgatgaagctaagaaggcttctcggcttgagcagaagattaagcttctgacacaaggatatcagagcatgctttcaacctgatcaagatcattcccaagagagccttgaaactgaatcgctaaacaagtttatcaaaatgcatggcatgccctcctgtaaaatcctagatacgggctggaaaactgtggtcacaggtccaagatacattcaagcagatggacactgccgcaacagagctcgaatgcttccaagagctgcagaaacaggaacatctcgctgcttcatatcgaatccaaaatttgtctgaagaagtgagtaaacagaaggcactagaaaggaccctccagagccgctacggcgagctggtttctggtttccagaggatccaagaacaggtcgaggagcacaagaggcaactcaaggtacaagaggcggtagaagccgaaagtcacgctcaggaagaggaagctgcggcatcaaatcatgctgctgctgaggaagaggatgaaaggaaggaagatgatgaaaggaaggaagaggatggaaggaagtctctcagctctgaagagaaaccacagcagacaagtacggctaccgatgaagaacctgcaggaagcaaaggaaccaccgaggatcagatggacgtggacagcgggaatggagagggtggagttgtaggccctgtcccaccagcaccagacactgaagggggtaatgatgaagtatcagttcaagagatcagtgaagcccagcccttgccttgaagacggcgctcctttcccttcaagctccgctttcttctcccgcacctggcgatcttcacgatgttgttgttgcacagcaggtccggactgagtatttcctatttggttatatttttagtgcactataatatcgcaagcgaagctacaattggttgtgagctaaatttgcatatccttccctttgttgtattcccttgaacaatgaatcagaacaactgtttaccatttttctaaaggatcgacggcttatgtactcatgcagaactgcctcattgtgcctctggctgaatagcagccaagtaagcgtgacatgctctttgttcatttagtatggtccacaatgctttatggaaacattggtgtacgaaatttctaaccagctgttttccaataaaaagtccacttg

SEQ ID NO: 30922 - DNA, 1795 bp, Zea Mays
ataatggcaaatttctcgtccccagcaaagtccctccattcggtctcatctcccatctctcttctctctctcccgcgacatcagcggcggcgcagcggtggggtggggggacggcattgcgagctcacagtctcacaccacccgccgcgtggtgattccgagaggttgctgtgccgctggctatgtagtgatgtggaccgtgatctcgacggctatccgcggctgagcgggcggcggcgatgaacgaagcgagcgccagcgctggcgtcgggaccggctctggcggggaggtgccgctggtatacaaggcctggaaggggaacaatgatctgagtcttctgcttctaacttctgggagagatccggggatcatacctcgcaatgcacatcctccagaacctgaagggtttgatgacaatgcagaggcctcctcgttgctcccattgctctatctgcaacaactgcgtggagcgttttgaccatcactgcccatgggttggacaatgcatagggcttaggaattacaggttcttctacatgtttgtattctcaacaactctgctctgcctgtacgtctttgggttctgctgggtgttcgttgttaagatcagaaatgcagaacagataacaatttggaaggcaatgacaaagacccctgcatctgttgctttaatcatctacacattcattgcggtttggtttgttggtggcctctctgtgttccatttgtatctcatgagcacaaatcagacaacatatgagaacttcaggtatcgctatgatcaacgagccaacccatacaacaggggaatcatggtaaacatcaaacagatcttatttaccacgatccctccttccaagaacaacttctgtggtagggtccaacaggagcatggtctaaggcctcgtccaacaaatggtttcatgagtccaaacatggggagagctgttggtgacatcgagatgggtagaaaaccagtggcttgggatgagcctaggatggcagctgagattggtgatttaggagcaggtctgagcaacctgctggaggacaaggatggcaggtttcgtagcgcatctccagatctcagccgcgacgcccttgcagttggaggaggcttagaagaggaaggctcctcggcgatgaacgctgggcgttcaagctggggagttgaagcaggtcgatgatggcattgaccgtgtaagcggctgtagtgagacgctctgggttgttagtgccagttcgctgctaatctgttgttttgtttgagatttgaggtcactaatgttattagactcatgacctgtatggcggttgtttctggactttcttttcttctttctcttaatttgagatgtctttcgtgtctattatttgaaccagttggtttgtgacgtctcccggtttggcaagttatgttttgtctgtatataatcggacagtaagcctaaaataggatccagctgcttggatttggatggtaatggttgtgaataatgccctaccttttgcattgcagtaactgaacattgctcggtcttggtgcccatgtcaagattaatttattgctttttcggaagtgctgattcatcgctaagttatcttgagttgatacgctgtaatcttgagtagaagcagggtgccacactgacacttctgcaatatctttcacagcaacgagaacaggcattttccctgacaagaaaggagcaaggatgattcgccaaatgctaccacagacggtgttgttctgtactgctaacacactttattccttgattcgcctaatgctgc

SEQ ID NO: 30923 - DNA, 2214 bp, Zea Mays
ataatggcaaatttctcgtccccagcaaagtccctccattcggtctcatctcccatctctcttctctctctcccgcgacatcagcggcggcgcagcggtggggtggggggacggcattgcgagctcacagtctcacaccacccgccgcgtggtgattccgagaggttgctgtgccgctggctatgtagtgatgtggaccgtgatctcgacggctatccgcggctgagcgggcggcggcgatgaacgaagcgagcgccagcgctggcgtcgggaccggctctggcggggaggtgccgctggtatacaaggcctggaaggggaacaatggactggcactagattgactcgtgtcgtagccagatgttgggattcccttgctgttgctgagcttggcaaatttgtttggtcactgttggctaaattttttttgatgactcgatttccccccgtttattttatgattttgtactgggattctgggaatgtaggttgtaggacggctggacggattaagtgcctcggctggccttgctcaggagtgtttttactgaaggggagattcatatttggtcctgatgcaagatccttgtttgtcaccatgttccttattgttgcgccagtatcaatcttctgtccattagttgcgaaggaattgatggataaattctcttatggtctgggattaccggttatgattgcagcagttctattcacagcatatgatctgagtcttctgcttctaacttctgggagagatccggggatcatacctcgcaatgcacatcctccagaacctgaagggtttgatgacaatgcagaggttggggctaaccagactccacctgcctcctcgttgctcccattgctctatctgcaacaactgcgtggagcgttttgaccatcactgcccatgggttggacaatgcatagggcttaggaattacaggttcttctacatgtttgtattctcaacaactctgctctgcctgtacgtctttgggttctgctgggtgttcgttgttaagatcagaaatgcagaacagataacaatttggaaggcaatgacaaagacccctgcatctgttgctttaatcatctacacattcattgcggtttggtttgttggtggcctctctgtgttccatttgtatctcatgagcacaaatcagacaacatatgagaacttcaggtatcgctatgatcaacgagccaacccatacaacaggggaatcatggtaaacatcaaacagatcttatttaccacgatccctccttccaagaacaacttctgtggtagggtccaacaggagcatggtctaaggcctcgtccaacaaatggtttcatgagtccaaacatggggagagctgttggtgacatcgagatgggtagaaaaccagtggcttgggatgagcctaggatggcagctgagattggtgatttaggagcaggtctgagcaacctgctggaggacaaggatggcaggtttcgtagcgcatctccagatctcagccgcgacgcccttgcagttggaggaggcttagaagaggaaggctcctcggcgatgaacgctgggcgttcaagctggggagttgaagcaggtcgatgatggcattgaccgtgtaagcggctgtagtgagacgctctgggttgttagtgccagttcgctgctaatctgttgttttgtttgagatttgaggtcactaatgttattagactcatgacctgtatggcggttgtttctggactttcttttcttctttctcttaatttgagatgtctttcgtgtctattatttgaaccagttggtttgtgacgtctcccggtttggcaagttatgttttgtctgtatataatcggacagtaagcctaaaataggatccagctgcttggatttggatggtaatggttgtgaataatgccctaccttttgcattgcagtaactgaacattgctcggtcttggtgcccatgtcaagattaatttattgctttttcggaagtgctgattcatcgctaagttatcttgagttgatacgctgtaatcttgagtagaagcagggtgccacactgacacttctgcaatatctttcacagcaacgagaacaggcattttccctgacaagaaaggagcaaggatgattcgccaaatgctaccacagacggtgttgttctgtactgctaacacactttattccttgattcgcctaatgctgc

SEQ ID NO: 30924 - DNA, 1381 bp, Zea Mays
ataatggcaaatttctcgtccccagcaaagtccctccattcggtctcatctcccatctctcttctctctctcccgcgacatcagcggcggcgcagcggtggggtggggggacggcattgcgagctcacagtctcacaccacccgccgcgtggtgattccgagaggttgctgtgccgctggctatgtagtgatgtggaccgtgatctcgacggctatccgcggctgagcgggcggcggcgatgaacgaagcgagcgccagcgctggcgtcgggaccggctctggcggggaggtgccgctggtatacaaggcctggaaggggaacaatgtgtttttactgaaggggagattcatatttggtcctgatgcaagatccttgtttgtcaccatgttccttattgttgcgccagtatcaatcttctgtccattagttgcgaaggaattgatggataaattctcttatggtctgggattaccggttatgattgcagcagttctattcacagcatatgatctgagtcttctgcttctaacttctgggagagatccggggatcatacctcgcaatgcacatcctccagaacctgaagggtttgatgacaatgcagaggttggggctaaccagactccacctgtgcgtttgccccgagtgaaagatgttgttgtcaatggaattactgtgaagataaaatactgtgacacttgcatgttgtacaggcctcctcgttgctcccattgctctatctgcaacaactgcgtggagcgttttgaccatcactgcccatgggttggacaatgcatagggcttaggaattacaggttcttctacatgtttgtattctcaacaactctgctctgcctgtacgtctttgggttctgctgggtgttcgttgttaagatcagaaatgcagaacagataacaatttggaaggcaatgacaaagacccctgcatctgttgctttaatcatctacacattcattgcggtttggtttgttggtggcctctctgtgttccatttgtatctcatgagcacaaatcagacaacatatgagaacttcaggtatcgctatgatcaacgagccaacccatacaacaggggaatcatgtaactgaacattgctcggtcttggtgcccatgtcaagattaatttattgctttttcggaagtgctgattcatcgctaagttatcttgagttgatacgctgtaatcttgagtagaagcagggtgccacactgacacttctgcaatatctttcacagcaacgagaacaggcattttccctgacaagaaaggagcaaggatgattcgccaaatgctaccacagacggtgttgttctgtactgctaacacactttattccttgattcgcctaatgctgc

SEQ ID NO: 30925 - DNA, 1978 bp, Zea Mays
ataatggcaaatttctcgtccccagcaaagtccctccattcggtctcatctcccatctctcttctctctctcccgcgacatcagcggcggcgcagcggtggggtggggggacggcattgcgagctcacagtctcacaccacccgccgcgtggtgattccgagaggttgctgtgccgctggctatgtagtgatgtggaccgtgatctcgacggctatccgcggctgagcgggcggcggcgatgaacgaagcgagcgccagcgctggcgtcgggaccggctctggcggggaggtgccgctggtatacaaggcctggaaggggaacaatgtgtttttactgaaggggagattcatatttggtcctgatgcaagatccttgtttgtcaccatgttccttattgttgcgccagtatcaatcttctgtccattagttgcgaaggaattgatggataaattctcttatggtctgggattaccggttatgattgcagcagttctattcacagcatatgatctgagtcttctgcttctaacttctgggagagatccggggatcatacctcgcaatgcacatcctccagaacctgaagggtttgatgacaatgcagaggcctcctcgttgctcccattgctctatctgcaacaactgcgtggagcgttttgaccatcactgcccatgggttggacaatgcatagggcttaggaattacaggttcttctacatgtttgtattctcaacaactctgctctgcctgtacgtctttgggttctgctgggtgttcgttgttaagatcagaaatgcagaacagataacaatttggaaggcaatgacaaagacccctgcatctgttgctttaatcatctacacattcattgcggtttggtttgttggtggcctctctgtgttccatttgtatctcatgagcacaaatcagacaacatatgagaacttcaggtatcgctatgatcaacgagccaacccatacaacaggggaatcatggtaaacatcaaacagatcttatttaccacgatccctccttccaagaacaacttctgtggtagggtccaacaggagcatggtctaaggcctcgtccaacaaatggtttcatgagtccaaacatggggagagctgttggtgacatcgagatgggtagaaaaccagtggcttgggatgagcctaggatggcagctgagattggtgatttaggagcaggtctgagcaacctgctggaggacaaggatggcaggtttcgtagcgcatctccagatctcagccgcgacgcccttgcagttggaggaggcttagaagaggaaggctcctcggcgatgaacgctgggcgttcaagctggggagttgaagcaggtcgatgatggcattgaccgtgtaagcggctgtagtgagacgctctgggttgttagtgccagttcgctgctaatctgttgttttgtttgagatttgaggtcactaatgttattagactcatgacctgtatggcggttgtttctggactttcttttcttctttctcttaatttgagatgtctttcgtgtctattatttgaaccagttggtttgtgacgtctcccggtttggcaagttatgttttgtctgtatataatcggacagtaagcctaaaataggatccagctgcttggatttggatggtaatggttgtgaataatgccctaccttttgcattgcagtaactgaacattgctcggtcttggtgcccatgtcaagattaatttattgctttttcggaagtgctgattcatcgctaagttatcttgagttgatacgctgtaatcttgagtagaagcagggtgccacactgacacttctgcaatatctttcacagcaacgagaacaggcattttccctgacaagaaaggagcaaggatgattcgccaaatgctaccacagacggtgttgttctgtactgctaacacactttattccttgattcgcctaatgctgc

SEQ ID NO: 30926 - DNA, 1798 bp, Zea Mays
ctttgttgctggtgtggcgtggatctgtgcggccttgaggtgtttttactgaaggggagattcatatttggtcctgatgcaagatccttgtttgtcaccatgttccttattgttgcgccagtatcaatcttctgtccattagttgcgaaggaattgatggataaattctcttatggtctgggattaccggttatgattgcagcagttctattcacagcatatgatctgagtcttctgcttctaacttctgggagagatccggggatcatacctcgcaatgcacatcctccagaacctgaagggtttgatgacaatgcagaggttggggctaaccagactccacctgtgcgtttgccccgagtgaaagatgttgttgtcaatggaattactgtgaagataaaatactgtgacacttgcatgttgtacaggcctcctcgttgctcccattgctctatctgcaacaactgcgtggagcgttttgaccatcactgcccatgggttggacaatgcatagggcttaggaattacaggttcttctacatgtttgtattctcaacaactctgctctgcctgtacgtctttgggttctgctgggtgttcgttgttaagatcagaaatgcagaacagataacaatttggaaggcaatgacaaagacccctgcatctgttgctttaatcatctacacattcattgcggtttggtttgttggtggcctctctgtgttccatttgtatctcatgagcacaaatcagacaacatatgagaacttcaggtatcgctatgatcaacgagccaacccatacaacaggggaatcatggtaaacatcaaacagatcttatttaccacgatccctccttccaagaacaacttctgtggtagggtccaacaggagcatggtctaaggcctcgtccaacaaatggtttcatgagtccaaacatggggagagctgttggtgacatcgagatgggtagaaaaccagtggcttgggatgagcctaggatggcagctgagattggtgatttaggagcaggtctgagcaacctgctggaggacaaggatggcaggtttcgtagcgcatctccagatctcagccgcgacgcccttgcagttggaggaggcttagaagaggaaggctcctcggcgatgaacgctgggcgttcaagctggggagttgaagcaggtcgatgatggcattgaccgtgtaagcggctgtagtgagacgctctgggttgttagtgccagttcgctgctaatctgttgttttgtttgagatttgaggtcactaatgttattagactcatgacctgtatggcggttgtttctggactttcttttcttctttctcttaatttgagatgtctttcgtgtctattatttgaaccagttggtttgtgacgtctcccggtttggcaagttatgttttgtctgtatataatcggacagtaagcctaaaataggatccagctgcttggatttggatggtaatggttgtgaataatgccctaccttttgcattgcagtaactgaacattgctcggtcttggtgcccatgtcaagattaatttattgctttttcggaagtgctgattcatcgctaagttatcttgagttgatacgctgtaatcttgagtagaagcagggtgccacactgacacttctgcaatatctttcacagcaacgagaacaggcattttccctgacaagaaaggagcaaggatgattcgccaaatgctaccacagacggtgttgttctgtactgctaacacactttattccttgattcgcctaatgctgc

SEQ ID NO: 30927 - DNA, 2357 bp, Zea Mays
agacgatctgcagcggaggcccgccgcgaaacccagcacgaccgatccatccacctcacaccgcgtcttcgtccagctcactcccccgccgcgcccccgctccgctcccctctcttcctcgccgcgggtcgcgcgcagccaggcgccgagccgccgaccagtaaccgacgtatatctcatccttccccctcccccctgcacagccccctctacaactccccgattaaaccctagaatctcccaactcccaaatgcgcgcccccacctaggcccccgaattcggcatccgctccgcggaaggtgtgcaagccagggtgcacacaatgagtgcgggtttcaacaagcagatactggctcagaagctttcgaagcttaatagctcacagcagagcatagaaactttatcacattggtgtgtctttcatcatcgttactgccaacaagttgtagaaacatgggattgcgagtttcatgcagctcctggagagaggagggtatctttgctgtaccttgcaaatgatattatgcagaatagcagaaaagaaggcaatggatatataactgaattcatgagggtcatccctgctgccttgaatgaagtgttgactatcagagatgattttgggcggaatgttccaaaaagactgattgacatatgggaagaccgtaaaatatttgatactcaggcacaaagcctcaaagatgactttttcagaaggttaaaggacattagaaacaaattgaaaaatacgggcagtgagctgctggagaaggttgtctctagctacaaacatgtcctgaatgctcctatggatgaggatactctgatgcgaaaatgccaagcagctcttatcaattttgatgaactcaataaaacgtatggaaacaactctgttttaggtagcagcaatcaatcggaatttatgcagggggtgcaggaacaacacaacattctcagaaactccattgaacaactcaaattgtcagaatcactcagggccactctgatttctcatttgaaggaagcgctgaatgagcaggagctcaaagtggaacaagtcagaagcctgcttcagctcagcctcgattcaagagagctgctgagctctgcgtggggcttggaagcaacatggaaatgcatgagccatcaaatcaagggcataagaggtctagcctctctgatccacttagtactgttgctccaggagctgagaagtctcttcaaaagggacagtcaagtgcagtgttgtattcacaggagggaaatggttttgagcacatcatgacagagacaaagcttgctgcaggtgatgcttcagacaatatacgtggtggtgatttgccttcacaagtgaatgggggcaacaccaagctgaaaatagaagagcacacttctggtaacaagaggcagaagctagaggatgacacagatatttctcagcctcaatcacagtcaccgccaccgccacccccattccctcatcctgacgcattcgaaccaccaccaccaccaccacctgaggttcctccatcaccagagcctagcccaccaccaccgccaacttcaccgccacccaatatgatccccccgccgccgccggcaatgccaccccaaatgatctcacatgtaccacctccagctggtacatttgtaccttttcctgctggaccacctggtccaatgtattccagctacccaccttttactcctgtggtcaacttccccataaccagcccaccagctggtttccctagtccaagcccgcctccgccttttcaaggattagtgggtacattctatggccctcagttccccaccgcacccccaccagcagacaggaaatgagtgtagtaacctaccggcagcccccctcatcatactagtttatttccccttttcaacagagaatatgactcggggggtggggggggggggggggggcgctccatcagcatgtgttgtggagctcagaagattgttgtaaatttagccagtcagtgcgcagcagtgaattttctgaactagttgtggtcttggtcctggagtagaagtgtagaacctgtagatttcgactgctagagagaattagggattctgagagccgagaacaaatgcctgcgacagattaataataagttgtggtcttgttggagtaaaaactgtagattcccacagcttagagagagagcatggaactcggtagcatgacatgttgtaactcatgtacaattgtgttcattgccagatcatccgagaacatgtacatgttcccgtgatgttttgagcgtgtaattctgttgttctgtgtaagatatggcttgagccgctgtcgatggttgaaactttttgctctcgg

SEQ ID NO: 30928 - DNA, 1570 bp, Zea Mays
cccgccgcgaaacccagcacgaccgatccatccacctcacaccgcgtcttcgtccagctcactcccccgccgcgcccccgctccgctcccctctcttcctcgccgcgggtcgcgcgcagccaggcgccgagccgccgaccagtaaccgacgtatatctcatccttccccctcccccctgcacagccccctctacaactccccgattaaaccctagaatctcccaactcccaaatgcgcgcccccacctaggcccccgaattcggcatccgctccgcggaaggtgtgcaagccagggtgcacacaatgagtgcgggtttcaacaagcagatactggctcagaagctttcgaagcttaatagctcacagcagagcatagaaactttatcacattggtgtgtctttcatcatcgttactgccaacaagttgtagaaacatgggattgcgagtttcatgcagctcctggagagaggagggtatctttgctgtaccttgcaaatgatattatgcagaatagcagaaaagaaggcaatggatatataactgaattcatgagggtcatccctgctgccttgaatgaagtgttgactatcagagatgattttgggcggaatgttccaaaaagactgattgacatatgggaagaccgtaaaatatttgatactcaggcacaaagcctcaaagatgactttttcagaaggttaaaggacattagaaacaaattgaaaaatacgggcagtgagctgctggagaaggttgtctctagctacaaacatgtcctgaatgctcctatggatgaggatactctgatgcgaaaatgccaagcagctcttatcaattttgatgaactcaataaaacgtattcagcctcagaattcagaattggtattggacagcttgattaccgttgtttggatgcacaagaatttggcactggaatttgagtccagtaccaactcgacattcacttcacctgtgcccccttgccaccaattcggagcctcacccctccgttttgtggggaattaggccactaggaaaaaaaaacttcggcctttcaattctgtgttctgtacatccaaacagatatcgagtttgatggtttctatgattccaaaagtcaattttatggccatccaaacaacggatttcaattgtgttccatttcaatatcaaggctgatttggtattctctccaattcaattccttcccttccaatatcaacatccaaacaaagcctaaggatattctcacatgtcctgtcattatttactagttaatatgtagctcatagcatgcagaaactagtgattatgtggagttatagtttggtctgcaagttcttcacctcagttgcggtgcaccacatatgcagggttttcacaaaaccaacaaactaccatggtctcaagcataacacattgatgtttatctgtgcatgggtttgctgggttttagcaggagctaaggagatcggtagtatgggcttagttgctgccctgggcgaggtcgggtctagtttcagtactactatgtaattcccttcgggataatgtgggtctttgggaga

SEQ ID NO: 30929 - DNA, 2342 bp, Zea Mays
cccgccgcgaaacccagcacgaccgatccatccacctcacaccgcgtcttcgtccagctcactcccccgccgcgcccccgctccgctcccctctcttcctcgccgcgggtcgcgcgcagccaggcgccgagccgccgaccagtaaccgacgtatatctcatccttccccctcccccctgcacagccccctctacaactccccgattaaaccctagaatctcccaactcccaaatgcgcgcccccacctaggcccccgaattcggcatccgctccgcggaaggtgtgcaagccagggtgcacacaatgagtgcgggtttcaacaagcagatactggctcagaagctttcgaagcttaatagctcacagcagagcatagaaactttatcacattggtgtgtctttcatcatcgttactgccaacaagttgtagaaacatgggattgcgagtttcatgcagctcctggagagaggagggtatctttgctgtaccttgcaaatgatattatgcagaatagcagaaaagaaggcaatggatatataactgaattcatgagggtcatccctgctgccttgaatgaagtgttgactatcagagatgattttgggcggaatgttccaaaaagactgattgacatatgggaagaccgtaaaatatttgatactcaggcacaaagcctcaaagatgactttttcagaaggttaaaggacattagaaacaaattgaaaaatacgggcagtgagctgctggagaaggttgtctctagctacaaacatgtcctgaatgctcctatggatgaggatactctgatgcgaaaatgccaagcagctcttatcaattttgatgaactcaataaaacgtatggaaacaactctgttttaggtagcagcaatcaatcggaatttatgcagggggtgcaggaacaacacaacattctcagaaactccattgaacaactcaaattgtcagaatcactcagggccactctgatttctcatttgaaggaagcgctgaatgagcaggagctcaaagtggaacaagtcagaagcctgcttcaggcagctcagcctcgattcaagagagctgctgagctctgcgtggggcttggaagcaacatggaaatgcatgagccatcaaatcaagggcataagaggtctagcctctctgatccacttagtactgttgctccaggagctgagaagtctcttcaaaagggacagtcaagtgcagtgttgtattcacaggagggaaatggttttgagcacatcatgacagagacaaagcttgctgcaggtgatgcttcagacaatatacgtggtggtgatttgccttcacaagtgaatgggggcaacaccaagctgaaaatagaagagcacacttctggtaacaagaggcagaagctagaggatgacacagatatttctcagcctcaatcacagtcaccgccaccgccacccccattccctcatcctgacgcattcgaaccaccaccaccaccaccacctgaggttcctccatcaccagagcctagcccaccaccaccgccaacttcaccgccacccaatatgatccccccgccgccgccggcaatgccaccccaaatgatctcacatgtaccacctccagctggtacatttgtaccttttcctgctggaccacctggtccaatgtattccagctacccaccttttactcctgtggtcaacttccccataaccagcccaccagctggtttccctagtccaagcccgcctccgccttttcaaggattagtgggtacattctatggccctcagttccccaccgcacccccaccagcagacaggaaatgagtgtagtaacctaccggcagcccccctcatcatactagtttatttccccttttcaacagagaatatgactcggggggtggggggggggggggggggcgctccatcagcatgtgttgtggagctcagaagattgttgtaaatttagccagtcagtgcgcagcagtgaattttctgaactagttgtggtcttggtcctggagtagaagtgtagaacctgtagatttcgactgctagagagaattagggattctgagagccgagaacaaatgcctgcgacagattaataataagttgtggtcttgttggagtaaaaactgtagattcccacagcttagagagagagcatggaactcggtagcatgacatgttgtaactcatgtacaattgtgttcattgccagatcatccgagaacatgtacatgttcccgtgatgttttgagcgtgtaattctgttgttctgtgtaagatatggcttgagccgctgtcgatggttgaaactttttgctctcgg

SEQ ID NO: 30930 - DNA, 2089 bp, Zea Mays
cccgccgcgaaacccagcacgaccgatccatccacctcacaccgcgtcttcgtccagctcactcccccgccgcgcccccgctccgctcccctctcttcctcgccgcgggtcgcgcgcagccaggcgccgagccgccgaccagtaaccgacgtatatctcatccttccccctcccccctgcacagccccctctacaactccccgattaaaccctagaatctcccaactcccaaatgcgcgcccccacctaggcccccgaattcggcatccgctccgcggaaggtgtgcaagccagggtgcacacaatgagtgcgggtttcaacaagcagatactggctcagaagctttcgaagcttaatagctcacagcagagcatagaaactttatcacattggtgtgtctttcatcatcgttactgccaacaagttgtagaaacatgggattgcgagtttcatgcagctcctggagagaggagggtatctttgctgtaccttgcaaatgatattatgcagaatagcagaaaagaaggcaatggatatataactgaattcatgagggtcatccctgctgccttgaatgaagtgttgactatcagagatgattttgggcggaatgttccaaaaagactggtagcagcaatcaatcggaatttatgcagggggtgcaggaacaacacaacattctcagaaactccattgaacaactcaaattgtcagaatcactcagggccactctgatttctcatttgaaggaagcgctgaatgagcaggagctcaaagtggaacaagtcagaagcctgcttcaggcagctcagcctcgattcaagagagctgctgagctctgcgtggggcttggaagcaacatggaaatgcatgagccatcaaatcaagggcataagaggtctagcctctctgatccacttagtactgttgctccaggagctgagaagtctcttcaaaagggacagtcaagtgcagtgttgtattcacaggagggaaatggttttgagcacatcatgacagagacaaagcttgctgcaggtgatgcttcagacaatatacgtggtggtgatttgccttcacaagtgaatgggggcaacaccaagctgaaaatagaagagcacacttctggtaacaagaggcagaagctagaggatgacacagatatttctcagcctcaatcacagtcaccgccaccgccacccccattccctcatcctgacgcattcgaaccaccaccaccaccaccacctgaggttcctccatcaccagagcctagcccaccaccaccgccaacttcaccgccacccaatatgatccccccgccgccgccggcaatgccaccccaaatgatctcacatgtaccacctccagctggtacatttgtaccttttcctgctggaccacctggtccaatgtattccagctacccaccttttactcctgtggtcaacttccccataaccagcccaccagctggtttccctagtccaagcccgcctccgccttttcaaggattagtgggtacattctatggccctcagttccccaccgcacccccaccagcagacaggaaatgagtgtagtaacctaccggcagcccccctcatcatactagtttatttccccttttcaacagagaatatgactcggggggtggggggggggggggggggcgctccatcagcatgtgttgtggagctcagaagattgttgtaaatttagccagtcagtgcgcagcagtgaattttctgaactagttgtggtcttggtcctggagtagaagtgtagaacctgtagatttcgactgctagagagaattagggattctgagagccgagaacaaatgcctgcgacagattaataataagttgtggtcttgttggagtaaaaactgtagattcccacagcttagagagagagcatggaactcggtagcatgacatgttgtaactcatgtacaattgtgttcattgccagatcatccgagaacatgtacatgttcccgtgatgttttgagcgtgtaattctgttgttctgtgtaagatatggcttgagccgctgtcgatggttgaaactttttgctctcgg

SEQ ID NO: 30931 - DNA, 1279 bp, Zea Mays
ttatttgtaaaaagatgacacgggatgaccgttgaaattagtgctttaagtatagtatagaaaaatagtaccggtattaaatgctagaggttggaaatctctttctgttccatgattccatcaagaacaattcctcctccaagaccagttcttcctcctgtacgtcctccataaatacatggccagctctaccacatctcttgcaacattactacacatacctgcagctaggagtgaggtgcaggcatggcctactgctactatccagcaagagcctgctatctcctgttcctcatctaccagcccgtcgtctactacctgttgctcatggctccccacaccatcgcgctgtctttcagctacgacttctccaacccgggcgacctcgaccgagcaaatctcacgtacctcggcaactctatcgccggcgacggaatcattaaccttacaaatatgaatgacacctggagcaccggcggtgtggcctacccgcagccggtgcgcctgtgggatcaccgcaccggcaggagagcaagcttcaccaccaacttctcgttcgccatcagcggcgagcgtacctacaaccgtgcggatggcatggccttcttcatcgggtccttccgctcagccgtgccgctagactcaggcggtggttttctcgggctcatcagcaacatcactccaccgccgctgtcgactgtcggcgtagagttcgacacaaacaggaacatatgggatccccaggacgccattgaccattttggcatcgacgtcaacaacatcacctccatcgtcgtttacaagtcgctgggacaagatttcccaaacccgctctctggtaccatgtcggcaggcgtcaactacgatggcagctccaaggttttatccgttagcctccggctggccaacggagatgttcatgacctcgaaacgtcggtcgaccttaaagccgccggagtgccacagtatgccaccatcgggttttcggcggccaccggcaatcacgtcgagtcgcaccagctcttgtcttggtccttcaactcaagagggaagtaatcggtgagcccatgctgaccacccgctgcgaggaggcctgacttgggttgaaaacttagagtttgaaggccatcccaccaagtgttcgtggccgctcccaaaaccaaagagcgaggggtgattaataagtgagcacccaacgaccaagaccctagctcacaagctccaagggcaattctaaattgtgtttgagtcctagggaacgtttgactcatggtctgtc

SEQ ID NO: 30932 - DNA, 1447 bp, Zea Mays
ttatttgtaaaaagatgacacgggatgaccgttgaaattagtgctttaagtatagtatagaaaaatagtaccggtattaaatgctagaggttggaaatctctttctgttccatgattccatcaagaacaattcctcctccaagaccagttcttcctcctgtacgtcctccataaatacatggccagctctaccacatctcttgcaacattactacacatacctgcagctaggagtgaggtgcaggcatggcctactgctactatccagcaagagcctgctatctcctgttcctcatctaccagcccgtcgtctactacctgttgctcatggctccccacaccatcgcgctgtctttcagctacgacttctccaacccgggcgacctcgaccgagcaaatctcacgtacctcggcaactctatcgccggcgacggaatcattaaccttacaaatatgaatgacacctggagcaccggcggtgtggcctacccgcagccggtgcgcctgtgggatcaccgcaccggcaggagagcaagcttcaccaccaacttctcgttcgccatcagcggcgagcgtacctacaaccgtgcggatggcatggccttcttcatcgggtccttccgctcagccgtgccgctagactcaggcggtggttttctcgggctcatcagcaacatcactccaccgccgctgtcgactgtcggcgtagagttcgacacaaacaggaacatatgggatccccaggacgccattgaccattttggcatcgacgtcaacaacatcacctccatcgtcgtttacaagtcgctgggacaagatttcccaaacccgctctctggtaccatgtcggcaggcgtcaactacgatggcagctccaaggttttatccgttagcctccggctggccaacggagatgttcatgacctcgaaacgtcggtcgaccttaaagccgccggagtgccacagtatgccaccatcgggttttcggcggccaccggcaatcacgtcgagtcgcaccagctcttgtcttggtccttcaactcaagagggcttttatcttgagctgcttcagcatactactacgatcaaggcggaaagtccagtgcttattgatcaaagaagaagcgataggggtcttcttaagataagaagagttgctttgatgaaaagagtgttgccatgcactgagtttttattataattttaacaagtaaattgactaacttggataaaaacgtttcgtgtggcgggtacacggggaacagggatgggagatggtttcccgtccccgtccccgcgaacccccgacggggattaaatttcccccatttagatccccacgaggactaaattagccccatacccgtcccctaataggggaatttcctgcggggaatcggagatcgggtcccattgccatctctaaccgtgcggcgtgtgggtaact

SEQ ID NO: 30933 - DNA, 2390 bp, Zea Mays
ttatttgtaaaaagatgacacgggatgaccgttgaaattagtgctttaagtatagtatagaaaaatagtaccggtattaaatgctagaggttggaaatctctttctgttccatgattccatcaagaacaattcctcctccaagaccagttcttcctcctgtacgtcctccataaatacatggccagctctaccacatctcttgcaacattactacacatacctgcagctaggagtgaggtgcaggcatggcctactgctactatccagcaagagcctgctatctcctgttcctcatctaccagcccgtcgtctactacctgttgctcatggctccccacaccatcgcgctgtctttcagctacgacttctccaacccgggcgacctcgaccgagcaaatctcacgtacctcggcaactctatcgccggcgacggaatcattaaccttacaaatatgaatgacacctggagcaccggcggtgtggcctacccgcagccggtgcgcctgtgggatcaccgcaccggcaggagagcaagcttcaccaccaacttctcgttcgccatcagcggcgagcgtacctacaaccgtgcggatggcatggccttcttcatcgggtccttccgctcagccgtgccgctagactcaggcggtggttttctcgggctcatcagcaacatcactccaccgccgctgtcgactgtcggcgtagagttcgacacaaacaggaacatatgggatccccaggacgccattgaccattttggcatcgacgtcaacaacatcacctccatcgtcgtttacaagtcgctgggacaagatttcccaaacccgctctctggtaccatgtcggcaggcgtcaactacgatggcagctccaaggttttatccgttagcctccggctggccaacggagatgttcatgacctcgaaacgtcggtcgaccttaaagccgccggagtgccacagtatgccaccatcgggttttcggcggccaccggcaatcacgtcgagtcgcaccagctcttgtcttggtccttcaactcaagagatccacctaagttcgaactttgggtgataatacttttagctgttgcgagtgtgtcatttgctgctttagtggctgctctactttggattatcatgcacagacattattcccgtgcctcatcgatgaagatagagttgcaagttgcaagggaattctcgtaccaggagctgtctgcagcgaccagcaacttcttcaaggacaggaagctcggcgcgggccagttcggggaggtgtacagaggtgagctgccggaccctctcatgccgccggtggcggtgaagaggctgacgaggcagatggaggcgcggacccggaaggactacgtgaccgagatcatgaccttgggccggctcagccaccggaacctagtgaagctcgtcggctggtgtcaaggcggcaatgagctgctgctcgtgtacgagctggtaacgaacaggagcctcgacgagcacctccacaggtcagagcgcctgctggcgtggcctgagaggtacaggatagtgctcggcataggctccgccatagagtacctccacaccggcgaccagaaccccatcctgcaccgcgacatcaagcccagcaacgtgatgctggacgatgacttcgaggccaagctcggcgacttcgggctcgtgaggcagatccatccaggacatggctcttccctcgagggcaccgtcatgatcgggactagggcgtacatggatcccgtatgcatgagcaccaacacggcgagcacagcgtccgacatatacagcttcggagtgctgctgttggagatcgccaccggcctgatgccgaccgaggtggcgggcccaggaggcctcctctccaacaccctcatcagcactgtccgggaatactacggcaggggatcggtcctcgagatggctgataggcggctgaacggcgacttcgacgagggcgagatggagcgggtgctgctcgtcggtctcttgtgtgtccagcaggatcgccgtcaccggccggaaatcagaatcgctgtcaacatgctctcgaatctcaagcttccgagtcctagaattcgttcctgaaaagattcactcgccaataatagggtgccttgcctctcgaatctcaggcttccgactcccagattcgttcctgtatgtacatagtgctttgtgagttagcatttggtctggctttgatcacgtattcctctataaactagcaagctggctcgcacaagaactaatgtgatgtttggttcacatatttgtaatgtaacgggtaacagataacgttaaatcatgtttatctaagtccaatcgtaatcgaataccatactaaaaattaatatcggtctattcaaacttat

SEQ ID NO: 30934 - DNA, 2210 bp, Zea Mays
aatgaatgcacaccaagacacttcaactaataagtatatagatgtaccagtctgtgatgcaacaatccatgactctgttaggttatattatttgccaagatacaaatacatattcaaaataactctccctttttagagaaaaggaaaagaaaataaatctttcacggtggtagatttcatatttgtatttctaagttgccacataatcatgaaagaaatgaaaccttggttaaaacagcctctcatagtgaagagtttcattcagcacagtttcacaattaatatgcaagagataatatgtctaggtaatgattaacatgcgtgagaagggctttcttcttactccctccgtttctttttagttgtcgctggatagttcaattttgcactgtctatcgacaactaaaacgaaacggaggaagtactatctacccaaagttgtattaccccctttgttgagttttttttttaaattttttttgttggacctaatatgccgagacgaagatctgttccccactaatgattacttatcaaatatgtaggtaattgagaaaacggatttagaaggttgatttgatatatttcatgatagatggaatcaatatctaccttaattagatgaagattttagatgttactttagatatgttcataattgtagagatgagtaatttgggaaaataaattagatccaaatgctaattattaccagtgatgattatgatggtctaccaaatgacgaccagagatatttctatatatcgtttatttacaaaaagaagttggttgatgatctaccaaatgctcggtgtcgctcaagtctcactgtctaattaatagccattattgccttccgtgttaacagatccacctaagttcgaactttgggtgataatacttttagctgttgcgagtgtgtcatttgctgctttagtggctgctctactttggattatcatgcacagacattattcccgtgcctcatcgatgaagatagagttgcaagttgcaagggaattctcgtaccaggagctgtctgcagcgaccagcaacttcttcaaggacaggaagctcggcgcgggccagttcggggaggtgtacagaggtgagctgccggaccctctcatgccgccggtggcggtgaagaggctgacgaggcagatggaggcgcggacccggaaggactacgtgaccgagatcatgaccttgggccggctcagccaccggaacctagtgaagctcgtcggctggtgtcaaggcggcaatgagctgctgctcgtgtacgagctggtaacgaacaggagcctcgacgagcacctccacaggtcagagcgcctgctggcgtggcctgagaggtacaggatagtgctcggcataggctccgccatagagtacctccacaccggcgaccagaaccccatcctgcaccgcgacatcaagcccagcaacgtgatgctggacgatgacttcgaggccaagctcggcgacttcgggctcgtgaggcagatccatccaggacatggctcttccctcgagggcaccgtcatgatcgggactagggcgtacatggatcccgtatgcatgagcaccaacacggcgagcacagcgtccgacatatacagcttcggagtgctgctgttggagatcgccaccggcctgatgccgaccgaggtggcgggcccaggaggcctcctctccaacaccctcatcagcactgtccgggaatactacggcaggggatcggtcctcgagatggctgataggcggctgaacggcgacttcgacgagggcgagatggagcgggtgctgctcgtcggtctcttgtgtgtccagcaggatcgccgtcaccggccggaaatcagaatcgctgtcaacatgctctcgaatctcaagcttccgagtcctagaattcgttcctgaaaagattcactcgccaataatagggtgccttgcctctcgaatctcaggcttccgactcccagattcgttcctgtatgtacatagtgctttgtgagttagcatttggtctggctttgatcacgtattcctctataaactagcaagctggctcgcacaagaactaatgtgatgtttggttcacatatttgtaatgtaacgggtaacagataacgttaaatcatgtttatctaagtccaatcgtaatcgaataccatactaaaaattaatatcggtctattcaaacttat

SEQ ID NO: 30935 - DNA, 1760 bp, Zea Mays
gcccagcttccattcgtgccgaggcctcacgaacacacccatttggtgccctaccgctaagccgctaaccctggctcacgaacacacccagtcagccgccaggccgccgctgtgccttccgccgtccgccgaggcaccgagccgctgtccctccccgtccgccgagccgttgcccctgtggctgtgctgtgcctccgttcgccggccgagccgctgtccgcctgtcactgtccctcagtccgccgagctgctgtgctttccggcttcgccgtccgccgaacaggttcgtccgcgagcgcgacgcgccgagcttccgccgtccgccgagcaggtccgtccgccaagccatacctaaatttttttccgtcctccgccactgcccgccatggccaccacggctgcggcgacgatcgttggagcgctgccgactgccaggggacgctgtggagccttctggttcccctggcgtggcgtggaggagggcacaggcaggccgaacgcggctggctattatggcgtcgtgacgagagccgtgggcggcgacggaggtcgggcgtcgatctccatctcttctagcaggagatgggtacgtgcctcggcgaacgacgggaatgggcgatgcattttgaggatcgacaccgtgtgctagaatttccagctcaggccacggagcagggtaaggaccatctggcgatcaccgattggatcgccgaattcggcgagagacgctgccattgtctcaagacgacgacaaaaatcggtgatcgatagggagtcttggcgaaggttgcagaattgtgactcaaggaggagggcacgagattcctgttgtccaaggaactcgtcctcaagataactccatgcctcacacgcggggcgctggcagatcatgagcgtctgctgcaagtcgctggatacggtgctgtagatccatgtcagcacgaacgcagtccgcctagagccatgcagggcgctccaggaacacctcatccatgaggatatggtgggtcagcgcatacttgccgaggactgtgaggaacagcccacgccacttggtgtaggtgttcgcgaccttgtcgaggatgacggggatgagggccttcacgttgacgacggcggtggcctgagcccagatggcctcgtgggcggctttgaacttgtcgaggcacgcctgctcgatgcgggcagcctcggcggtgaggcgacattcctcggcggccttggccgcagcggctgtggcagtggtggcggcgtcatctgccatgatgtgcgcagggagtcggacccatggacgcgcccggctgaagggtcggcgaatcgagcgatctgaaatacgatcggtggcagcgtgtcgatcggaactagaaggggcaggcacggcgatcagctcagcaacactccgggcggacaggtcagcggctagggtggcgagaaggacctggaggcgcgcaggttagtattgtgcggaagcggatcgtaactcctgtgtgataccatgagagtaggaataattgatatcttttgattgtgtatagacgtaaatagatatagcagctaagggcggcatgcaagccaaccgcacagccgcaatcacaggagcaatcacagccacaattacatgcctaattacattaatctaacaatttcaataacattcttgccaagtttgtaatatcatacatcacacatttaatatattgtacttatgacttcttcgttaatatgatgatatggactagtctacaggttttttgatatag

SEQ ID NO: 30936 - DNA, 2180 bp, Zea Mays
ccaatccgcccgccccgctcccgcgcgagatccatccatcccgatcccatcgcgtcacacgtcaccttgccatttatcagcacacgcggttagccgccctctcaagctcgctcgtcgctcgctcccctgccccgcgtccgccccgcctcctgaaaattcccccttttttcctacttcccgtcccacggctcctacgccccgcgggcccaaaaaccctagccggctaatccaatcctgcttcccgcccatggcctccgcggacgctgccaagcccgcgtccccgcccgccgcggatccgcccgtcgacgaccccatggacgccgaccccgcgccccccgcgggggaggaggagcaggccacgccgcagaagcagcagccggagaagaagcggggcggccggaggaagaagggcgaggcggcggagaagacgccgccgtcgtccaagaagtcggcgggccccacggtggagcgcccgtccagggagaggaagacggtcgagaggtacgcggagctcgcgccgcgcgccacacccgccaaaaagtcccccgctattctccagggttctggaacgaagctcaaggacatacccaatgtttcatttaaactatcaaagagaaaggtggatgagaatctccagagcctccatactgtattgtatgggagaaaatcaaatagaaacatatctcaattttctgggtttgtttggacagacaatcaagaaaaacagaggaacagaataaaggaaaagcttgagaaatttaacaaggagaagttgctagatttttgtgaaatactggacgttattgtaaaagtaactatgaagaaggaagaagtttctgccaagctcttggaatttttggagtctccttgtgttactcgggatgttgttctcactgataaaaagaaggggaagaaacggggaagaaaatctaaagtaggtcgtgagacaactgctgaaggtgcttctacagagaagaaaaggaaaagagcccataaacaagcagctgaagatggtaaagagaatgatggtgaggatgatgatcccactggttctgaggatgcatcaacaggagaggaagctgatggggactctgaggcaaatgatcatgctttgagtgatgatgaacatgatgagcctgcctcaaagaaaaagtcttcagatgttaaacaaaagaaagaaacaggttctgatgcaaaggaaaaggatgcaccagggaaaaaaggttctacgaaacgtgcatcaaagccttctcaaaacagtaaaaatgagcctgaggtagagataaaaaaggttggcaagagagaaaagagttcaaaagaaactgacgtgtcaccagattcaaataagtcaaacaagaagatttctaaatccaaaaagggtgatggaaaagaaacccaaaataataaagctgccaggtcatccaataagagtaaaggtaaagtcaaaggtgggtcagtggctgggactgccccaaccactgaacagcttcatgctgttgttagtggcattttgaaggaagttgacttcaacacagcaactttggctgatattctcaggcaattagggacccattttgaaatggacctcatggacagaaaagcagaagtgaagcgcattatagaagatgtaattaatagtatgtctgatgatgaaggtgaggaaggctcagaagatgaagctgaagacgatggtaaggcggataatttaaagagtgaacccgatggaggtgaagagaagtgattctgtggactggatgtggattgaacatcgaagggtcatttttcatggcagtctcctgtttggaggtttggctctgtacaattcgggcaccgcaagaacgagccggtgacctgggtactgcttacatgattgttaaccatttcaacagccatacgcatctagctgagcttgacttggtagtgaatgtagtctagtcgcttgtcatgtaatagctttgcgattgatagtttgctagcttaggtagctagcctgactgtaatatgcagaataattcttgtcttgtttccgtccattttatccatgtaaaactatgagttctgaatctttctgaaccttgcttttcttgttctccttgtcatcttaatgtctgatcatttttgttgaattttttggttgaagcttcttaggtctatagtggttcagacgcttcagtttgtca

SEQ ID NO: 30937 - DNA, 2032 bp, Zea Mays
actcgcatctaaaccctagcccctcaccgttctcaatctcttctcccttgatcggcacagccacaacctccttctccaatactctctccctcgccgccggccacctccgcctcctcccacgcgccacctccgcctcctcccacgcgccacctccgcctcctcccacgcgccacctccgcgacaaaccactgaaggagggagaggactcgctcatatcgtccgatggaggaggactcgatcaaggggatgatctccgcgatatcctgggtgcccaggggcgccgccaagagcgtgcccgtcgttgccgacccgcccactcaggaggagatcgccgaggccatgaagaccttcgacctgggcagagactccgggagcgacgctgacgaggatgatgatgctgccaccatggaactcgacggtgcggcggaaacggtggaggaggttgatgaggctgcccgagccaaggccgtagccaaggcgctctgcaagggctctagcaaggcggacgacgtcgctgatgagctccgcgaactcaacatggacgcgtacgatgatgaagatgaagaggtcgatattttcggctctgggctgggggacttgtactatccgagcaacgcaatggacccatatctgaagaagaacaatgaggatgatgaggaggacgacgatgatgatgaggaaatcgaagataagatgatcatgcctactgattttgttattgtctgtgcacatagtgaggacgatatcttctctcttcaggtcaacattcttgaagaaacaaatgatggtgaacaaaatatctttgtgcatcatgacgttcctctcgctgattttccgctatgcacagcttggatggattttaatctgaaaggtggtgaaaaagggaattttgtagccgttggaaccatggatcctgccatagaaatatgggacttagatatggttgatgaagtgcaaccgcacatggtgctaggaggactttcaaaaaagaagaaaaagacaaagggcaaaaaggggaagaagtataagaaaggaagccacagaagttctgtgcttggtcttgcatggaacaaggaagttaggaatgttctagctagtgcaagtgcagacacaactgttaaaatctgggatatagctgttggtaaatgtgcagtcactctagaacaccatgatgacaaggttcaagcagttgcttggagcccacagtcacctgaagttctgcttagcggatcctttgataaaacagttgccatgaatgatatgaaagatggtgggcagaattgtcataaatggtctgttgaagcagacgtcgaaagtttagcttggaatccacacaatgaacattcatttgtggtcagtcttgaaaatgggatggttcaagccttcgataagcgaacagcttcatcaagttcttctggccagtctatgtatacccttcatgcacacgataaggctgtttcttccatctccttcaacccgtctgcccctaactttctcgcaacaggctcagttgataaaatggtgaaactatgggatctatcaaacgacaaaccatcatgcattgcctcccaaaatccaaagcttccccttcttgttagcatgtggaggttcaaaaggcaaactgaaggtttgggacacgcttacggagcctgcagtagccaacaagttcagcaaatagaactgccgctgtttgccattataagttatttcccggcacacacatgtttgggtagattgaagttatagtcgaagttttgcccttgtgagttgaggagcccaattgtataatgaactcatgaaatcaatccaagcattgatttatgtattagtggtgggcagaggttttggagtggacgtattaactttatgacggtgcgagttgggttgtgacttcccaattttttgtgaaagaagttagtgatcttcagaccagctcactttatctcgatccaatttgaaactttggacaatagttttacatggaacagctcgactgtataaggctatctttagcagcggtacacatctttgt

SEQ ID NO: 30938 - DNA, 4454 bp, Zea Mays
ggcctctcctactgttgtgactggtgccacctctcctttcccttcttcctccgtgccccaatccctcttctcccctcgaccagccgagagagcgcccctaccgcagcagctgcagtgctgctctgctctgctctgttctgcccccacttcaccctctcgtctcaccccgcctgcagcttggtcgcttttctccccagtctcctcccctccaccctctcgtctcgtcgcacctcacctgcttggtcgcttttctcccccaatctcctcgtctcccgccggcaccaataccatcctctgtccgctcgctgttgctgttgctattcccgtccgtcccgtgcttctactcgctagtcgtttcgtattcgtatcctctctcctcagccgccctgctcccctcccgtcctctggtgtctggtcaaaccagcggctcccaagatttgccgctgcttccttcctggagaaatcaagcctgtgcggcgagaaatcaagaggaagggggaagagagggagaaagagagaggggcgggggtggaggaaagaaagcctgccccttgcggacgtgcctgctccctcgggggcattcaattggagccaacagtgggcgggtgggcggctgctacagcacggcggcctccataaattagctccccgcgttccggccccttccgccccctgtcgtcgcacccgccccgtgtctcccccgatcggtccgtcgatcacgcggacgcccgccggagcatgcgcgccgcgggcctcggccgccggagaagcagcatcagccgccgcgccgccgccggcgtccggaaggagatgtagcgctagctccccgacccgcgaggaaagggaaaggggaatgaccgttacggcgcgcgggaggagcggtggagccgggatgggggagaagggcggcgctcccgggctcggcttcctgagcctcgatcggatgcgcgtcctcctgccgccgctccgcctgccggagaagctgtcggccaggacgctgcggacgcacctcttcactaactaccggatgcgcaaggtgcgggacagctccagctggctcatcccgctctgggtcagctcttgggtcctcgtcgcctccctcatctacctttgcatgagctaccaggccgtcggcaagcgccgggagtctctcgccagcatgtgcgacgagcgcgcgcgcatgctccaggaccaatttaacgtcagcatgaaccacctccaggcgctcgccatcctcgtctccaccttccaccactccaagacaccctccgccatcgaccagaaaacgttcgcgaggtatgcggagaggacggcgttcgagcggccgctgacgagcggggtcgcgtacggggtgcgggtcacgcacgccgagcgggagcagtttgagcgccagcagggatggagcatcaagaagatgtactcctccaagaccaagaatcagtcgcagggacccgggaacgccgaggacgccgaggtgcgggagccggcggaggagtatgctcccgtaatcttcgcgcaggacgcctacaagcacgtcatctccttcgacttgctatccggcgccgatgaccgggacaacgtactccgagctagagaatctgggaagggtgttcttactgctcctttcaagctgctcaataatcgccttggagtgatcttcacctatgctgtgtacaagtatgagcttcctgcaaatgccaggccacaggagcgcattcaggctgctataggctatttaggtggcatatttgatattgaagctcttgttgataagttgcttcaccagctcgcgggcaagcaatccatcatggtgaacgtttacgatactactaatgagagaccaatcagtatgtatggttcgaatgatacaggcagtggcatgtgccaggtcagcacactgaacttcggtgacccttcaaggaagcatgtgatgcactgttcattcagagcccaccttggccttggatggcaataacgacatcaattggaactctagtgattgctttactgattggatacatagttcatgctaccgcaaaacggattgccagagttgaagatgactttcaggagatgagtttgctcaagaagcgcgcagaggatgcagatattgccaagtcacagttcttggctactgtttctcatgagatcagaactccaatgaatggtgtcctagggatgctccaaatgctcatggatactgatttggacacaacacaacaagactatgttagaaccgcacaagccagtggcaaaactctggtatccctcatcaatgaggttcttgatcaggcaaagatcgagtctggtaaacttgagcttgaggtggtaccctttgatcttagaacagtttgtgatgacattttgtctctcttctgtgggaaagcacaggagaaaggactggagttggcagtgtttgtttctgatcaagttccacaaacactaattggcgatcctggaagaataaggcaaatcattacaaatcttgttggaaactctataaaattcacagagaagggtcatatctacttgacggttcatgtcgttgaagagattatgcattgtctggaggttgagacgggaactcagtatacaaataccttaagtggctacccagtggcgaacaggaagcgcagttgggaaaactttcgactttttagtagggaactgaactcatccgagatgccttttgcacccattgcatcagactcaataagcttgatgatatcagttgaagatacgggtgctggaatcccgttcgatgctcaatcccgtgtcttcacccctttcatgcaagtaggtccatccatcgctcgcatacacgggggcactggcattggattaagcatcagcaaatgcttggttggcctcatgaagggagagatcggattttcaagtaaaccccaagttggttctactttcaccttcactgcagtgcttacgagggtccattccagcagaaatgagaataaatcatcagaatttaaagagatcaatgcattggtggtagatcatagaccggtccgtgccaaggttactaagtatcatttgcaaagactgggagttcagactgaattgacaactgacctagatcagtatatttctaaaaataattgtggatcacagattgcaaagcttgtgctcattgacaaagaaacctggctgaaagaatcccactccatgcctcttttggttactaaattgaggaacaaagatcagccagactctacaaagttatttcttttggagaaccctaaaagttctgtcaagagcaattcacatatattcagggaatataacttgaatgtaattatgaagccacttcgtgcaagcatgcttcaggtttcgctacaaagagcattgggtgggatagataaactgcattgcaggaatggagtagtcggcaattcaacactgggcagccttcttcacaagaagcgaatcatagtggttgatgataatattgtaaatctcaaggttgctgcaggcgctctaaagaaatatggcgcggaagtaacttgtgctgacagtgggaaggaagcaatcacactgctgaaacctcctcacaattttgatgcttgtttcatggacatacagatgcctgaaatggatggatttgaagccacaaaaaggattagagtgatggaaagagatctaaatgagcaaatagaacgtggagaagccccaccagaatgcgtaggggttcggcagtggcgaactccaatattagccatgacagcagatgttatccaggcgacacatgaacaatgcttgaaatctgaaatggacggttatgtttccaagccattcgagggcgagcaattgtacagagaagtagctcgctttttcctaaatcaagaccaagttcagtaggtaggcttatatggagtgtaaaatagtggaggatatcagggttcacccatcgaggctgaaagaattttgtcagagatcccatgttcttgagagtggaaaacactttaggctggagatggaaccacctatgttcggttccttggtacatctgaccaagctgcaaaactaaatgtgcaatgtcttgaaatcaaggtgcatgtggagctatttactcgacaatctgaggtcaaggcgtgtgaaaaaaaagcccagctgcattcactaaccgcagatgtcctctgccactacaatatagagtagggagagaaattttccttccccagaaggtaccggctgtacatattaggtattggttgtttgtgcaggcatttgttggcattttgttgtgcatcgtcttcggtctgtattgtttgggtcgaagctgtaaaatgtaaatggcgttttcaaagatggaagttttgtttgacaaatacatcggtcgtcatcagcttgtcttcctgagtttctctcctgctactggttctctcccaaccagccaatcactatactgaaggctgcctgttggtgtggctttatctgat

SEQ ID NO: 30939 - DNA, 4343 bp, Zea Mays
ggcctctcctactgttgtgactggtgccacctctcctttcccttcttcctccgtgccccaatccctcttctcccctcgaccagccgagagagcgcccctaccgcagcagctgcagtgctgctctgctctgctctgttctgcccccacttcaccctctcgtctcaccccgcctgcagcttggtcgcttttctccccagtctcctcccctccaccctctcgtctcgtcgcacctcacctgcttggtcgcttttctcccccaatctcctcgtctcccgccggcaccaataccatcctctgtccgctcgctgttgctgttgctattcccgtccgtcccgtgcttctactcgctagtcgtttcgtattcgtatcctctctcctcagccgccctgctcccctcccgtcctctggtgtctggtcaaaccagcggctcccaagatttgccgctgcttccttcctggagaaatcaagcctgtgcggcgagaaatcaagaggaagggggaagagagggagaaagagagaggggcgggggtggaggaaagaaagcctgccccttgcggacgtgcctgctccctcgggggcattcaattggagccaacagtgggcgggtgggcggctgctacagcacggcggcctccataaattagctccccgcgttccggccccttccgccccctgtcgtcgcacccgccccgtgtctcccccgatcggtccgtcgatcacgcggacgcccgccggagcatgcgcgccgcgggcctcggccgccggagaagcagcatcagccgccgcgccgccgccggcgtccggaaggagatgtagcgctagctccccgacccgcgaggaaagggaaaggggaatgaccgttacggcgcgcgggaggagcggtggagccgggatgggggagaagggcggcgctcccgggctcggcttcctgagcctcgatcggatgcgcgtcctcctgccgccgctccgcctgccggagaagctgtcggccaggacgctgcggacgcacctcttcactaactaccggatgcgcaaggtgcgggacagctccagctggctcatcccgctctgggtcagctcttgggtcctcgtcgcctccctcatctacctttgcatgagctaccaggccgtcggcaagcgccgggagtctctcgccagcatgtgcgacgagcgcgcgcgcatgctccaggaccaatttaacgtcagcatgaaccacctccaggcgctcgccatcctcgtctccaccttccaccactccaagacaccctccgccatcgaccagaaaacgttcgcgaggtatgcggagaggacggcgttcgagcggccgctgacgagcggggtcgcgtacggggtgcgggtcacgcacgccgagcgggagcagtttgagcgccagcagggatggagcatcaagaagatgtactcctccaagaccaagaatcagtcgcagggacccgggaacgccgaggacgccgaggtgcgggagccggcggaggagtatgctcccgtaatcttcgcgcaggacgcctacaagcacgtcatctccttcgacttgctatccggcgccgatgaccgggacaacgtactccgagctagagaatctgggaagggtgttcttactgctcctttcaagctgctcaataatcgccttggagtgatcttcacctatgctgtgtacaagtatgagcttcctgcaaatgccaggccacaggagcgcattcaggctgctataggctatttaggtggcatatttgatattgaagctcttgttgataagttgcttcaccagctcgcgggcaagcaatccatcatggtgaacgtttacgatactactaatgagagaccaatcagtatgtatggttcgaatgatacaggcagtggcatgtgccaggtcagcacactgaacttcggtgacccttcaaggaagcatgtgatgcactgcaggttcattcagagcccaccttggccttggatggcaataacgacatcaattggaactctagtgattgctttactgattggatacatagttcatgctaccgcaaaacggattgccagagttgaagatgactttcaggagatgagtttgctcaagaagcgcgcagaggatgcagatattgccaagtcacagttcttggctactgtttctcatgagatcagaactccaatgaatggtgtcctagggatgctccaaatgctcatggatactgatttggacacaacacaacaagactatgttagaaccgcacaagccagtggcaaaactctggtatccctcatcaatgaggttcttgatcaggcaaagatcgagtctggtaaacttgagcttgaggtggtaccctttgatcttagaacagtttgtgatgacattttgtctctcttctgtgggaaagcacaggagaaaggactggagttggcagtgtttgtttctgatcaagttccacaaacactaattggcgatcctggaagaataaggcaaatcattacaaatcttgttggaaactctataaaattcacagagaagggtcatatctacttgacggttcatgtcgttgaagagattatgcattgtctggaggttgagacgggaactcagtatacaaataccttaagtggctacccagtggcgaacaggaagcgcagttgggaaaactttcgactttttagtagggaactgaactcatccgagatgccttttgcacccattgcatcagactcaataagcttgatgatatcagttgaagatacgggtgctggaatcccgttcgatgctcaatcccgtgtcttcacccctttcatgcaagtaggtccatccatcgctcgcatacacgggggcactggcattggattaagcatcagcaaatgcttggttggcctcatgaagggagagatcggattttcaagtaaaccccaagttggttctactttcaccttcactgcagtgcttacgagggtccattccagcagaaatgagaataaatcatcagaatttaaagagatcaatgcattggtggtagatcatagaccggtccgtgccaaggttactaagtatcatttgcaaagactgggagttcagactgaattgacaactgacctagatcagtatatttctaaaaataattgtggatcacagattgcaaagcttgtgctcattgacaaagaaacctggctgaaagaatcccactccatgcctcttttggttactaaattgaggaacaaagatcagccagactctacaaagttatttcttttggagaaccctaaaagttctgtcaagagcaattcacatatattcagggaatataacttgaatgtaattatgaagccacttcgtgcaagcatgcttcaggtttcgctacaaagagcattgggtgggatagataaactgcattgcaggaatggagtagtcggcaattcaacactgggcagccttcttcacaagaagcgaatcatagtggttgatgataatattgtaaatctcaaggttgctgcaggcgctctaaagaaatatggcgcggaagtaacttgtgctgacagtgggaaggaagcaatcacactgctgaaacctcctcacaattttgatgcttgtttcatggacatacagatgcctgaaatggatggatttgaagccacaaaaaggattagagtgatggaaagagatctaaatgagcaaatagaacgtggagaagccccaccagaatgcgtaggggttcggcagtggcgaactccaatattagccatgacagcagatgttatccaggcgacacatgaacaatgcttgaaatctgaaatggacggttatgtttccaagccattcgagggcgagcaattgtacagagaagtagctcgctttttcctaaatcaagaccaagttcagtaggtaggcttatatggagtgtaaaatagtggaggatatcagggttcacccatcgaggctgaaagaattttgtcagagatcccatgttcttgagagtgggcatcaatccccagagttaggggccctattaaaacgctagcaacgctgggatgtggcctccagttaggtggaaaacactttaggctggagatggaaccacctatgttcggttccttggtacatctgaccaagctgcaaaactaaatgtgcaatgtcttgaaatcaaggtgcatgtggagctatttactcgacaatctgaggtcaaggcgtgtgaaaaaaaagcccagctgcattcactaaccgcagatgtcctctgccactacaatatagagtagggagagaaattttccttccccagaagttgcttgagccatctgaattctgatcacgagactaccgagagagaagtttaatgctacgaggctttctt

SEQ ID NO: 30940 - DNA, 4272 bp, Zea Mays
ggcctctcctactgttgtgactggtgccacctctcctttcccttcttcctccgtgccccaatccctcttctcccctcgaccagccgagagagcgcccctaccgcagcagctgcagtgctgctctgctctgctctgttctgcccccacttcaccctctcgtctcaccccgcctgcagcttggtcgcttttctccccagtctcctcccctccaccctctcgtctcgtcgcacctcacctgcttggtcgcttttctcccccaatctcctcgtctcccgccggcaccaataccatcctctgtccgctcgctgttgctgttgctattcccgtccgtcccgtgcttctactcgctagtcgtttcgtattcgtatcctctctcctcagccgccctgctcccctcccgtcctctggtgtctggtcaaaccagcggctcccaagatttgccgctgcttccttcctggagaaatcaagcctgtgcggcgagaaatcaagaggaagggggaagagagggagaaagagagaggggcgggggtggaggaaagaaagcctgccccttgcggacgtgcctgctccctcgggggcattcaattggagccaacagtgggcgggtgggcggctgctacagcacggcggcctccataaattagctccccgcgttccggccccttccgccccctgtcgtcgcacccgccccgtgtctcccccgatcggtccgtcgatcacgcggacgcccgccggagcatgcgcgccgcgggcctcggccgccggagaagcagcatcagccgccgcgccgccgccggcgtccggaaggagatgtagcgctagctccccgacccgcgaggaaagggaaaggggaatgaccgttacggcgcgcgggaggagcggtggagccgggatgggggagaagggcggcgctcccgggctcggcttcctgagcctcgatcggatgcgcgtcctcctgccgccgctccgcctgccggagaagctgtcggccaggacgctgcggacgcacctcttcactaactaccggatgcgcaaggtgcgggacagctccagctggctcatcccgctctgggtcagctcttgggtcctcgtcgcctccctcatctacctttgcatgagctaccaggccgtcggcaagcgccgggagtctctcgccagcatgtgcgacgagcgcgcgcgcatgctccaggaccaatttaacgtcagcatgaaccacctccaggcgctcgccatcctcgtctccaccttccaccactccaagacaccctccgccatcgaccagaaaacgttcgcgaggtatgcggagaggacggcgttcgagcggccgctgacgagcggggtcgcgtacggggtgcgggtcacgcacgccgagcgggagcagtttgagcgccagcagggatggagcatcaagaagatgtactcctccaagaccaagaatcagtcgcagggacccgggaacgccgaggacgccgaggtgcgggagccggcggaggagtatgctcccgtaatcttcgcgcaggacgcctacaagcacgtcatctccttcgacttgctatccggcgccgatgaccgggacaacgtactccgagctagagaatctgggaagggtgttcttactgctcctttcaagctgctcaataatcgccttggagtgatcttcacctatgctgtgtacaagtatgagcttcctgcaaatgccaggccacaggagcgcattcaggctgctataggctatttaggtggcatatttgatattgaagctcttgttgataagttgcttcaccagctcgcgggcaagcaatccatcatggtgaacgtttacgatactactaatgagagaccaatcagtatgtatggttcgaatgatacaggcagtggcatgtgccaggtcagcacactgaacttcggtgacccttcaaggaagcatgtgatgcactgcaggttcattcagagcccaccttggccttggatggcaataacgacatcaattggaactctagtgattgctttactgattggatacatagttcatgctaccgcaaaacggattgccagagttgaagatgactttcaggagatgagtttgctcaagaagcgcgcagaggatgcagatattgccaagtcacagttcttggctactgtttctcatgagatcagaactccaatgaatggtgtcctagggatgctccaaatgctcatggatactgatttggacacaacacaacaagactatgttagaaccgcacaagccagtggcaaaactctggtatccctcatcaatgaggttcttgatcaggcaaagatcgagtctggtaaacttgagcttgaggtggtaccctttgatcttagaacagtttgtgatgacattttgtctctcttctgtgggaaagcacaggagaaaggactggagttggcagtgtttgtttctgatcaagttccacaaacactaattggcgatcctggaagaataaggcaaatcattacaaatcttgttggaaactctataaaattcacagagaagggtcatatctacttgacggttcatgtcgttgaagagattatgcattgtctggaggttgagacgggaactcagtatacaaataccttaagtggctacccagtggcgaacaggaagcgcagttgggaaaactttcgactttttagtagggaactgaactcatccgagatgccttttgcacccattgcatcagactcaataagcttgatgatatcagttgaagatacgggtgctggaatcccgttcgatgctcaatcccgtgtcttcacccctttcatgcaagtaggtccatccatcgctcgcatacacgggggcactggcattggattaagcatcagcaaatgcttggttggcctcatgaagggagagatcggattttcaagtaaaccccaagttggttctactttcaccttcactgcagtgcttacgagggtccattccagcagaaatgagaataaatcatcagaatttaaagagatcaatgcattggtggtagatcatagaccggtccgtgccaaggttactaagtatcatttgcaaagactgggagttcagactgaattgacaactgacctagatcagtatatttctaaaaataattgtggatcacagattgcaaagcttgtgctcattgacaaagaaacctggctgaaagaatcccactccatgcctcttttggttactaaattgaggaacaaagatcagccagactctacaaagttatttcttttggagaaccctaaaagttctgtcaagagcaattcacatatattcagggaatataacttgaatgtaattatgaagccacttcgtgcaagcatgcttcaggtttcgctacaaagagcattgggtgggatagataaactgcattgcaggaatggagtagtcggcaattcaacactgggcagccttcttcacaagaagcgaatcatagtggttgatgataatattgtaaatctcaaggttgctgcaggcgctctaaagaaatatggcgcggaagtaacttgtgctgacagtgggaaggaagcaatcacactgctgaaacctcctcacaattttgatgcttgtttcatggacatacagatgcctgaaatggatggatttgaagccacaaaaaggattagagtgatggaaagagatctaaatgagcaaatagaacgtggagaagccccaccagaatgcgtaggggttcggcagtggcgaactccaatattagccatgacagcagatgttatccaggcgacacatgaacaatgcttgaaatctgaaatggacggttatgtttccaagccattcgagggcgagcaattgtacagagaagtagctcgctttttcctaaatcaagaccaagttcagtaggtaggcttatatggagtgtaaaatagtggaggatatcagggttcacccatcgaggctgaaagaattttgtcagagatcccatgttcttgagagtggaaaacactttaggctggagatggaaccacctatgttcggttccttggtacatctgaccaagctgcaaaactaaatgtgcaatgtcttgaaatcaaggtgcatgtggagctatttactcgacaatctgaggtcaaggcgtgtgaaaaaaaagcccagctgcattcactaaccgcagatgtcctctgccactacaatatagagtagggagagaaattttccttccccagaagttgcttgagccatctgaattctgatcacgagactaccgagagagaagtttaatgctacgaggctttctt

SEQ ID NO: 30941 - DNA, 2944 bp, Zea Mays
atcggattttttttgccctttctttttaatccggggttcaattactcatggatgaccgggacaacgtactccgagctagagaatctgggaagggtgttcttactgctcctttcaagctgctcaataatcgccttggagtgatcttcacctatgctgtgtacaagtatgagcttcctgcaaatgccaggccacaggagcgcattcaggctgctataggctatttaggtggcatatttgatattgaagctcttgttgataagttgcttcaccagctcgcgggcaagcaatccatcatggtgaacgtttacgatactactaatgagagaccaatcagtatgtatggttcgaatgatacaggcagtggcatgtgccaggtcagcacactgaacttcggtgacccttcaaggaagcatgtgatgcactgcaggttcattcagagcccaccttggccttggatggcaataacgacatcaattggaactctagtgattgctttactgattggatacatagttcatgctaccgcaaaacggattgccagagttgaagatgactttcaggagatgagtttgctcaagaagcgcgcagaggatgcagatattgccaagtcacagttcttggctactgtttctcatgagatcagaactccaatgaatggtgtcctagggatgctccaaatgctcatggatactgatttggacacaacacaacaagactatgttagaaccgcacaagccagtggcaaaactctggtatccctcatcaatgaggttcttgatcaggcaaagatcgagtctggtaaacttgagcttgaggtggtaccctttgatcttagaacagtttgtgatgacattttgtctctcttctgtgggaaagcacaggagaaaggactggagttggcagtgtttgtttctgatcaagttccacaaacactaattggcgatcctggaagaataaggcaaatcattacaaatcttgttggaaactctataaaattcacagagaagggtcatatctacttgacggttcatgtcgttgaagagattatgcattgtctggaggttgagacgggaactcagtatacaaataccttaagtggctacccagtggcgaacaggaagcgcagttgggaaaactttcgactttttagtagggaactgaactcatccgagatgccttttgcacccattgcatcagactcaataagcttgatgatatcagttgaagatacgggtgctggaatcccgttcgatgctcaatcccgtgtcttcacccctttcatgcaagtaggtccatccatcgctcgcatacacgggggcactggcattggattaagcatcagcaaatgcttggttggcctcatgaagggagagatcggattttcaagtaaaccccaagttggttctactttcaccttcactgcagtgcttacgagggtccattccagcagaaatgagaataaatcatcagaatttaaagagatcaatgcattggtggtagatcatagaccggtccgtgccaaggttactaagtatcatttgcaaagactgggagttcagactgaattgacaactgacctagatcagtatatttctaaaaataattgtggatcacagattgcaaagcttgtgctcattgacaaagaaacctggctgaaagaatcccactccatgcctcttttggttactaaattgaggaacaaagatcagccagactctacaaagttatttcttttggagaaccctaaaagttctgtcaagagcaattcacatatattcagggaatataacttgaatgtaattatgaagccacttcgtgcaagcatgcttcaggtttcgctacaaagagcattgggtgggatagataaactgcattgcaggaatggagtagtcggcaattcaacactgggcagccttcttcacaagaagcgaatcatagtggttgatgataatattgtaaatctcaaggttgctgcaggcgctctaaagaaatatggcgcggaagtaacttgtgctgacagtgggaaggaagcaatcacactgctgaaacctcctcacaattttgatgcttgtttcatggacatacagatgcctgaaatggatggatttgaagccacaaaaaggattagagtgatggaaagagatctaaatgagcaaatagaacgtggagaagccccaccagaatgcgtaggggttcggcagtggcgaactccaatattagccatgacagcagatgttatccaggcgacacatgaacaatgcttgaaatctgaaatggacggttatgtttccaagccattcgagggcgagcaattgtacagagaagtagctcgctttttcctaaatcaagaccaagttcagtaggtaggcttatatggagtgtaaaatagtggaggatatcagggttcacccatcgaggctgaaagaattttgtcagagatcccatgttcttgagagtggaaaacactttaggctggagatggaaccacctatgttcggttccttggtacatctgaccaagctgcaaaactaaatgtgcaatgtcttgaaatcaaggtgcatgtggagctatttactcgacaatctgaggtcaaggcgtgtgaaaaaaaagcccagctgcattcactaaccgcagatgtcctctgccactacaatatagagtagggagagaaattttccttccccagaaggtaccggctgtacatattaggtattggttgtttgtgcaggcatttgttggcattttgttgtgcatcgtcttcggtctgtattgtttgggtcgaagctgtaaaatgtaaatggcgttttcaaagatggaagttttgtttgacaaatacatcggtcgtcatcagcttgtcttcctgagtttctctcctgctactggttctctcccaaccagccaatcactatactgaaggctgcctgttggtgtggctttatctgat

SEQ ID NO: 30942 - DNA, 1189 bp, Zea Mays
gcaccagaaggccgaacacctggcgccggccgccgggagacaatgcctcagctcgcgtgcaatgcaaatgctacgagagcgggcggcttggggtcctctctccgtctcgaccacgccagttcgaccagatgaagtgtccactccgtttgggtaattatactacaaaggacaacgcaagcgaacaaaatactgggcaaattaatggcaagtgaagcgacatatattgaggaattccacaatcgataattgtttccttcccaatctaaaactggactgcagaggaggttgaaggtaccctacaccgatgtagtcacgagaactcatggaaaattgttgcagaggacttcaaatgctacccctggtgaaggtaagagcaaatatgcttgggatttggtgtttggtgcagatggcattggtagcagttcttcaatggcactgggtgctggtctgggtgcctttggtgccagtagcagttctgggatggttcctgaactgtcaagaaggacatctgctagtgctttgcttcatgcagcaagcactcctggtatttctggttctgaactagctgcttatctagatagtgacactgttcagaagtttgatgatgaattcaatctcctagattggtggcatgatcacaaacttacttacccagtactttcaatcctagctaaagatatcatttcagttcctgtctctactgtgagttcagaatcagcatttagtcttgcaggtaggctcattgaggagcggcgtcgtcgacttggctctggaatggtggagatgctttccttgctaaaggattgggaggcagcagatgcaagaatgcagcacacaacagaagataagatccttgaagagtccttcagagatttattcattgattagtctgttctggtattctggacatgtaatgtgggttctggacatgtaacttaattctgagatgaactatgtgatgaaataatgaaaatattgagctgggctgtactcttttcctatctagggtttctcacgaggtgtgagttttacctagataggtttttaacgaggcagccattgcaccagctcaaactaaataatgtgttatgtgttgtgattgtgttagattttgttgtattaatatgttattaactctgatctgatgagaaatatatgtattagatgttcctgcgtttctgtactgagt

SEQ ID NO: 30943 - DNA, 1129 bp, Zea Mays
ccagaaggccgaacacctggcgccggccgccgggagacaatgcctcagctcgcgtgcaatgcaaatgctacgagagcgggcggcttggggtcctctctccgtctcgaccacgccagttcgaccagatgaagtgtccactccgtttgggtaattatactacaaaggacaacgcaagcgaacaaaatactgggcaaattaatggcaagtgaagcgacatatattgaggaattccacaatcgataattgtttccttcccaatctaaaactggactgttgcagaggacttcaaatgctacccctggtgaaggtaagagcaaatatgcttgggatttggtgtttggtgcagatggcattggtagcagttcttcaatggcactgggtgctggtctgggtgcctttggtgccagtagcagttctgggatggttcctgaactgtcaagaaggacatctgctagtgctttgcttcatgcagcaagcactcctggtatttctggttctgaactagctgcttatctagatagtgacactgttcagaagtttgatgatgaattcaatctcctagattggtggcatgatcacaaacttacttacccagtactttcaatcctagctaaagatatcatttcagttcctgtctctactgtgagttcagaatcagcatttagtcttgcaggtaggctcattgaggagcggcgtcgtcgacttggctctggaatggtggagatgctttccttgctaaaggattgggaggcagcagatgcaagaatgcagcacacaacagaagataagatccttgaagagtccttcagagatttattcattgattagtctgttctggtattctggacatgtaatgtgggttctggacatgtaacttaattctgagatgaactatgtgatgaaataatgaaaatattgagctgggctgtactcttttcctatctagggtttctcacgaggtgtgagttttacctagataggtttttaacgaggcagccattgcaccagctcaaactaaataatgtgttatgtgttgtgattgtgttagattttgttgtattaatatgttattaactctgatctgatgagaaatatatgtattagatgttcctgcgtttctgtactgagt

SEQ ID NO: 30944 - DNA, 1187 bp, Zea Mays
cagaaggccgaacacctggcgccggccgccgggagacaatgcctcagctcgcgtgcaatgcaaatgctacgagagcgggcggcttggggtcctctctccgtctcgaccacgccagttcgaccagatgaagtgtccactccgtttgggtaattatactacaaaggacaacgcaagcgaacaaaatactgggcaaattaatggcaagtgaagcgacatatattgaggaattccacaatcgataattgtttccttcccaatctaaaactggactgcagaggaggttgaaggtaccctacaccgatgtagtcacgagaactcatggaaaattgtgttgcagaggacttcaaatgctacccctggtgaaggtaagagcaaatatgcttgggatttggtgtttggtgcagatggcattggtagcagttcttcaatggcactgggtgctggtctgggtgcctttggtgccagtagcagttctgggatggttcctgaactgtcaagaaggacatctgctagtgctttgcttcatgcagcaagcactcctggtatttctggttctgaactagctgcttatctagatagtgacactgttcagaagtttgatgatgaattcaatctcctagattggtggcatgatcacaaacttacttacccagtactttcaatcctagctaaagatatcatttcagttcctgtctctactgtgagttcagaatcagcatttagtcttgcaggtaggctcattgaggagcggcgtcgtcgacttggctctggaatggtggagatgctttccttgctaaaggattgggaggcagcagatgcaagaatgcagcacacaacagaagataagatccttgaagagtccttcagagatttattcattgattagtctgttctggtattctggacatgtaatgtgggttctggacatgtaacttaattctgagatgaactatgtgatgaaataatgaaaatattgagctgggctgtactcttttcctatctagggtttctcacgaggtgtgagttttacctagataggtttttaacgaggcagccattgcaccagctcaaactaaataatgtgttatgtgttgtgattgtgttagattttgttgtattaatatgttattaactctgatctgatgagaaatatatgtattagatgttcctgcgtttctgtactgagt

SEQ ID NO: 30945 - DNA, 1984 bp, Zea Mays
ccccccccccctctaggtgctctcaccagtgcgcaagcctcacctgtcacttgcgctgctctgcctcacctctgctgagcaagaccagcagctgagcagccactccgccagaccagcagccagcctcaaagtgaatttgttgattttgctcacagtgaatcaatctctatttgctcacagtgaatttcaatggcaacaaatagcgaggcattgtctgtcggtcaaagtaatgactcctatgacccactcaaagatcagtgactaaggccaaagtcaaatgatccaggatagaaatatgcatactatgttgaggcgggaaagcgagagctgattcaatgtgctttgtgccccaaacaaataaaaggaggtatcaagagggtgaaacatctacctggtggctatggagacattgtcaagtgtcctaacactgctagagagattgataaagagatgaatgaagctttgaataatgggaagcgggctaggacggtgtacctagatgacgatgtaatggaagatgaagcagtacaagatgatgatgtccaagttatgggaagcaggtcgtgtcagcatcatcaggcttcctcatgtattgtgccaagttctggagcagctgccaaaagaaacaaagcaattttccaattgaagccccacccaattgcagctccaaagaagtccattgcatctatgattcgacgaacacctcaagaggttgtagcatagagacatgcaaagggacctgctcaaactaccataagtgctaccatgaagcctaaggaagaaagaaattctatttgtttggagatagccaagtttttctatgagtgtggtataccattcaatgctgcgaactcaagcctcctactttacatgagctacgtgagcctttacttgctagggttgtcaaagacagatgagaggaagaagcacaaacaaggaatccacgaaggaaaaaactttgatcctttgattttagaagactttgattgggacaatgaatgggttgatccattagctaattcttctcatgttagcaatgctcttggagttgatttcaatttatcatgggatgctcatggtcttaatattgataagtttgatgatggttaataatcatgcataaaagttgtaacttgtgtttgttgaacttgtgttgttgaacttgatctatttctttttatgctaatgttatttggtttgtgaactcaacttatgtatgaacttattctatatttgaaattctatgtcaagtttaaaaagatgtttcaacgttcgtttaaacgtttaaatgttgaaaagttggttcataacgttttaacgttttacctctttaataaccatggttttaagagtttgatctcagtttgaataactctctaacaaagtttagagactctaatctcaaaggaatctaaaaggaagtcaatgtagagcttatgagtcttcaatggagtgagaagagttatcttaaggatggtgagaatgaaaaacacgagatggccgttgagaagagtgggtataaataccctcagctttccaatgatcgctaagttgtgatagtaccgcagaacgtgctgcagggccacgtaagtttttgtggagtggagttgagcacttggttacacacttaaacttgtgtattgtattttctttacggtacaacggttcctatactcaaattccaaatgtaaaaagaatttaaaccatccttttgagttcatcactacatcatgcctttttgccccacactaaatcatgcatgtgtctgcaccgtaaattgtgacctttgaaaaaaaatcttcgtctagcaaaagagaacacattatttcattgagtatggtgttaataaacacagttatatcaaacggtatgcactaaccataactagagataggtacctgttaacgaggtacagtagatatggaatattttcttcatccatcacatgattagtcggtatcctttttacctctaatcaaattct

SEQ ID NO: 30946 - DNA, 1520 bp, Zea Mays
caagcctcctactttacatgagctacgtgagcctttacttgctagggttgtcaaagacagatgagaggaagaagcacaaacaaggaatccacgtaagtattctaaaattgatagccttcctccattttcagtatgtaacatataatcttcttgttcgcgccattttagttgattggtggcttgcatatggtggtcgtactattgaattatataagtttgcaagacggattgttagtctttgtgcttcatcatccggttgtgagcggaattggagtacatttaaatttgtaaatgagctagtcaaattattcaatttctattcgccactacttttttatcctcagttcttctttggttacttttatttgtacttgtagatgcataccaaaagaggaataggttagagcacaaaaggttgaatgatttggtctatctttcatacaacagaaagatggttgatagattttaaaaaatacgtaaggaaggaaaaaactttgatcctttgattttagaagactttgattgggacaatgaatgggttgatccattagctaattcttctcatgttagcaatgctcttggagttgatttcaatttatcatgggatgctcatggtcttaatattgataagtttgatgatggttaataatcatgcataaaagttgtaacttgtgtttgttgaacttgtgttgttgaacttgatctatttctttttatgctaatgttatttggtttgtgaactcaacttatgtatgaacttattctatatttgaaattctatgtcaagtttaaaaagatgtttcaacgttcgtttaaacgtttaaatgttgaaaagttggttcataacgttttaacgttttacctctttaataaccatggttttaagagtttgatctcagtttgaataactctctaacaaagtttagagactctaatctcaaaggaatctaaaaggaagtcaatgtagagcttatgagtcttcaatggagtgagaagagttatcttaaggatggtgagaatgaaaaacacgagatggccgttgagaagagtgggtataaataccctcagctttccaatgatcgctaagttgtgatagtaccgcagaacgtgctgcagggccacgtaagtttttgtggagtggagttgagcacttggttacacacttaaacttgtgtattgtattttctttacggtacaacggttcctatactcaaattccaaatgtaaaaagaatttaaaccatccttttgagttcatcactacatcatgcctttttgccccacactaaatcatgcatgtgtctgcaccgtaaattgtgacctttgaaaaaaaatcttcgtctagcaaaagagaacacattatttcattgagtatggtgttaataaacacagttatatcaaacggtatgcactaaccataactagagataggtacctgttaacgaggtacagtagatatggaatattttcttcatccatcacatgattagtcggtatcctttttacctctaatcaaattct

SEQ ID NO: 30947 - DNA, 3249 bp, Zea Mays
cgtctccttccccggtgttcggaaccccggtccggtcccctcgagctcgaggcctctcgatttgaaatccccacctcaagaccggggaaaaaagattaggagaggaaaaaaaaaaagaacgaagagctctcgatctagggattcccttcccgggtctcgttgctctcctcgtccaaatccccaggccagcctagcggcgcagcctgcacgcccccgccccccggaccatggccgaagaccacctctcctccgcgccgtccgccccatcggcggcggcggccgcggccgcggcggcggtcgggtcctcggtgatcccaatcgtcaacaagctgcaggacatcttcgcgcagctggggagcagctccacgatcgacctgccgcaggtggccgtggtcgggagccagagcagcggcaagtccagcgtcctcgaggcgctcgtcggccgcgacttcctcccgcggggctccgacatctgcacgcgccgccccctcgtgctccagctcgtgcaccagccgcgccgccccgccgacgcagaggccgatgagtggggcgagttcctgcacctctcggggcgtcgcttctacgacttccgcgaaatccgacgcgagatccaggctgaaacagatcgtgaggcaggtggtaacaaaggtgtatcggataggcagatacggttgaagatcttttctccgaatgtccttaacattactttagtcgatttgcctggaatcactaaggtgccagttggtgaccagccaactgatattgaagccagaataaggactatgataatgtcatacatcaggcacaagacatgcatcatcttagctgtttcgccagcaaatgcagatttagcaaactctgatgctcttcaaatggctcgggttgctgatcctgatggttctcgaacaattggtgttatcacaaagttggacataatggacaggggcactgatgcccggaactttctgctgggaaatgtgatccccttaaagcttggctatgttggtgtcgtcaaccgcagccagcaggatatcaactctgacctcagtatcaaggatgctctggctcgtgaagaaaaattcttccgtactcagccagcatatcatggtattgctcagtactgtgggataccacaattagcaaagaagctaaaccagatcctggtccaacatataaaaacagttttgccggggcttaagtcacgcataagcagtcagttgactgctgttgctaaggagcttgctgtgtatggtgatcctgttgattcaaaggctggccaaggtgctaagcttttgaacatactagctaaatactgtgaagctttctcctcaatggtggaaggaaaaaatgaagatatatcgacaattgaactctctggtggagcaaggatccattacattttccagtctatctttgtcaaaagtttagaggaggttgatccttgtgaggatgttacagatgaagatatccgcatggctattcaaaatgcaactggtcctagaagtgctctgtttgtacctgaatccttgtacgtaggcagatcagcagattgcttgatccaagtcttcagtgtgcacaattcatatatgatgaacttgtaaagatgagccatcgctgccttgcaatggagttgcagcagtttcctatactccgcagaagcatggatgaagtcattgggaagtttttgcgggatggacttaagccagcagaaaatatgatagcacacattattgagatggaggaagattacataaacacgtcacacccaaattttattggtggcagcaaggctgttgagcaagcacagcagcaagttaggtctgccaaaatgtcagcagcggtggtaagaaaggacggagtggatgcacaggcttctgagaaaactcaaaaatcacgcgcgatcttgggtagaagtggtgtaaatggagtagttactgaccacatccagggggtacggcctgctgctgaggcagagagaccaggatcttctggtagtggaagcacatctttctggaatcaaatatttacttccaatgaggaccgaacacatcctcctgcaagagataacacaacaaacaaatcttatgctgtgcctgcacccaatctggaacattcattctccacgatacagttaagagagccaccagtcgtcctgaagccttcagaacaccagtctgagcaggaggcgcttgaaatagcgatcacaaagttgctattgaagtcatattacaatattgtcaggaaaaatgtggaggacttaataccaaaagcagttatgcatttcttggttaatcatacaaaaagggcgctgcataattaccttataacaaaactttatagagatgatcttttggaagacttgctcaaagaacctgatgagataaccataaagaggaagcagatacgtgaaaatctcaaggtccttcaacaagcttacaaaactttggacgagataccacttgacgcagaggcagtagagaggggtggatactccctggattctgatgcgattggtctgccaagggcccatgggctttcttcatccctccacggattcaacgatggaagctcaccatattcaaccccgaagcagtcaaggtcaaggaggtcaaaccattctggcgagcagcttcctttcaaccccaatatgagtggcaatggtttttgatgccaccctcctacgttacaagacggccaaccagattggttatggaaccaaccaaatgtgcagcaagcacaccttattcaagtttgttggcaccaatagatatatgttatttctagttaaattctttgtagcgctgcgccgatgaagcctaacatggtgcgagttttgttgtttcgccttttgtacagtatatatctttgcccagtcatttcgtcatgatatgatatcaagtgatgggtatagttttgttcggacccagggaaagcaatgggaaaaaaatctactaggtgtgtagcagtacccagcgtctgagtgactgttacggatttgccttgcaaaatagacatggctggtatggcggcggcaaaaacaaaatgtggcataaaattgatctcgttttcttaatgttttcatttgatttgatagccctttgttaataattatgcatttgtaaatcagcattaacaaccgctgaatattttttttctttctctgcctttttttgttgttgtagtactgctataagcattctgtttgatttgaatcaatatcccataattcaatatgctgatgacaccctc

SEQ ID NO: 30948 - DNA, 3215 bp, Zea Mays
cggaaccccggtccggtcccctcgagctcgaggcctctcgatttgaaatccccacctcaagaccggggaaaaaagattaggagaggaaaaaaaaaaagaacgaagagctctcgatctagggattcccttcccgggtctcgttgctctcctcgtccaaatccccaggccagcctagcggcgcagcctgcacgcccccgccccccggaccatggccgaagaccacctctcctccgcgccgtccgccccatcggcggcggcggccgcggccgcggcggcggtcgggtcctcggtgatcccaatcgtcaacaagctgcaggacatcttcgcgcagctggggagcagctccacgatcgacctgccgcaggtggccgtggtcgggagccagagcagcggcaagtccagcgtcctcgaggcgctcgtcggccgcgacttcctcccgcggggctccgacatctgcacgcgccgccccctcgtgctccagctcgtgcaccagccgcgccgccccgccgacgcagaggccgatgagtggggcgagttcctgcacctctcggggcgtcgcttctacgacttccgcgaaatccgacgcgagatccaggctgaaacagatcgtgaggcaggtggtaacaaaggtgtatcggataggcagatacggttgaagatcttttctccgaatgtccttaacattactttagtcgatttgcctggaatcactaaggtgccagttggtgaccagccaactgatattgaagccagaataaggactatgataatgtcatacatcaggcacaagacatgcatcatcttagctgtttcgccagcaaatgcagatttagcaaactctgatgctcttcaaatggctcgggttgctgatcctgatggttctcgaacaattggtgttatcacaaagttggacataatggacaggggcactgatgcccggaactttctgctgggaaatgtgatccccttaaagcttggctatgttggtgtcgtcaaccgcagccagcaggatatcaactctgacctcagtatcaaggatgctctggctcgtgaagaaaaattcttccgtactcagccagcatatcatggtattgctcagtactgtgggataccacaattagcaaagaagctaaaccagatcctggtccaacatataaaaacagttttgccggggcttaagtcacgcataagcagtcagttgactgctgttgctaaggagcttgctgtgtatggtgatcctgttgattcaaaggctggccaaggtgctaagcttttgaacatactagctaaatactgtgaagctttctcctcaatggtggaaggaaaaaatgaagatatatcgacaattgaactctctggtggagcaaggatccattacattttccagtctatctttgtcaaaagtttagagatgaagatatccgcatggctattcaaaatgcaactggtcctagaagtgctctgtttgtacctgaagttccatttgaagtccttgtacgtaggcagatcagcagattgcttgatccaagtcttcagtgtgcacaattcatatatgatgaacttgtaaagatgagccatcgctgccttgcaatggagttgcagcagtttcctatactccgcagaagcatggatgaagtcattgggaagtttttgcgggatggacttaagccagcagaaaatatgatagcacacattattgagatggaggaagattacataaacacgtcacacccaaattttattggtggcagcaaggctgttgagcaagcacagcagcaagttaggtctgccaaaatgtcagcagcggtggtaagaaaggacggagtggatgcacaggcttctgagaaaactcaaaaatcacgcgcgatcttgggtagaagtggtgtaaatggagtagttactgaccacatccagggggtacggcctgctgctgaggcagagagaccaggatcttctggtagtggaagcacatctttctggaatcaaatatttacttccaatgaggaccgaacacatcctcctgcaagagataacacaacaaacaaatcttatgctgtgcctgcacccaatctggaacattcattctccacgatacagttaagagagccaccagtcgtcctgaagccttcagaacaccagtctgagcaggaggcgcttgaaatagcgatcacaaagttgctattgaagtcatattacaatattgtcaggaaaaatgtggaggacttaataccaaaagcagttatgcatttcttggttaatcatacaaaaagggcgctgcataattaccttataacaaaactttatagagatgatcttttggaagacttgctcaaagaacctgatgagataaccataaagaggaagcagatacgtgaaaatctcaaggtccttcaacaagcttacaaaactttggacgagataccacttgacgcagaggcagtagagaggggtggatactccctggattctgatgcgattggtctgccaagggcccatgggctttcttcatccctccacggattcaacgatggaagctcaccatattcaaccccgaagcagtcaaggtcaaggaggtcaaaccattctggcgagcagcttcctttcaaccccaatatgagtggcaatggtttttgatgccaccctcctacgttacaagacggccaaccagattggttatggaaccaaccaaatgtgcagcaagcacaccttattcaagtttgttggcaccaatagatatatgttatttctagttaaattctttgtagcgctgcgccgatgaagcctaacatggtgcgagttttgttgtttcgccttttgtacagtatatatctttgcccagtcatttcgtcatgatatgatatcaagtgatgggtatagttttgttcggacccagggaaagcaatgggaaaaaaatctactaggtgtgtagcagtacccagcgtctgagtgactgttacggatttgccttgcaaaatagacatggctggtatggcggcggcaaaaacaaaatgtggcataaaattgatctcgttttcttaatgttttcatttgatttgatagccctttgttaataattatgcatttgtaaatcagcattaacaaccgctgaatattttttttctttctctgcctttttttgttgttgtagtactgctataagcattctgtttgatttgaatcaatatcccataattcaatatgctgatgacaccctc

SEQ ID NO: 30949 - DNA, 3219 bp, Zea Mays
gtcccctcgagctcgaggcctctcgatttgaaatccccacctcaagaccggggaaaaaagattaggagaggaaaaaaaaaaagaacgaagagctctcgatctagggattcccttcccgggtctcgttgctctcctcgtccaaatccccaggccagcctagcggcgcagcctgcacgcccccgccccccggaccatggccgaagaccacctctcctccgcgccgtccgccccatcggcggcggcggccgcggccgcggcggcggtcgggtcctcggtgatcccaatcgtcaacaagctgcaggacatcttcgcgcagctggggagcagctccacgatcgacctgccgcaggtggccgtggtcgggagccagagcagcggcaagtccagcgtcctcgaggcgctcgtcggccgcgacttcctcccgcggggctccgacatctgcacgcgccgccccctcgtgctccagctcgtgcaccagccgcgccgccccgccgacgcagaggccgatgagtggggcgagttcctgcacctctcggggcgtcgcttctacgacttccgcgaaatccgacgcgagatccaggctgaaacagatcgtgaggcaggtggtaacaaaggtgtatcggataggcagatacggttgaagatcttttctccgaatgtccttaacattactttagtcgatttgcctggaatcactaaggtgccagttggtgaccagccaactgatattgaagccagaataaggactatgataatgtcatacatcaggcacaagacatgcatcatcttagctgtttcgccagcaaatgcagatttagcaaactctgatgctcttcaaatggctcgggttgctgatcctgatggttctcgaacaattggtgttatcacaaagttggacataatggacaggggcactgatgcccggaactttctgctgggaaatgtgatccccttaaagcttggctatgttggtgtcgtcaaccgcagccagcaggatatcaactctgacctcagtatcaaggatgctctggctcgtgaagaaaaattcttccgtactcagccagcatatcatggtattgctcagtactgtgggataccacaattagcaaagaagctaaaccagatcctggtccaacatataaaaacagttttgccggggcttaagtcacgcataagcagtcagttgactgctgttgctaaggagcttgctgtgtatggtgatcctgttgattcaaaggctggccaaggtgctaagcttttgaacatactagctaaatactgtgaagctttctcctcaatggtggaaggaaaaaatgaagatatatcgacaattgaactctctggtggagcaaggatccattacattttccagtctatctttgtcaaaagtttagaggaggttgatccttgtgaggatgttacagatgaagatatccgcatggctattcaaaatgcaactggtcctagaagtgctctgtttgtacctgaagttccatttgaagtccttgtacgtaggcagatcagcagattgcttgatccaagtcttcagtgtgcacaattcatatatgatgaacttgtaaagatgagccatcgctgccttgcaatggagttgcagcagtttcctatactccgcagaagcatggatgaagtcattgggaagtttttgcgggatggacttaagccagcagaaaatatgatagcacacattattgagatggaggaagattacataaacacgtcacacccaaattttattggtggcagcaaggctgttgagcaagcacagcagcaagttaggtctgccaaaatgtcagcagcggtggacggagtggatgcacaggcttctgagaaaactcaaaaatcacgcgcgatcttgggtagaagtggtgtaaatggagtagttactgaccacatccagggggtacggcctgctgctgaggcagagagaccaggatcttctggtagtggaagcacatctttctggaatcaaatatttacttccaatgaggaccgaacacatcctcctgcaagagataacacaacaaacaaatcttatgctgtgcctgcacccaatctggaacattcattctccacgatacagttaagagagccaccagtcgtcctgaagccttcagaacaccagtctgagcaggaggcgcttgaaatagcgatcacaaagttgctattgaagtcatattacaatattgtcaggaaaaatgtggaggacttaataccaaaagcagttatgcatttcttggttaatcatacaaaaagggcgctgcataattaccttataacaaaactttatagagatgatcttttggaagacttgctcaaagaacctgatgagataaccataaagaggaagcagatacgtgaaaatctcaaggtccttcaacaagcttacaaaactttggacgagataccacttgacgcagaggcagtagagaggggtggatactccctggattctgatgcgattggtctgccaagggcccatgggctttcttcatccctccacggattcaacgatggaagctcaccatattcaaccccgaagcagtcaaggtcaaggaggtcaaaccattctggcgagcagcttcctttcaaccccaatatgagtggcaatggtttttgatgccaccctcctacgttacaagacggccaaccagattggttatggaaccaaccaaatgtgcagcaagcacaccttattcaagtttgttggcaccaatagatatatgttatttctagttaaattctttgtagcgctgcgccgatgaagcctaacatggtgcgagttttgttgtttcgccttttgtacagtatatatctttgcccagtcatttcgtcatgatatgatatcaagtgatgggtatagttttgttcggacccagggaaagcaatgggaaaaaaatctactaggtgtgtagcagtacccagcgtctgagtgactgttacggatttgccttgcaaaatagacatggctggtatggcggcggcaaaaacaaaatgtggcataaaattgatctcgttttcttaatgttttcatttgatttgatagccctttgttaataattatgcatttgtaaatcagcattaacaaccgctgaatattttttttctttctctgcctttttttgttgttgtagtactgctataagcattctgtttgatttgaatcaatatcccataattcaatatgctgatgacaccctc

SEQ ID NO: 30950 - DNA, 3161 bp, Zea Mays
aaaaaagattaggagaggaaaaaaaaaaagaacgaagagctctcgatctagggattcccttcccgggtctcgttgctctcctcgtccaaatccccaggccagcctagcggcgcagcctgcacgcccccgccccccggaccatggccgaagaccacctctcctccgcgccgtccgccccatcggcggcggcggccgcggccgcggcggcggtcgggtcctcggtgatcccaatcgtcaacaagctgcaggacatcttcgcgcagctggggagcagctccacgatcgacctgccgcaggtggccgtggtcgggagccagagcagcggcaagtccagcgtcctcgaggcgctcgtcggccgcgacttcctcccgcggggctccgacatctgcacgcgccgccccctcgtgctccagctcgtgcaccagccgcgccgccccgccgacgcagaggccgatgagtggggcgagttcctgcacctctcggggcgtcgcttctacgacttccgcgaaatccgacgcgagatccaggctgaaacagatcgtgaggcaggtggtaacaaaggtgtatcggataggcagatacggttgaagatcttttctccgaatgtccttaacattactttagtcgatttgcctggaatcactaaggtgccagttggtgaccagccaactgatattgaagccagaataaggactatgataatgtcatacatcaggcacaagacatgcatcatcttagctgtttcgccagcaaatgcagatttagcaaactctgatgctcttcaaatggctcgggttgctgatcctgatggttctcgaacaattggtgttatcacaaagttggacataatggacaggggcactgatgcccggaactttctgctgggaaatgtgatccccttaaagcttggctatgttggtgtcgtcaaccgcagccagcaggatatcaactctgacctcagtatcaaggatgctctggctcgtgaagaaaaattcttccgtactcagccagcatatcatggtattgctcagtactgtgggataccacaattagcaaagaagctaaaccaggtatggtccaacatataaaaacagttttgccggggcttaagtcacgcataagcagtcagttgactgctgttgctaaggagcttgctgtgtatggtgatcctgttgattcaaaggctggccaaggtgctaagcttttgaacatactagctaaatactgtgaagctttctcctcaatggtggaaggaaaaaatgaagatatatcgacaattgaactctctggtggagcaaggatccattacattttccagtctatctttgtcaaaagtttagaggaggttgatccttgtgaggatgttacagatgaagatatccgcatggctattcaaaatgcaactggtcctagaagtgctctgtttgtacctgaatccttgtacgtaggcagatcagcagattgcttgatccaagtcttcagtgtgcacaattcatatatgatgaacttgtaaagatgagccatcgctgccttgcaatggagttgcagcagtttcctatactccgcagaagcatggatgaagtcattgggaagtttttgcgggatggacttaagccagcagaaaatatgatagcacacattattgagatggaggaagattacataaacacgtcacacccaaattttattggtggcagcaaggctgttgagcaagcacagcagcaagttaggtctgccaaaatgtcagcagcggtggtaagaaaggacggagtggatgcacaggcttctgagaaaactcaaaaatcacgcgcgatcttgggtagaagtggtgtaaatggagtagttactgaccacatccagggggtacggcctgctgctgaggcagagagaccaggatcttctggtagtggaagcacatctttctggaatcaaatatttacttccaatgaggaccgaacacatcctcctgcaagagataacacaacaaacaaatcttatgctgtgcctgcacccaatctggaacattcattctccacgatacagttaagagagccaccagtcgtcctgaagccttcagaacaccagtctgagcaggaggcgcttgaaatagcgatcacaaagttgctattgaagtcatattacaatattgtcaggaaaaatgtggaggacttaataccaaaagcagttatgcatttcttggttaatcatacaaaaagggcgctgcataattaccttataacaaaactttatagagatgatcttttggaagacttgctcaaagaacctgatgagataaccataaagaggaagcagatacgtgaaaatctcaaggtccttcaacaagcttacaaaactttggacgagataccacttgacgcagaggcagtagagaggggtggatactccctggattctgatgcgattggtctgccaagggcccatgggctttcttcatccctccacggattcaacgatggaagctcaccatattcaaccccgaagcagtcaaggtcaaggaggtcaaaccattctggcgagcagcttcctttcaaccccaatatgagtggcaatggtttttgatgccaccctcctacgttacaagacggccaaccagattggttatggaaccaaccaaatgtgcagcaagcacaccttattcaagtttgttggcaccaatagatatatgttatttctagttaaattctttgtagcgctgcgccgatgaagcctaacatggtgcgagttttgttgtttcgccttttgtacagtatatatctttgcccagtcatttcgtcatgatatgatatcaagtgatgggtatagttttgttcggacccagggaaagcaatgggaaaaaaatctactaggtgtgtagcagtacccagcgtctgagtgactgttacggatttgccttgcaaaatagacatggctggtatggcggcggcaaaaacaaaatgtggcataaaattgatctcgttttcttaatgttttcatttgatttgatagccctttgttaataattatgcatttgtaaatcagcattaacaaccgctgaatattttttttctttctctgcctttttttgttgttgtagtactgctataagcattctgtttgatttgaatcaatatcccataattcaatatgctgatgacaccctc

SEQ ID NO: 30951 - DNA, 3134 bp, Zea Mays
aagagctctcgatctagggattcccttcccgggtctcgttgctctcctcgtccaaatccccaggccagcctagcggcgcagcctgcacgcccccgccccccggaccatggccgaagaccacctctcctccgcgccgtccgccccatcggcggcggcggccgcggccgcggcggcggtcgggtcctcggtgatcccaatcgtcaacaagctgcaggacatcttcgcgcagctggggagcagctccacgatcgacctgccgcaggtggccgtggtcgggagccagagcagcggcaagtccagcgtcctcgaggcgctcgtcggccgcgacttcctcccgcggggctccgacatctgcacgcgccgccccctcgtgctccagctcgtgcaccagccgcgccgccccgccgacgcagaggccgatgagtggggcgagttcctgcacctctcggggcgtcgcttctacgacttccgcgaaatccgacgcgagatccaggctgaaacagatcgtgaggcaggtggtaacaaaggtgtatcggataggcagatacggttgaagatcttttctccgaatgtccttaacattactttagtcgatttgcctggaatcactaaggtgccagttggtgaccagccaactgatattgaagccagaataaggactatgataatgtcatacatcaggcacaagacatgcatcatcttagctgtttcgccagcaaatgcagatttagcaaactctgatgctcttcaaatggctcgggttgctgatcctgatggttctcgaacaattggtgttatcacaaagttggacataatggacaggggcactgatgcccggaactttctgctgggaaatgtgatccccttaaagcttggctatgttggtgtcgtcaaccgcagccagcaggatatcaactctgacctcagtatcaaggatgctctggctcgtgaagaaaaattcttccgtactcagccagcatatcatggtattgctcagtactgtgggataccacaattagcaaagaagctaaaccagatcctggtccaacatataaaaacagttttgccggggcttaagtcacgcataagcagtcagttgactgctgttgctaaggagcttgctgtgtatggtgatcctgttgattcaaaggctggccaaggtgctaagcttttgaacatactagctaaatactgtgaagctttctcctcaatggtggaaggaaaaaatgaagatatatcgacaattgaactctctggtggagcaaggatccattacattttccagtctatctttgtcaaaagtttagaggaggttgatccttgtgaggatgttacagatgaagatatccgcatggctattcaaaatgcaactggtcctagaagtgctctgtttgtacctgaagttccatttgaagtccttgtacgtaggcagatcagcagattgcttgatccaagtcttcagtgtgcacaattcatatatgatgaacttgtaaagatgagccatcgctgccttgcaatggagttgcagcagtttcctatactccgcagaagcatggatgaagtcattgggaagtttttgcgggatggacttaagccagcagaaaatatgatagcacacattattgagatggaggaagattacataaacacgtcacacccaaattttattggtggcagcaaggctgttgagcaagcacagcagcaagttaggtctgccaaaatgtcagcagcggtggtaagaaaggacggagtggatgcacaggcttctgagaaaactcaaaaatcacgcgcgatcttgggtagaagtggtgtaaatggagtagttactgaccacatccagggggtacggcctgctgctgaggcagagagaccaggatcttctggtagtggaagcacatctttctggaatcaaatatttacttccaatgaggaccgaacacatcctcctgcaagagataacacaacaaacaaatcttatgctgtgcctgcacccaatctggaacattcattctccacgatacagttaagagagtcgtcctgaagccttcagaacaccagtctgagcaggaggcgcttgaaatagcgatcacaaagttgctattgaagtcatattacaatattgtcaggaaaaatgtggaggacttaataccaaaagcagttatgcatttcttggttaatcatacaaaaagggcgctgcataattaccttataacaaaactttatagagatgatcttttggaagacttgctcaaagaacctgatgagataaccataaagaggaagcagatacgtgaaaatctcaaggtccttcaacaagcttacaaaactttggacgagataccacttgacgcagaggcagtagagaggggtggatactccctggattctgatgcgattggtctgccaagggcccatgggctttcttcatccctccacggattcaacgatggaagctcaccatattcaaccccgaagcagtcaaggtcaaggaggtcaaaccattctggcgagcagcttcctttcaaccccaatatgagtggcaatggtttttgatgccaccctcctacgttacaagacggccaaccagattggttatggaaccaaccaaatgtgcagcaagcacaccttattcaagtttgttggcaccaatagatatatgttatttctagttaaattctttgtagcgctgcgccgatgaagcctaacatggtgcgagttttgttgtttcgccttttgtacagtatatatctttgcccagtcatttcgtcatgatatgatatcaagtgatgggtatagttttgttcggacccagggaaagcaatgggaaaaaaatctactaggtgtgtagcagtacccagcgtctgagtgactgttacggatttgccttgcaaaatagacatggctggtatggcggcggcaaaaacaaaatgtggcataaaattgatctcgttttcttaatgttttcatttgatttgatagccctttgttaataattatgcatttgtaaatcagcattaacaaccgctgaatattttttttctttctctgcctttttttgttgttgtagtactgctataagcattctgtttgatttgaatcaatatcccataattcaatatgctgatgacaccctc

SEQ ID NO: 30952 - DNA, 785 bp, Zea Mays
atgatgacccatcagatgacaggacgcactccaccaccaaaccgaggaagacgacgctcagccgctcaggaatcgaaggagcgacgaagctaaaggagggcgcatctaagccgaattgaagcatgagggaatcgattaatcgtccgcctacgccgagcgcggtggaggatcgggacaaggagccttctctcgtagaaatcattaacatcaagagagtggagagaaggagaagctgacggagctcctccgcgagcggctcgtcgagtgcggctggatggatgagatgaaggcattctgcagggactatgtaaggaagaaaggaagaaataatgtgagggtagatgacctcattcatgttattgttccgaaaggaagagcatcagtgcctgcttcggtgaaggcagaactcctgcaacgtatccggtccttcatggctaccacacttcggtagtcatttatcgtgacggttggagctacatgtaccattgtacgaacactgggaggtcgatcttgttggggaccaagggtgcaggtactgagcatgaaaaggatcagtgtgatcttcatgatgctatcgacatgttcctcgtcagacaggcggttggcgtgatttcaggtgtagcaacacggagttataaccctgaatactgtaccgttaaaggaaccttgtagtttgtaatgctacattgccttatcattgtatcaacagatgctttatttcacaattagaaaacagaaacacaatcttgatataaatgactacactaatgtgcatcatgtgaaac

SEQ ID NO: 30953 - DNA, 704 bp, Zea Mays
atgatgacccatcagatgacaggacgcactccaccaccaaaccgaggaagacgacgctcagccgctcaggaatcgaaggagcgacgaagctaaaggagggcgcatctaagccgaattgaagcattttgtagagagtggagagaaggagaagctgacggagctcctccgcgagcggctcgtcgagtgcggctggatggatgagatgaaggcattctgcagggactatgtaaggaagaaaggaagaaataatgtgagggtagatgacctcattcatgttattgttccgaaaggaagagcatcagtgcctgcttcggtgaaggcagaactcctgcaacgtatccggtccttcatggctaccacacttcggtagtcatttatcgtgacggttggagctacatgtaccattgtacgaacactgggaggtcgatcttgttggggaccaagggtgcaggtactgagcatgaaaaggatcagtgtgatcttcatgatgctatcgacatgttcctcgtcagacaggcggttggcgtgatttcaggtgtagcaacacggagttataaccctgaatactgtaccgttaaaggaaccttgtagtttgtaatgctacattgccttatcattgtatcaacagatgctttatttcacaattagaaaacagaaacacaatcttgatataaatgactacactaatgtgcatcatgtgaaac

SEQ ID NO: 30954 - DNA, 1515 bp, Zea Mays
agcgaggccgtttctgatgcgccagtccctttcagaattcctttgatgccggtcgagaataagaagccatttgctcctccaagggaggtacatgtccaggttacacattcaatgccacctcacaagattgaaattttcaagtcacttgatgattgggctagagataatatcttgacacatctcaagccagtcgagaagtgttggcagccacaggatttcctccctgacccagcatctgaaggatttcatgatgaagttaaggagctcagagaacgtgccaaggaaatccctgatgattattttgtttgtttggtgggagacatgattaccgaggaagctctaccaacataccagactatgcttaacaccctcgatggtgtcagagatgagacaggtgcaagccccactgcctgggctgtttggacgagggcatggactgctgaggagaacaggcatggtgatctgctcaacaagtatatgtacctcactgggagggtggatatgaggcagattgagaagacaattcagtatcttattggctctggaatggatcctaggactgagaataatccttatcttggtttcatctacacctccttccaagagcgggcgaccttcatctcacacgggaacactgctcgtcacgccaaggactttggcgacttaaagcttgcacaaatctgcggcatcattgcctcggatgagaagcgacatgaaactgcgtacaccaagatcgtggagaagctgtttgagatcgaccctgatggtaccgtggtcgctctggctgacatgatgaggaagaagatctcaatgcctgcccacctgatgtttgacgggcaggacgacaagctgttcgagcacttctccatggtcgcgcagaggcttggcgtttacactgccagggactacgccgacatcctcgagttcctcgtcgacaggtggaaggtggtgaacctgactggtctgtcgggtgaagggaacaaggcgcaggactacctttgcacccttgcttcaaggatcaggaggctggaggagagggcccagagcagagccaagaaagcaggcacgctgcctttcagctgggtatacggtagggacgtccaactgtgagatcggaaacctgctgcggactgcttagacaagacctgctgtgtctgcgttacatagttctccaggttttgaccagatggtcccgtgtcgtcttatagagcgataggagaacgtgttggtctgtggtgtagctttgttttttatttttatttttctgttttgatgtacaacctgtggccgcatgaactggggcgtggagatgggagcgaccatgccgttctttgtctgtcgctggcggtgtgtttcggtatgttatttcagtcgttcagatctgttaaaaattttgtgagctatgcagttcagttcagctctgttctgttcgttagataccctaggtttctccgtggcctgaattctgcagtgtcgaaaacaaagcagagctccaactgaagtgtagctgactac

SEQ ID NO: 30955 - DNA, 1473 bp, Zea Mays
gttcgtcctcgtcctccccgcgtatcatctgctctgcattctagaattgctcccggagtggtaccatgccatcttttaaatgcactgcacagggtagctggcgtgctaccccttagtctacggttgaagtgcctaactgcctatagtcatgggggtgattcatgttactactgtttagtctgcagcaggccagcagcggaggtgaagacgcgtgtttgctgtcgagggtcgagaataagaagccatttgctcctccaagggaggtacatgtccaggttacacattcaatgccacctcacaagattgaaattttcaagtcacttgatgattgggctagagataatatcttgacacatctcaagccagtcgagaagtgttggcagccacaggatttcctccctgacccagcatctgaaggatttcatgatgaagttaaggagctcagagaacgtgccaaggaaatccctgatgattattttgtttgtttggtgggagacatgattaccgaggaagctctaccaacataccagactatgcttaacaccctcgatggtgtcagagatgagacaggtgcaagccccactgcctgggctgtttggacgagggcatggactgctgaggagaacaggcatggtgatctgctcaacaagtatatgtacctcactgggagggtggatatgaggcagattgagaagacaattcagtatcttattggctctggaatggatcctaggactgagaataatccttatcttggtttcatctacacctccttccaagagcgggcgaccttcatctcacacgggaacactgctcgtcacgccaaggactttggcgacttaaagcttgcacaaatctgcggcatcattgcctcggatgagaagcgacatgaaactgcgtacaccaagatcgtggagaagctgtttgagatcgaccctgatggtaccgtggtcgctctggctgacatgatgaggaagaagatctcaatgcctgcccacctgatgtttgacgggcaggacgacaagctgttcgagcacttctccatggtcgcgcagaggcttggcgtttacactgccagggactacgccgacatcctcgagttcctcgtcgacaggtggaaggtggtgaacctgactggtctgtcgggtgaagggaacaaggcgcaggactacctttgcacccttgcttcaaggatcaggaggctggaggagagggcccagagcagagccaagaaagcaggcacgctgcctttcagctgggtatacggtagggaccgaccatgccgttctttgtctgtcgctggcggtgtgtttcggtatgttatttcagtcgttcagatctgttaaaaattttgtgagctatgcagttcagttcagctctgttctgttcgttagataccctaggtttctccgtggcctgaattctgcagtgtcgaaaacaaagcagagctccaactgaagtgtagctgactac

SEQ ID NO: 30956 - DNA, 1524 bp, Zea Mays
ctactgtttagtctgcagcaggccagcagcggaggtgaagacgcgtgtttgctgtcgagggtcgagaataagaagccatttgctcctccaagggaggtacatgtccaggttacacattcaatgccacctcacaagattgaaattttcaagtcacttgatgattgggctagagataatatcttgacacatctcaagccagtcgagaagtgttggcagccacaggatttcctccctgacccagcatctgaaggatttcatgatgaagttaaggagctcagagaacgtgccaaggaaatccctgatgattattttgtttgtttggtgggagacatgattaccgaggaagctctaccaacataccagactatgcttaacaccctcgatggtgtcagagatgagacaggtgcaagccccactgcctgggctgtttggacgagggcatggactgctgaggagaacaggcatggtgatctgctcaacaagtatatgtacctcactgggagggtggatatgaggcagattgagaagacaattcagtatcttattggctctggaatggatcctaggactgagaataatccttatcttggtttcatctacacctccttccaagagcgggcgaccttcatctcacacgggaacactgctcgtcacgccaaggactttggcgacttaaagcttgcacaaatctgcggcatcattgcctcggatgagaagcgacatgaaactgcgtacaccaagatcgtggagaagctgtttgagatcgaccctgatggtaccgtggtcgctctggctgacatgatgaggaagaagatctcaatgcctgcccacctgatgtttgacgggcaggacgacaagctgttcgagcacttctccatggtcgcgcagaggcttggcgtttacactgccagggactacgccgacatcctcgagttcctcgtcgacaggtggaaggtggtgaacctgactggtctgtcgggtgaagggaacaaggcgcaggactacctttgcacccttgcttcaaggatcaggaggctggaggagagggcccagagcagagccaagaaagcaggcacgctgcctttcagctgggtatacggtagggacgtccaactgtgagatcggaaacctgctgcggactgcttagacaagacctgctgtgtctgcgttacatagttctccaggttttgaccagatggtcccgtgtcgtcttatagagcgataggagaacgtgttggtctgtggtgtagctttgttttttatttttatttttctgttttgatgtacaacctgtggccgcatgaactggggcgtggagatgggagcgaccatgccgttctttgtctgtcgctggcggtgtgtttcggtatgttatttcagtcgttcagatctgttaaaaattttgtgagctatgcagttcagttcagctctgttctgttcgttagataccctaggtttctccgtggcctgaattctgcagtgtcgaaaacaaagcagagctccaactgaagtgtagctgactac

SEQ ID NO: 30957 - DNA, 1491 bp, Zea Mays
ctgaaaggttagagaaacatagccagggtcgagaataagaagccatttgctcctccaagggaggtacatgtccaggttacacattcaatgccacctcacaagattgaaattttcaagtcacttgatgattgggctagagataatatcttgacacatctcaagccagtcgagaagtgttggcagccacaggatttcctccctgacccagcatctgaaggatttcatgatgaagttaaggagctcagagaacgtgccaaggaaatccctgatgattattttgtttgtttggtgggagacatgattaccgaggaagctctaccaacataccagactatgcttaacaccctcgatggtgtcagagatgagacaggtgcaagccccactgcctgggctgtttggacgagggcatggactgctgaggagaacaggcatggtgatctgctcaacaagtatatgtacctcactgggagggtggatatgaggcagattgagaagacaattcagtatcttattggctctggaatggatcctaggactgagaataatccttatcttggtttcatctacacctccttccaagagcgggcgaccttcatctcacacgggaacactgctcgtcacgccaaggactttggcgacttaaagcttgcacaaatctgcggcatcattgcctcggatgagaagcgacatgaaactgcgtacaccaagatcgtggagaagctgtttgagatcgaccctgatggtaccgtggtcgctctggctgacatgatgaggaagaagatctcaatgcctgcccacctgatgtttgacgggcaggacgacaagctgttcgagcacttctccatggtcgcgcagaggcttggcgtttacactgccagggactacgccgacatcctcgagttcctcgtcgacaggtggaaggtggtgaacctgactggtctgtcgggtgaagggaacaaggcgcaggactacctttgcacccttgcttcaaggatcaggaggctggaggagagggcccagagcagagccaagaaagcaggcacgctgcctttcagctgggtatacggtagggacgtccaactgtgagatcggaaacctgctgcggactgcttagacaagacctgctgtgtctgcgttacatagttctccaggttttgaccagatggtcccgtgtcgtcttatagagcgataggagaacgtgttggtctgtggtgtagctttgttttttatttttatttttctgttttgatgtacaacctgtggccgcatgaactggggcgtggagatgggagcgaccatgccgttctttgtctgtcgctggcggtgtgtttcggtatgttatttcagtcgttcagatctgttaaaaattttgtgagctatgcagttcagttcagctctgttctgttcgttagataccctaggtttctccgtggcctgaattctgcagtgtcgaaaacaaagcagagctccaactgaagtgtagctgactac

SEQ ID NO: 30958 - DNA, 1545 bp, Zea Mays
attaatatgtacatggtgggggccacgtcataatttgtatgggacacagcatacgactgtagtcatgtaatatggaaaagggtcgagaataagaagccatttgctcctccaagggaggtacatgtccaggttacacattcaatgccacctcacaagattgaaattttcaagtcacttgatgattgggctagagataatatcttgacacatctcaagccagtcgagaagtgttggcagccacaggatttcctccctgacccagcatctgaaggatttcatgatgaagttaaggagctcagagaacgtgccaaggaaatccctgatgattattttgtttgtttggtgggagacatgattaccgaggaagctctaccaacataccagactatgcttaacaccctcgatggtgtcagagatgagacaggtgcaagccccactgcctgggctgtttggacgagggcatggactgctgaggagaacaggcatggtgatctgctcaacaagtatatgtacctcactgggagggtggatatgaggcagattgagaagacaattcagtatcttattggctctggaatggatcctaggactgagaataatccttatcttggtttcatctacacctccttccaagagcgggcgaccttcatctcacacgggaacactgctcgtcacgccaaggactttggcgacttaaagcttgcacaaatctgcggcatcattgcctcggatgagaagcgacatgaaactgcgtacaccaagatcgtggagaagctgtttgagatcgaccctgatggtaccgtggtcgctctggctgacatgatgaggaagaagatctcaatgcctgcccacctgatgtttgacgggcaggacgacaagctgttcgagcacttctccatggtcgcgcagaggcttggcgtttacactgccagggactacgccgacatcctcgagttcctcgtcgacaggtggaaggtggtgaacctgactggtctgtcgggtgaagggaacaaggcgcaggactacctttgcacccttgcttcaaggatcaggaggctggaggagagggcccagagcagagccaagaaagcaggcacgctgcctttcagctgggtatacggtagggacgtccaactgtgagatcggaaacctgctgcggactgcttagacaagacctgctgtgtctgcgttacatagttctccaggttttgaccagatggtcccgtgtcgtcttatagagcgataggagaacgtgttggtctgtggtgtagctttgttttttatttttatttttctgttttgatgtacaacctgtggccgcatgaactggggcgtggagatgggagcgaccatgccgttctttgtctgtcgctggcggtgtgtttcggtatgttatttcagtcgttcagatctgttaaaaattttgtgagctatgcagttcagttcagctctgttctgttcgttagataccctaggtttctccgtggcctgaattctgcagtgtcgaaaacaaagcagagctccaactgaagtgtagctgactac

SEQ ID NO: 30959 - DNA, 1481 bp, Zea Mays
aatgatcttaatatctgagtgcgcataaatatgttcattgcaaacaaactggagagtactgaggctcatcatcgcaggccttctgcttctgggggtcgagaataagaagccatttgctcctccaagggaggtacatgtccaggttacacattcaatgccacctcacaagattgaaattttcaagtcacttgatgattgggctagagataatatcttgacacatctcaagccagtcgagaagtgttggcagccacaggatttcctccctgacccagcatctgaaggatttcatgatgaagttaaggagctcagagaacgtgccaaggaaatccctgatgattattttgtttgtttggtgggagacatgattaccgaggaagctctaccaacataccagactatgcttaacaccctcgatggtgtcagagatgagacaggtgcaagccccactgcctgggctgtttggacgagggcatggactgctgaggagaacaggcatggtgatctgctcaacaagtatatgtacctcactgggagggtggatatgaggcagattgagaagacaattcagtatcttattggctctggaatggatcctaggactgagaataatccttatcttggtttcatctacacctccttccaagagcgggcgaccttcatctcacacgggaacactgctcgtcacgccaaggactttggcgacttaaagcttgcacaaatctgcggcatcattgcctcggatgagaagcgacatgatgaggaagaagatctcaatgcctgcccacctgatgtttgacgggcaggacgacaagctgttcgagcacttctccatggtcgcgcagaggcttggcgtttacactgccagggactacgccgacatcctcgagttcctcgtcgacaggtggaaggtggtgaacctgactggtctgtcgggtgaagggaacaaggcgcaggactacctttgcacccttgcttcaaggatcaggaggctggaggagagggcccagagcagagccaagaaagcaggcacgctgcctttcagctgggtatacggtagggacgtccaactgtgagatcggaaacctgctgcggactgcttagacaagacctgctgtgtctgcgttacatagttctccaggttttgaccagatggtcccgtgtcgtcttatagagcgataggagaacgtgttggtctgtggtgtagctttgttttttatttttatttttctgttttgatgtacaacctgtggccgcatgaactggggcgtggagatgggagcgaccatgccgttctttgtctgtcgctggcggtgtgtttcggtatgttatttcagtcgttcagatctgttaaaaattttgtgagctatgcagttcagttcagctctgttctgttcgttagataccctaggtttctccgtggcctgaattctgcagtgtcgaaaacaaagcagagctccaactgaagtgtagctgactac

SEQ ID NO: 30960 - DNA, 1355 bp, Zea Mays
tggtgttgaattgcaatgcaggtaaacgcttacccagtatatggggacaaagggaaggcaaaagatccattctttggcctgacgatgggatcaggatctcaatcttcatatgatattttcagatggttctgtgtggaggctgggagctcttctagtcctaaagtgcttttaattcacggcttgccatcgcaggcatactcttaccgcaatgtgatgcctgtactggcggacaaatatcatgccattgcttttgattggctcgggtttggattttctgataagcctcaaccaaaatatggttttgactatacacttgatgagtatacttcatccttggaatttctagtcaatgctgttgctcctgataagctctctattgttgttcagtcaaatatgctagtgaacaccaagacaaattgaatcatcttgtactagtgaatccaccaataaccgataaacatttgaaccttccatccaccctggcttcgttcagcaacttcttgttgggtgagatattttctcaggatcctctcagagctagtgataaggtattgactagttgtggtccatacatgatgaaggaagaagatgctatggtgtatagaaggccataccttgtctctggttcctcggggtttgcacttaatgcaataagcaaagctatgaaaaaggaccttaaggcttatattgaatccatgagaagcatattaagaagcagttcgtggaaaacaaagacaacagtatgctggggcatgagagatcgttggctaagctatgatggggtggaagaattttttggaggcctaaaccagaagattgtagaactgccaatggcggggcaccatgtgcaggaggaccgtggtgaagaattaggcaatataatcaaaagtatactgagatgatgactgcggatcgcgtgcagggggtgaggctctagagcgtgccaagaaccagatgctttacgaggggtcaaaatgtggcgaagcaataggatacgaaaaattgagtatgatgcacggggcaatccgctctatgcatcgatttttatcaagagaacgccaccctgaactcaagcggcgatgtggaacattttcagacaacaacaattgattgacgaccttgcgaaatctttttttttctcctaaactaaagtagcagaactaatgaaatatatccaaaaaaaaggaaggaagaaagaaaaggtatcgccgtgcgtgcatgtatcggtcacttgtacgttgctcgtgcagtgcagtgcagtgcaacgacggcgacgttctgttggaatcgtcgtggtcgttttgcatgtcaaccatcaatcaaaggagtaaaagaacgagactaggttgggtttc

SEQ ID NO: 30961 - DNA, 1252 bp, Zea Mays
tggtgttgaattgcaatgcaggtaaacgcttacccagtatatggggacaaagggaaggcaaaagatccattctttggcctgacgatgggatcaggatctcaatcttcatatgatattttcagatggttctgtgtggaggctgggagctcttctagtcctaaagtgcttttaattcacggcttgccatcgcaggcatactcttaccgcaatgtgatgcctgtactggcggacaaatatcatgccattgcttttgattggctcgggctactttgctccggttgcagtcaaatatgctagtgaacaccaagacaaattgaatcatcttgtactagtgaatccaccaataaccgataaacatttgaaccttccatccaccctggcttcgttcagcaacttcttgttgggtgagatattttctcaggatcctctcagagctagtgataaggtattgactagttgtggtccatacatgatgaaggaagaagatgctatggtgtatagaaggccataccttgtctctggttcctcggggtttgcacttaatgcaataagcaaagctatgaaaaaggaccttaaggcttatattgaatccatgagaagcatattaagaagcagttcgtggaaaacaaagacaacagtatgctggggcatgagagatcgttggctaagctatgatggggtggaagaattttttggaggcctaaaccagaagattgtagaactgccaatggcggggcaccatgtgcaggaggaccgtggtgaagaattaggcaatataatcaaaagtatactgagatgatgactgcggatcgcgtgcagggggtgaggctctagagcgtgccaagaaccagatgctttacgaggggtcaaaatgtggcgaagcaataggatacgaaaaattgagtatgatgcacggggcaatccgctctatgcatcgatttttatcaagagaacgccaccctgaactcaagcggcgatgtggaacattttcagacaacaacaattgattgacgaccttgcgaaatctttttttttctcctaaactaaagtagcagaactaatgaaatatatccaaaaaaaaggaaggaagaaagaaaaggtatcgccgtgcgtgcatgtatcggtcacttgtacgttgctcgtgcagtgcagtgcagtgcaacgacggcgacgttctgttggaatcgtcgtggtcgttttgcatgtcaaccatcaatcaaaggagtaaaagaacgagactaggttgggtttc

SEQ ID NO: 30962 - DNA, 1654 bp, Zea Mays
ggaaggtgttggttgcacttgtaggctcatgcgagcgttctatgcccagagatagcagtaagttcacatgctcgtcaagagcatcgcctacaatgaatgcaccatttgtcagggttttagatatgaccagaagacaagtacattagtctctaggatctcattcctacatgctaggtgtacttgagcaaagggatcaagaacaaaatctataaggtgatatttaacatttatttaagaggaaatgcatcactaagggtgtgattggttatagtcccaacatggccatgatggagggagcagcaccaggctggcatgagcctggttgagttgacatagaaccttcttgtttggatgcggtttctctatagggccaggctgcttttcgccaatgtttggttggctgcgtcacgaagaagataaaaataaaaatatattttatataacaaatgagatctagttttgttcgtagcctggctggggagcgaagctcacaccccacgtagcatctcagcctagctgaggggggaagttcaacctagcccgacacctcctccagttatccaaacacggagtcctctgcatccacgggacctggcccggaccagatgcaggcatccaatcacgctctaaggttactattatattacctaaacacttatcttgtgtgcaaacaatcagctaaacaacaattacaatttataaggcagcctaagcgaactgaaaccatgaaaaaactgtagcatattcaacactgctaacacaacataggaaatgttgtgtacagatgcccaccctattcaccttccagtggaacaactctcaagtcagtacgccaagtcgacaaacagtattgaacaacatctatgattgcagtgacatatattgccgactttctaatcaaaccatgtagacgattatcaacgagatcatgttgttaaatgggcagctaacaagtagcaacagaaaaaaaaatagaggtacattgtgaagcactaacacacatatcgtatagcttttttatgctagcaaggtaaactgtaacaaacagaacctacattatgatggtacctcattgagtgcagggtaaacatcacaactgatagagaatgaacaggacagcagtccaacagagcaaaacaataaattactatgtgtggaatgaaatgagaactatgaatcttcatacaaaacaacttgattgatccactaaaatgaatgaacagaagagggggggggcagtccaacagagcaaaacaataaattaccatgtgtggaatgaaatgagaactatggatcttcatacaaaacaactttattgctgcactaaaatgaataactgaacatggtttataaaattcacactggatataacatcaaacctgctgtttctaggtttgtttcggaatcatcatctattatgatagtaatactttctgtcgtggtcaactgctgtcttgcctgaaacatgaaggaaaccaaccagataaacattttcttcatattaaatgatcatataagaatcaaaagcagaacaaaataatatgcatatccacagatagacaccagaacaatgcacaagtacgtactcgaggcagtggtcttgaagaatagataacggcatcatcatcgatggcttccacatcgatggggcaac

SEQ ID NO: 30963 - DNA, 450 bp, Zea Mays
atggcttctcaaagactcaagctccgcttcaaccaaaaaggactaaaacatcacacctttctaccgctttccccaattccccaaccactaaacatatgggtcgacagagatccccggaattccatccaaaaaccttgtatcccgcccagatatcgtctaaaaccccccgaatcggagatgattccagaagggttagacccagtcgcaccgcatgaagggaaaaccaagaggagggaacacctgctgtcctggtggtgctcgccgccggcaaagtgtgtgcgtgtgggtgggtgggggtggagctcggccgcggggggagaggatgcggccgccgccctctacggatggatcgggactcgggagcatgaagggaagaaagaaaatagaaagagtataggccgaccgatgggcctacgtgtcagtgtgtcacatgtttctgttaacagataa

SEQ ID NO: 30964 - DNA, 3950 bp, Zea Mays
gccgctgcaaccgcatgtacggcagcctccccttctcgagtcgccagtggccacgccgggacgggcgcgcttttcccctgccgcgccaaagcaggaaacaaagcaacggccaggaaggagtcacgcgcgaggcgaaaagcgggcgggtggaagaagcgtgggcgcctgggttaacgctcccgcagcgagtgatctgagagcggtagaggccggccggaaccgcggaagaggagaggccgggggatccgacgatggcggggaacgagtggatcaatgggtacctggaggcgatcctcgacagccgcacctcgtcgggcggcggcggaggcggcggcggcggggacccaaggtcgccggtggcgggggcgtcgccgacgaagggggcgagcccccgcggcccgcacatgaacttcaacccctcgcactacttcgtcgaggaggtggtcaagggcgtcgacgagagcgacctccaccggacgtggatcaaggtcgtagccacgcgcaacgcccgggagcgcagcaccaggctcgagaacatgtgctggcggatctggcacctcgcgcgcaagaagaaacagcttgatggtgaagtgacgatagatcaagcatgcatggttggttgtggtgctttcagaattcagaaccccacacttaactgtgatgtcacatctaaaaagaaactttttgctgatctgcagtgtttcattgctgttcatataaagctggagttggagggcatccagagaatctcggcacgccggaaggaacaggagcaggtgcgtcgtgaggcgacggaggacctggccgacgatctgtcagaaggcgagaaaggggacaccctcgctgagcttgtgccggttgaggcggccaagaagaagttccagaggaacttctctgaccttaccgtctggtctgacgacaataatgagaagaagctttacattgtgctcatcagtgttcatggtcttgttcgtggcgaaaacatggaactaggtcgtgattctgacaccggtggccaggtgaaatatgttgtcgaacttgcaagagcaatgtcaatgatgcctggagtgtacagggtggacctcttcactcgtcaagtgtcatctcctgacgtggactggagctatggtgagccgaccgagatgttatgctccggttccaacgatggagaggggatgggtgagagtgccggagcctacattgtgcgcataccgtgtggaccacgggataaatacctcaagaaggaagcactgtggccttacctccaagagtttgtcgatggagctcttgcgcatatccttaacatgtccaaggctctgggagaacaggttggaaatgggaggccagtactgccttacgtgatacatggacactatgccgacgctggagatgttgctgctctcctttccggtgcgctcaatgtacccatggtgctcactggtcactcacttgggaggaacaagctggagcaactcctgaagcaagggcgcatgtccaaggaggagatcgattcaacatacaagatcatgaggcgtatcgagggtgaggagctggccctggatgcgtcagagcttgtcatcaccagcacaaggcaggagattgatgaacagtggggattgtacgacggatttgatgtcaagcttgagaaagtgttgagggcacgggcgaggcgtggggttagctgccatggtcgtttcatgcctaggatggtggtgattcctccaggaatggatttcagcaatgttgtggttcatgaagacattgatggggatggtgacagcaaagatgatatcgttggtttggagggtgcttcaccgaagtcaatgcccccaatttgggccgaggtgatgcggttcctaaccaatcctcacaagccgatgatcctggcgctgtcgaggccagacccgaagaagaacatcactaccctcgtcaaagcctttggagagtgccccccactcagggaacttgcaaaccttactctaatcatgggaaacagagatgacatcgacgatatgtctgctggcaatgccagtgtcctcaccacagttctgaagctgatagacaagtatgatctgtatggaagcgtagcgtttcctaagcatcacaatcaggctgatgtcccggagatctaccgcctcgcggccaaaatgaagggtgtcttcatcaaccctgctctcgttgagccgttcggtctcaccctgatcgaggctgcagcacacggacttccaatagtcgctaccaagaatggtggtccggtcgacattacaactgcactgagcaacggactgctcgttgacccgcacgaccagaacgccatcgctcaagcactgctgaagctcgtagcagataagaacctgtggcaggaatgccggagaaacgggctgcgaaacatccacctttactcatggccggagcactgccgcacttacctcaccagggttgctgggtgccggttaaggaacccgaggtggctgaaggacacaccagcagatgccggagctgatgaggaggagttcctggaggattccatggacgctcaggacctgtcactccgtctgtccatcgacggtgagaagagctcgctgaacaccaacgacccattgtcgtcggacccgcaggatcaggtgcagaagatcatgaacaagatcaatcagtcgtcagcacttccgccgtccatgtcctcagtcgcagacggtgccaagaacgcaaccgaggccacgggcagcaccttgaacaagtacccactcctgcgccggcgccggcgcctgttcgtcatcgccgtggactgctaccaagacgacggccgtgctagcaagaagatgctgcaggtgatccaggaagttttcagagcagtccgatcggactcccagatgtccaagatctcagggttcgcgctgtccactgcgatgccgttgtccgaaacactccagcttctgcagctcggcaagatcccagcgaccgacttcgacaccctcatctgtggcagtggcagcgaggtctactatcctggcacagtgaactgcgtcgacgctgaaggaaagctgcgcccagaccaggactatctgatgcacatcagccaccgctggtcccatgacggcgcgaagcagaccatagcgaagctcatggccactcaggacggttcaggcgacactgtcgagctggacccggcgtctagtaatgcacactgcttcacgttccttatcaaagatcccaaaaaggtgaaaacggtcgatgagatgagggagaggctgaggatgcgtggtctccggtgccacatcatgtactgcaggaactcgacaaggcttcaggttgtccctctgctagcatcaaggtcacaggcactcaggtatctttttgtgcgctggggcctatatgtggggaacatgtatctgatcactggggaacatggcgacaccgatcatgaggagatgctatctggattacacaagactgtgatcgtccggggtgtcaccgagaaaggttcggaagggctgctgaggagcccaggaagctacaagaaggacgacgtcgtgccgtctgagacccccttggctgcgtacacgactggtgagatgaaggccgatgagatcatgcgagctctgaaacaagtctccaagacttccagcggcatgtgaattagctgctgggaaaggtcgatctctaatatattcttcttgttcataactcaaacggcagacacattttctccttttcttcactagtactacataaataacttgtgaacagtaccgagggtgtatatattgcagtgacaaataactaggacactgctaattctactgctggctcaccactgtcttggtgagatgtagccctacaagattgtatactgtgtatttctctagtcgcagctaggcatactttgttttttaaaaaaagaacttcagtttactgcatactcaaggaaacgaaatgacagtaaaagtcag

SEQ ID NO: 30965 - DNA, 3750 bp, Zea Mays
cgggacgggcgcgcttttcccctgccgcgccaaagcaggaaacaaagcaacggccaggaaggagtcacgcgcgaggcgaaaagcgggcgggtggaagaagcgtgggcgcctgggttaacgctcccgcagcgagtgatctgagagcggtagaggccggccggaaccgcggaagaggagaggccgggggatccgacgatggcggggaacgagtggatcaatgggtacctggaggcgatcctcgacagccgcacctcgtcgggcggcggcggaggcggcggcggcggggacccaaggtcgccggtggcgggggcgtcgccgacgaagggggcgagcccccgcggcccgcacatgaacttcaacccctcgcactacttcgtcgaggaggtggtcaagggcgtcgacgagagcgacctccaccggacgtggatcaaggtcgtagccacgcgcaacgcccgggagcgcagcaccaggctcgagaacatgtgctggcggatctggcacctcgcgcgcaagaagaaacagctggagttggagggcatccagagaatctcggcacgccggaaggaacaggagcaggtgcgtcgtgaggcgacggaggacctggccgacgatctgtcagaaggcgagaaaggggacaccctcgctgagcttgtgccggttgaggcggccaagaagaagttccagaggaacttctctgaccttaccgtctggtctgacgacaataatgagaagaagctttacattgtgctcatcagtgttcatggtcttgttcgtggcgaaaacatggaactaggtcgtgattctgacaccggtggccaggtgaaatatgttgtcgaacttgcaagagcaatgtcaatgatgcctggagtgtacagggtggacctcttcactcgtcaagtgtcatctcctgacgtggactggagctatggtgagccgaccgagatgttatgctccggttccaacgatggagaggggatgggtgagagtgccggagcctacattgtgcgcataccgtgtggaccacgggataaatacctcaagaaggaagcactgtggccttacctccaagagtttgtcgatggagctcttgcgcatatccttaacatgtccaaggctctgggagaacaggttggaaatgggaggccagtactgccttacgtgatacatggacactatgccgacgctggagatgttgctgctctcctttccggtgcgctcaatgtacccatggtgctcactggtcactcacttgggaggaacaagctggagcaactcctgaagcaagggcgcatgtccaaggaggagatcgattcaacatacaagatcatgaggcgtatcgagggtgaggagctggccctggatgcgtcagagcttgtcatcaccagcacaaggcaggagattgatgaacagtggggattgtacgacggatttgatgtcaagcttgagaaagtgttgagggcacgggcgaggcgtggggttagctgccatggtcgtttcatgcctaggatggtggtgattcctccaggaatggatttcagcaatgttgtggttcatgaagacattgatggggatggtgacagcaaagatgatatcgttggtttggagggtgcttcaccgaagtcaatgcccccaatttgggccgaggtgatgcggttcctaaccaatcctcacaagccgatgatcctggcgctgtcgaggccagacccgaagaagaacatcactaccctcgtcaaagcctttggagagtgccccccactcagggaacttgcaaaccttactctaatcatgggaaacagagatgacatcgacgatatgtctgctggcaatgccagtgtcctcaccacagttctgaagctgatagacaagtatgatctgtatggaagcgtagcgtttcctaagcatcacaatcaggctgatgtcccggagatctaccgcctcgcggccaaaatgaagggtgtcttcatcaaccctgctctcgttgagccgttcggtctcaccctgatcgaggctgcagcacacggacttccaatagtcgctaccaagaatggtggtccggtcgacattacaactgcactgagcaacggactgctcgttgacccgcacgaccagaacgccatcgctcaagcactgctgaagctcgtagcagataagaacctgtggcaggaatgccggagaaacgggctgcgaaacatccacctttactcatggccggagcactgccgcacttacctcaccagggttgctgggtgccggttaaggaacccgaggtggctgaaggacacaccagcagatgccggagctgatgaggaggagttcctggaggattccatggacgctcaggacctgtcactccgtctgtccatcgacggtgagaagagctcgctgaacaccaacgacccattgtcgtcggacccgcaggatcaggtgcagaagatcatgaacaagatcaatcagtcgtcagcacttccgccgtccatgtcctcagtcgcagacggtgccaagaacgcaaccgaggccacgggcagcaccttgaacaagtacccactcctgcgccggcgccggcgcctgttcgtcatcgccgtggactgctaccaagacgacggccgtgctagcaagaagatgctgcaggtgatccaggaagttttcagagcagtccgatcggactcccagatgtccaagatctcagggttcgcgctgtccactgcgatgccgttgtccgaaacactccagcttctgcagctcggcaagatcccagcgaccgacttcgacaccctcatctgtggcagtggcagcgaggtctactatcctggcacagtgaactgcgtcgacgctgaaggaaagctgcgcccagaccaggactatctgatgcacatcagccaccgctggtcccatgacggcgcgaagcagaccatagcgaagctcatggccactcaggacggttcaggcgacactgtcgagctggacccggcgtctagtaatgcacactgcttcacgttccttatcaaagatcccaaaaaggtgaaaacggtcgatgagatgagggagaggctgaggatgcgtggtctccggtgccacatcatgtactgcaggaactcgacaaggcttcaggttgtccctctgctagcatcaaggtcacaggcactcaggtatctttttgtgcgctggggcctatatgtggggaacatgtatctgatcactggggaacatggcgacaccgatcatgaggagatgctatctggattacacaagactgtgatcgtccggggtgtcaccgagaaaggttcggaagggctgctgaggagcccaggaagctacaagaaggacgacgtcgtgccgtctgagacccccttggctgcgtacacgactggtgagatgaaggccgatgagatcatgcgagctctgaaacaagtctccaagacttccagcggcatgtgaattagctgctgggaaaggtcgatctctaatatattcttcttgttcataactcaaacggcagacacattttctccttttcttcactagtactacataaataacttgtgaacagtaccgagggtgtatatattgcagtgacaaataactaggacactgctaattctactgctggctcaccactgtcttggtgagatgtagccctacaagattgtatactgtgtatttctctagtcgcagctaggcatactttgttttttaaaaaaagaacttcagtttactgcatactcaaggaaacgaaatgacagtaaaagtcag

SEQ ID NO: 30966 - DNA, 1682 bp, Zea Mays
gggcgcctgggttaacgctcccgcagcgagtgatctgagagcggtagaggccggccggaaccgcggaagaggagaggccgggggatccgacgatggcggggaacgagtggatcaatgggtacctggaggcgatcctcgacagccgcacctcgtcgggcggcggcggaggcggcggcggcggggacccaaggaacccgaggtggctgaaggacacaccagcagatgccggagctgatgaggaggagttcctggaggattccatggacgctcaggacctgtcactccgtctgtccatcgacggtgagaagagctcgctgaacaccaacgacccattgtcgtcggacccgcaggatcaggtgcagaagatcatgaacaagatcaatcagtcgtcagcacttccgccgtccatgtcctcagtcgcagacggtgccaagaacgcaaccgaggccacgggcagcaccttgaacaagtacccactcctgcgccggcgccggcgcctgttcgtcatcgccgtggactgctaccaagacgacggccgtgctagcaagaagatgctgcaggtgatccaggaagttttcagagcagtccgatcggactcccagatgtccaagatctcagggttcgcgctgtccactgcgatgccgttgtccgaaacactccagcttctgcagctcggcaagatcccagcgaccgacttcgacaccctcatctgtggcagtggcagcgaggtctactatcctggcacagtgaactgcgtcgacgctgaaggaaagctgcgcccagaccaggactatctgatgcacatcagccaccgctggtcccatgacggcgcgaagcagaccatagcgaagctcatggccactcaggacggttcaggcgacactgtcgagctggacccggcgtctagtaatgcacactgcttcacgttccttatcaaagatcccaaaaaggtgaaaacggtcgatgagatgagggagaggctgaggatgcgtggtctccggtgccacatcatgtactgcaggaactcgacaaggcttcaggttgtccctctgctagcatcaaggtcacaggcactcaggtatctttttgtgcgctggggcctatatgtggggaacatgtatctgatcactggggaacatggcgacaccgatcatgaggagatgctatctggattacacaagactgtgatcgtccggggtgtcaccgagaaaggttcggaagggctgctgaggagcccaggaagctacaagaaggacgacgtcgtgccgtctgagacccccttggctgcgtacacgactggtgagatgaaggccgatgagatcatgcgagctctgaaacaagtctccaagacttccagcggcatgtgaattagctgctgggaaaggtcgatctctaatatattcttcttgttcataactcaaacggcagacacattttctccttttcttcactagtactacataaataacttgtgaacagtaccgagggtgtatatattgcagtgacaaataactaggacactgctaattctactgctggctcaccactgtcttggtgagatgtagccctacaagattgtatactgtgtatttctctagtcgcagctaggcatactttgttttttaaaaaaagaacttcagtttactgcatactcaaggaaacgaaatgacagtaaaagtcag

SEQ ID NO: 30967 - DNA, 2627 bp, Zea Mays
atcatttaaggtgtttgtgcttgatttaatttcttacatttttaaataaaatgagtgattaaagttttcgaaaaaagtcaatagtatcatattgtgaatataaatattttgaataagacgaatgaacagagttagtacttaatagaattgatactcgtaccagcaagtttctgtactttgtttttcctaagtttgtacttctttatcggaagtataaagtataggtgaccgaccagtgtttctttacctttcattttccgtgctcgatttttttagatcgaacaccaggccaggaggaggagcaggcgcggctaaacgcgcgagtgcacgtagcaaaccgcatcgtcgaaagaggagagagaaataataaatatacgacgagggggcatggcccccctctcccttattctattcctccacaccgatcactcgctgctcccctctctcgccggagctccgggccggatggcggcggcagcagcagctcctcccgcctccgtgatcgcgtgatggacgcacacaccgccgcgctccgccgatggacgacgccggaaggccaccaccacacgctcccgtggcggtgaccgcctccgcctccgcctccgccaccgccgcgcccgcccctccccaaccctcagccactgctgccgtcgacaggtcctcccccgaccccgacgcgctctatgaagaggggatgtggcaacaaatggccatggacagcggtgccactatgcaacctgggtcatatcctgagcgaccaggtgaacccgactgcacttactatctcaggactggattgtgtcgatttggcatgagctgccgattcaatcatcctccggataggaatctggctattgcctctgccagaatgaagggagaatatcctgagagagcgggacagccagagtgtcagtattatctgaagactggaacatgcaagtttggccctacatgcaaatttcaccatcccagggaaaaggctggaattgcagggagggtgcagctaaacacatcaggatatccactccgcccgaatgaaaaggagtgtgcatattatttaaaaacaggacactgtaaatatgcaaatacttgtaaattccaccatccggaacttttcaatgtggtgccttcgtcacgtggttctcctatttatacctctgtacattcctctgcgagtgctggtccgcagtcctatactggaactatgccaagctgggcttttccacgagcttcttttataccaagccctaggtggcaaagtccttcaaattatgcgccgatgattgtacctcagggccttgttcaaatgcagagctggaattcatatactggtcagctgcagtcacctggggctcaacaaacttatggaagttcacaacaaggagaagctagtacaggaaatcagggaatgctgtcaccatacagacccagttcgtttcccgtgcctcaatatgcgctgcagagagagaatgtatttcctgagagacctgatgaaccagaatgccaatattacatgaagacaggagattgtaaattcggtgcagtgtgcaagttccatcatccccgggtgagatcactgccccctccagattgtgtcttaagtccaatgggtcttccactacgtccagtaagtcattaaacccttcaccgtttctgttgtatcggtcctttgtttaggcattttatcaattatatatgaatatgttgattgttgtactacctcgtctctttatgggataggctccgcaaattttcttgtggaaacacatcatcatttagaatatgcatcaatgcgactgcttggttgttgtagtctagaaatttgaaaatcaaatatgtgctatgctgtttataaagaggctctcgtgtcagacaaagaaagtgaaggatgttccatacacgtttctcagccagatgattgatttcagtggggcatgatttctgctaatgatgattgatttattctcctagtcctagcaataaatgcacaacttattaaagacactaagatgcatattcaaggtaccactattagaccattctttatatgtgttggttgagctctggtttatcataaaaaactttagagggctgtgcaacaaatctcactgtggcttgcaggcatcgttgttgatacctggacactgattagagcaatgtcaaaagttacaaatttgctaggacagggtgaagaactgtgcaaattctattctcgttacggcatctgcaagttcggcgccaactgtaaattcgaccatcctacagtggttgctccaatggtctatgcttgacctacttcgatttataaaatccatggcactgcctcaggcgctgtgaatgtttctcctaacttcctgccgggatcaaagttctgtaaattgagttgctaccggagatgtacagcccctttttttttggttaatccagatctttgggaataactctcgaaaccgaataaactttggatacagagatgccagttttcaggtgcctgcactatttgacattattgctgcacctatggttccgaacagaggaacagttgaattctctggaggggctgaagcctgcacttgtgcagttgagattatatcatcgcgtcgatttattttggaacctgtattcag

SEQ ID NO: 30968 - DNA, 2068 bp, Zea Mays
atcatttaaggtgtttgtgcttgatttaatttcttacatttttaaataaaatgagtgattaaagttttcgaaaaaagtcaatagtatcatattgtgaatataaatattttgaataagacgaatgaacagagttagtacttaatagaattgatactcgtaccagcaagtttctgtactttgtttttcctaagtttgtacttctttatcggaagtataaagtataggtgaccgaccagtgtttctttacctttcattttccgtgctcgatttttttagatcgaacaccaggccaggaggaggagcaggcgcggctaaacgcgcgagtgcacgtagcaaaccgcatcgtcgaaagaggagagagaaataataaatatacgacgagggggcatggcccccctctcccttattctattcctccacaccgatcactcgctgctcccctctctcgccggagctccgggccggatggcggcggcagcagcagctcctcccgcctccgtgatcgcgtgatggacgcacacaccgccgcgctccgccgatggacgacgccggaaggccaccaccacacgctcccgtggcggtgaccgcctccgcctccgcctccgccaccgccgcgcccgcccctccccaaccctcagccactgctgccgtcgacaggtcctcccccgaccccgacgcgctctatgaagaggggatgtggcaacaaatggccatggacagcggtgccactatgcaacctgggtcatatcctgagcgaccaggtgaacccgactgcacttactatctcaggactggattgtgtcgatttggcatgagctgccgattcaatcatcctccggataggaatctggctattgcctctgccagaatgaagggagaatatcctgagagagcgggacagccagagtgtcagtattatctgaagactggaacatgcaagtttggccctacatgcaaatttcaccatcccagggaaaaggctggaattgcagggagggtgcagctaaacacatcaggatatccactccgcccgaatgaaaaggagtgtgcatattatttaaaaacaggacactgtaaatatgcaaatacttgtaaattccaccatccggaacttttcaatgtggtgccttcgtcacgtggttctcctatttatacctctgtacattcctctgcgagtgctggtccgcagtcctatactggaactatgccaagctgggcttttccacgagcttcttttataccaagccctaggtggcaaagtccttcaaattatgcgccgatgattgtacctcagggccttgttcaaatgcagagctggaattcatatactggtcagctgcagtcacctggggctcaacaaacttatggaagttcacaacaaggagaagctagtacaggaaatcagggaatgctgtcaccatacagacccagttcgtttcccgtgcctcaatatgcgctgcagagagagaatgtatttcctgagagacctgatgaaccagaatgccaatattacatgaagacaggagattgtaaattcggtgcagtgtgcaagttccatcatccccgggtgagatcactgccccctccagattgtgtcttaagtccaatgggtcttccactacgtccaggtgaagaactgtgcaaattctattctcgttacggcatctgcaagttcggcgccaactgtaaattcgaccatcctacagtggttgctccaatggtctatgcttgacctacttcgatttataaaatccatggcactgcctcaggcgctgtgaatgtttctcctaacttcctgccgggatcaaagttctgtaaattgagttgctaccggagatgtacagcccctttttttttggttaatccagatctttgggaataactctcgaaaccgaataaactttggatacagagatgccagttttcaggtgcctgcactatttgacattattgctgcacctatggttccgaacagaggaacagttgaattctctggaggggctgaagcctgcacttgtgcagttgagattatatcatcgcgtcgatttattttggaacctgtattcag

SEQ ID NO: 30969 - DNA, 2092 bp, Zea Mays
atcatttaaggtgtttgtgcttgatttaatttcttacatttttaaataaaatgagtgattaaagttttcgaaaaaagtcaatagtatcatattgtgaatataaatattttgaataagacgaatgaacagagttagtacttaatagaattgatactcgtaccagcaagtttctgtactttgtttttcctaagtttgtacttctttatcggaagtataaagtataggtgaccgaccagtgtttctttacctttcattttccgtgctcgatttttttagatcgaacaccaggccaggaggaggagcaggcgcggctaaacgcgcgagtgcacgtagcaaaccgcatcgtcgaaagaggagagagaaataataaatatacgacgagggggcatggcccccctctcccttattctattcctccacaccgatcactcgctgctcccctctctcgccggagctccgggccggatggcggcggcagcagcagctcctcccgcctccgtgatcgcgtgatggacgcacacaccgccgcgctccgccgatggacgacgccggaaggccaccaccacacgctcccgtggcggtgaccgcctccgcctccgcctccgccaccgccgcgcccgcccctccccaaccctcagccactgctgccgtcgacaggtcctcccccgaccccgacgcgctctatgaagaggggatgtggcaacaaatggccatggacagcggtgccactatgcaacctgggtcatatcctgagcgaccaggtgaacccgactgcacttactatctcaggactggattgtgtcgatttggcatgagctgccgattcaatcatcctccggataggaatctggctattgcctctgccagaatgaagggagaatatcctgagagagcgggacagccagagtgtcagtattatctgaagactggaacatgcaagtttggccctacatgcaaatttcaccatcccagggaaaaggctggaattgcagggagggtgcagctaaacacatcaggatatccactccgcccggtttgtcttccgttgccatttatatctcctcttctacatatgtctgtttgttttgctgaaaagaagtccactttgcttctgtagaatgaaaaggagtgtgcatattatttaaaaacaggacactgtaaatatgcaaatacttgtaaattccaccatccggaacttttcaatgtggtgccttcgtcacgtggttctcctatttatacctctgtacattcctctgcgagtgctggtccgcagtcctatactggaactatgccaagctgggcttttccacgagcttcttttataccaagccctaggtggcaaagtccttcaaattatgcgccgatgattgtacctcagggccttgttcaaatgcagagctggaattcatatactggtcagctgcagtcacctggggctcaacaaacttatggaagttcacaacaaggagaagctagtacaggaaatcagggaatgctgtcaccatacagacccagttcgtttcccgtgcctcaatatgcgctgcagagagagaatgtatttcctgagagacctgatgaaccagaatgccaatattacatgaagacaggagattgtaaattcggtgcagtgtgcaagttccatcatccccggggtgaagaactgtgcaaattctattctcgttacggcatctgcaagttcggcgccaactgtaaattcgaccatcctacagtggttgctccaatggtctatgcttgacctacttcgatttataaaatccatggcactgcctcaggcgctgtgaatgtttctcctaacttcctgccgggatcaaagttctgtaaattgagttgctaccggagatgtacagcccctttttttttggttaatccagatctttgggaataactctcgaaaccgaataaactttggatacagagatgccagttttcaggtgcctgcactatttgacattattgctgcacctatggttccgaacagaggaacagttgaattctctggaggggctgaagcctgcacttgtgcagttgagattatatcatcgcgtcgatttattttggaacctgtattcag

SEQ ID NO: 30970 - DNA, 2255 bp, Zea Mays
atcatttaaggtgtttgtgcttgatttaatttcttacatttttaaataaaatgagtgattaaagttttcgaaaaaagtcaatagtatcatattgtgaatataaatattttgaataagacgaatgaacagagttagtacttaatagaattgatactcgtaccagcaagtttctgtactttgtttttcctaagtttgtacttctttatcggaagtataaagtataggtgaccgaccagtgtttctttacctttcattttccgtgctcgatttttttagatcgaacaccaggccaggaggaggagcaggcgcggctaaacgcgcgagtgcacgtagcaaaccgcatcgtcgaaagaggagagagaaataataaatatacgacgagggggcatggcccccctctcccttattctattcctccacaccgatcactcgctgctcccctctctcgccggagctccgggccggatggcggcggcagcagcagctcctcccgcctccgtgatcgcgtgatggacgcacacaccgccgcgctccgccgatggacgacgccggaaggccaccaccacacgctcccgtggcggtgaccgcctccgcctccgcctccgccaccgccgcgcccgcccctccccaaccctcagccactgctgccgtcgacaggtcctcccccgaccccgacgcgctctatgaagaggggatgtggcaacaaatggccatggacagcggtgccactatgcaacctgggtcatatcctgagcgaccaggtgaacccgactgcacttactatctcaggactggattgtgtcgatttggcatgagctgccgattcaatcatcctccggataggaatctggctattgcctctgccagaatgaagggagaatatcctgagagagcgggacagccagagtgtcagtattatctgaagactggaacatgcaagtttggccctacatgcaaatttcaccatcccagggaaaaggctggaattgcagggagggtgcagctaaacacatcaggatatccactccgcccgaatgaaaaggagtgtgcatattatttaaaaacaggacactgtaaatatgcaaatacttgtaaattccaccatccggaacttttcaatgtggtgccttcgtcacgtggttctcctatttatacctctgtacattcctctgcgagtgctggtccgcagtcctatactggaactatgccaagctgggcttttccacgagcttcttttataccaagccctaggtggcaaagtccttcaaattatgcgccgatgattgtacctcagggccttgttcaaatgcagagctggaattcatatactggtcagctgcagtcacctggggctcaacaaacttatggaagttcacaacaaggagaagctagtacaggaaatcagggaatgctgtcaccatacagacccagttcgtttcccgtgcctcaatatgcgctgcagagagagaatgtatttcctgagagacctgatgaaccagaatgccaatattacatgaagacaggagattgtaaattcggtgcagtgtgcaagttccatcatccccgggtgagatcactgccccctccagattgtgtcttaagtccaatgggtcttccactacgtccagcatcgttgttgatacctggacactgattagagcaatgtcaaaagttacaaatttgctaggacagggtgaagaactgtgcaaattctattctcgttacggcatctgcaagttcggcgccaactgtaaattcgaccatcctacagtggttgctccaatggtctatgcgtatggtttctccgcgtctgcttcccctgcatccgcttcgactaatgtacctatggcgcgacgccttctgggatccccaccggggtctggatatacatcttaggcgtcgttttttttttcagttgacctacttcgatttataaaatccatggcactgcctcaggcgctgtgaatgtttctcctaacttcctgccgggatcaaagttctgtaaattgagttgctaccggagatgtacagcccctttttttttggttaatccagatctttgggaataactctcgaaaccgaataaactttggatacagagatgccagttttcaggtgcctgcactatttgacattattgctgcacctatggttccgaacagaggaacagttgaattctctggaggggctgaagcctgcacttgtgcagttgagattatatcatcgcgtcgatttattttggaacctgtattcag

SEQ ID NO: 30971 - DNA, 1593 bp, Zea Mays
gggggttcggtgctcaatttcccgtaggggatgtggcaacaaatggccatggacagcggtgccactatgcaacctgggtcatatcctgagcgaccaggtgaacccgactgcacttactatctcaggactggattgtgtcgatttggcatgagctgccgattcaatcatcctccggataggaatctgaatgaagggagaatatcctgagagagcgggacagccagagtgtcagtattatctgaagactggaacatgcaagtttggccctacatgcaaatttcaccatcccagggaaaaggctggaattgcagggagggtgcagctaaacacatcaggatatccactccgcccggtttgtcttccgttgccatttatatctcctcttctacatatgtctgtttgttttgctgaaaagaagtccactttgcttctgtagaatgaaaaggagtgtgcatattatttaaaaacaggacactgtaaatatgcaaatacttgtaaattccaccatccggaacttttcaatgtggtgccttcgtcacgtggttctcctatttatacctctgtacattcctctgcgagtgctggtccgcagtcctatactggaactatgccaagctgggcttttccacgagcttcttttataccaagccctaggtggcaaagtccttcaaattatgcgccgatgattgtacctcagggccttgttcaaatgcagagctggaattcatatactggtcagctgcagtcacctggggctcaacaaacttatggaagttcacaacaaggagaagctagtacaggaaatcagggaatgctgtcaccatacagacccagttcgtttcccgtgcctcaatatgcgctgcagagagagaatgtatttcctgagagacctgatgaaccagaatgccaatattacatgaagacaggagattgtaaattcggtgcagtgtgcaagttccatcatccccgggtgagatcactgccccctccagattgtgtcttaagtccaatgggtcttccactacgtccaggtgaagaactgtgcaaattctattctcgttacggcatctgcaagttcggcgccaactgtaaattcgaccatcctacagtggttgctccaatggtctatgcgtatggtttctccgcgtctgcttcccctgcatccgcttcgactaatgtacctatggcgcgacgccttctgggatccccaccggggtctggatatacatcttaggcgtcgttttttttttcagttgacctacttcgatttataaaatccatggcactgcctcaggcgctgtgaatgtttctcctaacttcctgccgggatcaaagttctgtaaattgagttgctaccggagatgtacagcccctttttttttggttaatccagatctttgggaataactctcgaaaccgaataaactttggatacagagatgccagttttcaggtgcctgcactatttgacattattgctgcacctatggttccgaacagaggaacagttgaattctctggaggggctgaagcctgcacttgtgcagttgagattatatcatcgcgtcgatttattttggaacctgtattcag

SEQ ID NO: 30972 - DNA, 929 bp, Zea Mays
gagcggatgtctgtactgattcaaacttttttcccatgcttatttgactgcgtgcaaattgtatatcagggtcagctgcagtcacctggggctcaacaaacttatggaagttcacaacaaggagaagctagtacaggaaatcagggaatgctgtcaccatacagacccagttcgtttcccgtgcctcaatatgcgctgcagagagagaatgtatttcctgagagacctgatgaaccagaatgccaatattacatgaagacaggagattgtaaattcggtgcagtgtgcaagttccatcatccccgggtgagatcactgccccctccagattgtgtcttaagtccaatgggtcttccactacgtccaggtgaagaactgtgcaaattctattctcgttacggcatctgcaagttcggcgccaactgtaaattcgaccatcctacagtggttgctccaatggtctatgcgtatggtttctccgcgtctgcttcccctgcatccgcttcgactaatgtacctatggcgcgacgccttctgggatccccaccggggtctggatatacatcttaggcgtcgttttttttttcagttgacctacttcgatttataaaatccatggcactgcctcaggcgctgtgaatgtttctcctaacttcctgccgggatcaaagttctgtaaattgagttgctaccggagatgtacagcccctttttttttggttaatccagatctttgggaataactctcgaaaccgaataaactttggatacagagatgccagttttcaggtgcctgcactatttgacattattgctgcacctatggttccgaacagaggaacagttgaattctctggaggggctgaagcctgcacttgtgcagttgagattatatcatcgcgtcgatttattttggaacctgtattcag

SEQ ID NO: 30973 - DNA, 939 bp, Zea Mays
actttttacatcttcacttcacttggcctaccagcagtccagcagagtttccgtctccccgactcccgactgccggccctgacctgccctgcgccgcgcggagccgcgtactaccgcccgcccaccaccgaaaccctagagcaagcagggatgcacagtccggtcccgctcctcctcctcctgctcctctgcacggccgcggcggcctccgacggctcccagccccaggcaccgggggcggcgcggcgggggatggtgccagtggcccccgcggaggcggagctcggcaccatggtggcgctcgccctcaacggcacgcggcgccggctcgggggcagcttccagctttgcgcgccctgcacctgctgcggcggggccagcggcgcctgcatcctcgcgccctgctgctactccatcaactgcaacatccccaaccgccccttcgggtactgctccttcacgcccaagtcctgccagtgcgtcggatgcaacctctgagctccgtggccgcgggattcattggattggattggtcagagtgtgtttgtgtgtgtgtgtgtgtgagagagagagagagtggggtggtaacgaatctgtataaaaaattccccacatccttagttaagtggcgattgctattacttctacctagtagtattttgctgtgatcactgctacattcgacttagttgaggaaaaaaaagagaaaggggtctgggttgatctagaggtcactactctggggttttgcttttctgtcgccacacattggatgtctgattaggatgctactacttgttcatagtggtttgttgttgatagctggaataaatatacctgtttaggtgcatggatctagtcatctagtgcattttagtggatgccatctcttccgtcctgatcagtgcctactgccctggaatgtgatcgctctagctc

SEQ ID NO: 30974 - DNA, 3858 bp, Zea Mays
tttagtctttataaacaaacactcctaaacgaagtgattaaaataggtcttccaaatataatttttaggaactaaagtttctttctaagggctagtttggcaactccatttttctatgagatttttaatttcttaaggaaaaataaactagtttcccttggaaaaataaaaaatcattaggaaattagggttttcaaactagccttaaaatataagaggatgactgaagaaaccaaacacctgcttacattattttgaaacataatttagtacacggtttaaattttcgtacaaccgaggagtgaaaaacagacttgtgctaacatccttgcaaaacagaacaaaatcagtaaaacgacggaaaagaaaagaaaaaaaacaggaaaaaaggccctcccctccgtcgccaatcccaatcccgatctccaagcaaacccacctccccggctgtcccccactcgccgatccagatctcctccactccaaccggacgcctccgccgccgctggcatcggtcgagccacacgcgcacgccgctgaggaacccggagcgggcgccggcaatggagcagctgcggacgatcgggcgggagctggcgatggggtcgcagggcgggtgggggcagtccaaggagttcctcgacctcgtcaagtccatcggcgaggcgcgctccaaggcggaggaggaccgcatcatcgcgcgcgagcttgagcacctcaagcgccgcctcgccgaccccgacgtgccacgccgcaagatgaaggagctcctcctccgcctcgtctacgccgagatgctcggccacgacgcctccttcggccacatccacgccgttaagatgacccacgacgagtcgctcccgctcaagcggaccggttacctcgctgtcgcgctctttctcgacgaacgccacgacctcgtcatcctcgtggtcaacaccatccagaaggacctcaggtcggacaattacctcgtcgtctgcgcagcgctcaccgccgcgtgccgccttatcggtgaggaggccatccctgccgtgctgccccaggttgtagagctgctcgcgcaccccaaggaggctgtgaggaagaaggccgtcatggcactacaccggttctaccagcgatccccctcctccgtctcccacctcgtctccaacttccgcaagaggctctgtgataatgatccaggggtgatgggtgcaactctttgccccctctatgacctgattttggaggaaccaaattcgtacaaggatttggttataaaactattgaagatacttgctgtacttggtagtggcgataaacaagcaagtgggcatatgtacactgtattgggtgacatattcaggaaaggtgacactgcaagcaacattggcaatgctatactgtatgaatgcatatgctgtatttcattcattttcccaaaccctaagatgctagaggctgcagctgaaacaacatcaaagtttctgaagagtgatagtcataatcttaagtacatgggtattgatgctcttggccggctaataaaaataaacccagatattgcagaagagcaccagctagctgtcattgattgcctagaggatccagatgacactttgaagcgcaagacctttgagcttctttataagatgacaaaatcaacaaatgttgaagtgattgttgataggatgattgaatacatgatcaacataactgatcatcattataagacagaaattgcatcacgttgtgttgaacttgcagagcaatttgcgcctagcaatcagtggttcatccagaccatgaacaaagtctttgagcatgccggagatcttgtcaacatcagagtggcgcacaatctgatgcggctaattgctgaaggctttggagaggaggatgaaggtgctgacagtcagctaagatcatcggctgtggattcatatctccgcattgtcggagagccaaagcttccttcttcgtttctgcagataatatgctgggttttgggggaatatggaacagcagatggaaaatattcagcttcttatattattgggaagttgtgtgatgtggcagaggcccacctcactgatgacactgtcaaggcatatgcgatctcagcaattctgaagacatttgcgtttgaaatcactcttggaagaaagatcgatttgctgcctgagtgtcaaacattggtagatgaattgtcagcttcacattcgacggacttgcagcaacgggcatacgagctacaggctttactaggcttggacaaaactgctgttgaaagtgttatgcccgcagatgcaagctgtgaagacattgaggtcgacagaagcctctcatttctaaacagttatgtgcagcaagccttggaaaatggtgcgtccccttacattccagagagtgaacgctctggtgttataagtgtcggcagctacagaagccaagaacaacaggaaacatctgcccatactcttagatttgaggcctatgagatgcctaaaccttcgttgccactagcaacttcacaaaccagcatgtccacaccacctactgatctggttccagttccagaggcaggctactacaaggaagacaatcaaacatcaatgtctcaaccaccaagtgatgcaatttctggtgagtttggtgtcaaacttcgccttgatggtgttcaaaagaaatggggaaggccaacatattcttcttctacaccctcaagctcgatctctagtcaaccaacacccaatggggcctctcattctgatgggggagggtcaagttcgcaaccacgggagtcatcatacggttctaagagacagcagggcacggaagtttcagcagaaaagcaacggctggctgcttcactttttggttcagcagcagctaaagctgataggaaagcacaagcttctcgaaagacagcaaaggacagtccctcaactgagaaagtggctaccactaatgtgactgcccagcctgttaaggagcaagtaatccctgctgcaccaccgcctgatctgctggatctgggtgatgagcctgtttcatcgagtccaccgtcggctgaccctttctcacagctagaggggctccttggaccagcatcggctgccccggtgctttctggaactccggctaccagcacttccaaagcaccaggccttctgtcaatcttctcagatgatgtaccaaccggagtgactagtgtgtccaccgatcccactctaggtgatgttaattcgatgggctcccgcaaaggagcagctgcagtggcttcaatgaagggcccgagcctccaagatgccttgcaaaaggatgcggctgcacgacaagtaggagtgacaccaacagtgaacaaccccaatcttttcaaggacttgctaggctgaaggggacagtagggcacaccatatgctctgtgtggcctctttgggtacgtggagttcgtctccgacatggttcgatcaccgaaacgacgccgaactcgctgtttgatcagcgtaggctggggttttagggttacaagggctaatatttgtttgagagtcacaagacacgacctatctccttccaattgtggtttgtggagatttgtggatggttgcgggtattttttttcctttacgctcttgtaattttgtcctgagactggtgtacatgtgtctacatgatgtgtaatttgtacatgaagaccatggtccgtccagaagcgtatgccgtcgtctttttgttcattcatgtaggaggggcatgctcatctgtgctttcagagtttcccatatatgttgattaatataacaattgatgtcattctctggaacttgggtgaaataaaaaaaatggtacgtgcgcagcggtgcaggg

SEQ ID NO: 30975 - DNA, 1612 bp, Zea Mays
cttatctttcgccgacgccatagcacggtcttcacatatcccttaactccttaattgcaatggtaaaaggtcgacagaagcctctcatttctaaacagttatgtgcagcaagccttggaaaatggtgcgtccccttacattccagagagtgaacgctctggtgttataagtgtcggcagctacagaagccaagaacaacaggaaacatctgcccatactcttagatttgaggcctatgagatgcctaaaccttcgttgccactagcaacttcacaaaccagcatgtccacaccacctactgatctggttccagttccagaggcaggctactacaaggaagacaatcaaacatcaatgtctcaaccaccaagtgatgcaatttctggtgagtttggtgtcaaacttcgccttgatggtgttcaaaagaaatggggaaggccaacatattcttcttctacaccctcaagctcgatctctagtcaaccaacacccaatggggcctctcattctgatgggggagggtcaagttcgcaaccacgggagtcatcatacggttctaagagacagcagggcacggaagtttcagcagaaaagcaacggctggctgcttcactttttggttcagcagcagctaaagctgataggaaagcacaagcttctcgaaagacagcaaaggacagtccctcaactgagaaagtggctaccactaatgtgactgcccagcctgttaaggagcaagtaatccctgctgcaccaccgcctgatctgctggatctgggtgatgagcctgtttcatcgagtccaccgtcggctgaccctttctcacagctagaggggctccttggaccagcatcggctgccccggtgctttctggaactccggctaccagcacttccaaagcaccaggccttctgtcaatcttctcagatgatgtaccaaccggagtgactagtgtgtccaccgatcccactctaggtgatgttaattcgatgggctcccgcaaaggagcagctgcagtggcttcaatgaagggcccgagcctccaagatgccttgcaaaaggatgcggctgcacgacaagtaggagtgacaccaacagtgaacaaccccaatcttttcaaggacttgctaggctgaaggggacagtagggcacaccatatgctctgtgtggcctctttgggtacgtggagttcgtctccgacatggttcgatcaccgaaacgacgccgaactcgctgtttgatcagcgtaggctggggttttagggttacaagggctaatatttgtttgagagtcacaagacacgacctatctccttccaattgtggtttgtggagatttgtggatggttgcgggtattttttttcctttacgctcttgtaattttgtcctgagactggtgtacatgtgtctacatgatgtgtaatttgtacatgaagaccatggtccgtccagaagcgtatgccgtcgtctttttgttcattcatgtaggaggggcatgctcatctgtgctttcagagtttcccatatatgttgattaatataacaattgatgtcattctctggaacttgggtgaaataaaaaaaatggtacgtgcgcagcggtgcaggg

SEQ ID NO: 30976 - DNA, 703 bp, Zea Mays
tttacctctaaactcgatcgccttcgtcggccaagaagtccggcgacgtcaccgagcttcagatcggcgtcaagtacaagcctgagtcatgtacgctgcaagcacacaaaggagacaaaattaaggttcactatcgtgggacactcactgatggatcagttttcgattctagctatgacagaggtgacccgtttgaattcactcttggaaatggccaagtgataaaaggttgggaccaaggattgctcggtatgtgcgtgggtgaaaagaggaagctaaagatacctgcaaagatgggttatggtgagcgaggctccccaccaaagattccaggtggagcaactctgatcttcgacacggagcttatcgccgtcaacgggaagacatccggcggtgcaaaggcagagagtgacagtgagctctgatacaatgcattggagagtttcaaagctcgggggggaatagtagcagcgtcgcatagttcattaggtgaaagggttgctgtttcctccacatagcagtttatgctatagagatgtcacagaaacaagtcaggttttgcccgatggtcgaacagtttcctttccatcttatgaaaactcgaatttgtctataaagctaccatggtcttcaacattgcagcccgtttaaactgtcgttacatcgatccatggcttggagagagagagaaaaatcaaaatgt

SEQ ID NO: 30977 - DNA, 946 bp, Zea Mays
tgagcacacgccggcgatacatgatcgttcgcattgctatgtctgaactcgcatttcccgctggagacctcaggcgcgccgctgccatacctcaaccaggggaaccctctaataggctgcggcctacccaacggcatggacaacagccagagctccatgcacccgctcgacccggcgttttgccggccgatgagctcgcagcagcaccctttcctcaacggtgtcagcgacgcagcgtccaaggtcgggactttctggcaagatgaccttcagagcgtagtccacatggatatggggcagcagagccagcaggagatggctcccacctcctccaacagctacaacgacggttcgttgcaaacagtgcacatgaaaatggagctttgacgtagctagctgaagaagtccagcccaaagcttcgacgcctcctccccccctgtatatacagaacagagagggagagagaggaggaccagcctgcagcggaaaaaagcactcttgagattccccaccccactggtgtgatgattctttggacagagatgtgaaagatcaatcgccacgccggcggccggtcgatcgcaccacccccgccgcctgttgttagccgcaagatcgccggcgaccaaacgcggtgcatcgcatcccccggtatattctcagatcagacctgaattcgtcttcctctcaagcgagagggggaaaaaaagacctgtaatatcatttgtatcgccattatatttgtagctgattatatataaatatataaaatatcatccctcgtattcctgtcacccctcgtctccctgggctggaactccccccgctgctgctggatgaatcatcgtagactctttcttcactctgatacaccaataatgacataggtgccgttcttgctgctgcaccgtaccgagctcactagctcaggtaccgagattgttt

SEQ ID NO: 30978 - DNA, 2584 bp, Zea Mays
cttctcctaggctcctacacggctacactttggcttcgtctggaacggtcatgtctgaggctgatcgatgcggcctccctgtcccgccgttgcactgccaacgctcctctcccgcctccgtgcgtgcaggtccgcctcccacgcgctccagtgccacgccctcctcctcacctcgggccacctcgccgcgtccccgctgcgcctctccaaccacctcctcctcgccctcgcgtccgtccccagcgccgccgcgctcgcggacgtcgtcttcgcgcgactcccgctgcccgccgcccgcgacccattcgcctggaacacagccatccgcctccatgccccggcgcgcccccgcgccgcgctgctctacttcgcgcggatgcgccgttgcggcgtgcggcccgacgcctacacgttccccgcggtcctcaaggcctgcggctgcgcgcctggctgcagggccggactcctagttcacgccgaggccgtgaggagggggctggccgcggacctcttcacggtgaacgcgctcatcagcttctactgtaggatcctggacatccgctcgggcaggaaggtgttcgacgaggcaggcggcgtttcgcgggatctcgtctcgtggaactccatggtcgctgggtacgttgggtgcggggagatggggctcgcgcaggagatgtttgacgaaatgccgcagaaggacacgttctcgtgggcgaccttgatcgacgggtatgggaagcaaggcggtgctggtgtggaccgtgcacgcgagttgtttgatcaaatgcctgagagggatttggtgtgctggaactcaatgatcgatggttatgccaggcatggtaggatggatgaggcgaggtcactgttcgaggaaatgccggagcggaatgtgatctcgtggagcattgtcattgatgggcatgtcagttgtggagaggcaaaggaggctttggagtattttcagagtatgctacggtgtggcttaaggcctgataggatcgctgccgtgggagctgtcagtgcttgtgctcagctgggcgctttggagcaaggaagatggcttcactcttacttggaaaagaagaagctgctgtctgatgttgtggtgcaaacagctttgatagatatgtacgtgaaatgtgggtgcttggatcttgccatgttgatctttgaaagcatggccgagcggagtgtagtcacttggaatgtgatgattgttggacttggaactcatggttttggtctggatgctgtcacgctgttccatcgaatggaggctgaaagtgttgcagtggatgatcttagtgtacttggcatgctgactgcttgcacacatgctgggttggtctcagagggtttagagatatttcacagaatgaaaaaggattttgggatagatcccaaggtagaacattatggtgcattggttgatctacttggtcgtgctggccgtttggatcaggccaggcatgctatagagacaatgcccatggaaccaactccagaattgtggggatctcttcttgctgcctgtcgaagccacagttgtgttgagctggctgagttatcagtggaacgtcttgcagatcttggagctgatgattctggagtctatgtccttctgtcaaatatctatgctgatgaaggaatgtggggtgatgttttgaggattaggaaattgatgagtgatgagggaatgagaaaggatattggacggagtgtgattgaagtggatggtgaaatacatgagtttgtgaatggagttggctcatatatttgtaaggatgaaatgtacttgatgctgtggaatttgtctaacatggtggcatctatttgatgctcctttgtctaccaattttgtgaaatccttcaccatggtgtatgttgttttaacatcctaaacatgcacatgaccaaattataattacatctgatggttcgtagctctgatggtaatgtgttatttttcaaccctgaggtttccagctcaagcacaagcaggtgattgttatttctattactatgtaaaagaggagtgccatgaatgaccataagaactgatgatgctcagaagatccagcctagatctccaaggctgttcaagcagttggtacattttgaggacaatcgaagttaacgggcacaagatccgaatacaaagcttgggcgtttggtgtttcagtgttgcacagcaggaaaggaagacagttgacatggctcttcccaggacaaaaaatgaatagaaatcaactccaaatcttcactcaaaccctgaaagagaaatcagcgaagttaacccgtttggtgtcgcttttggaccagctccaggagcagttttttcacagcgtcacttactaaggctttgttcgtttacaccaatccagctctggattagcatggattggaattaaatccatgtcacaatccatgccccaaaataatccaagactacttaaatttttttattcggttaaacccatcatggaatataacccaagggtttgtgatttttttttaacaatgaaagacatgaattctatccatagctcattaggtatggaataaatccataaagatattg

SEQ ID NO: 30979 - DNA, 1213 bp, Zea Mays
cttgtgactggggtggggtattgatactcattgcctgcctgcccgggctcggctcattgaacgctagctgctgctttgggcgctcgcttttcctcgagggctttctgaaaagttcgggtacgtgtgcccccacattctcttcggacaggcctttcggctatgtatagaggaggaacccctgtgctccgctgcccaattccaaccccagctttgactgccctcgcttggtgctcagttctttcctctgctcctccgcctcttctcgcacctcggcaccttcttcggcaactgcgagcgagatggaggcgcaagacgactgcaagtggcggcagatcccggcgttcggcgactggaacgtgtgggacggcgacatgcccgtcacccagtacttccaggcaggggccttcttcttcgcggcgccggcggagaagggcgacgcggatctcttcaaggtgccccagttgcctgccaagccctacggctacaagaagtgcgttgttcgagtgaagggggagaaagaaaccgctgtgccgccggcggcgaggaagggacgcaggaggcgctgcgtgagcgagcagcacaagtggaagcccaagggagctgtggacgaggacctgtacaagatctccccgcagcttctctgcaaggtgaagaagaagaagctgctgaggaatttgcttggagggtgcctcggcttgggctgcatcgcctgatagtgagagatgcagagcttaataagtttcttgaaagttcgcttgcttggtgctctggagagagttgtatagttgtctacgctaatatgagattaatggaaacttactactgcttctgcactcgtttgaatgtacgaattggaccttcattaactaatgtgttcagcaagacttgttagcccaagttgaatggttcaggcaagcttgtctgtaaccaagggcacccctgtctgtaaacccctattcaagctagtcatcaatgtacgacaactttcctggtcctgcatcccatgttcccgtttatcttttctcttctctctccttatctctcacgctttactaggatagtgtcactgggcattaataatatgtggagctagttcaaacttgccacaacctttcgtttctctcatcccctccttcctttgtgagccccggaggagaacgtgagatttgggctaaaaaaaaagattaaacctataagtaaattccgaaaataa

SEQ ID NO: 30980 - DNA, 1308 bp, Zea Mays
cttgtgactggggtggggtattgatactcattgcctgcctgcccgggctcggctcattgaacgctagctgctgctttgggcgctcgcttttcctcgagggctttctgaaaagttcgggtacgtgtgcccccacattctcttcggacaggcctttcggctatgtatagaggaggaacccctgtgctccgctgcccaattccaaccccagctttgactgccctcgcttggtgctcagttctttcctctgctcctccgcctcttctcgcacctcggcaccttcttcggcaactgcgagcgagatggaggcgcaagacgactgcaagtggcggcagatcccggcgttcggcgactggaacgtgtgggacggcgacatgcccgtcacccagtacttccaggcaggggccttcttcttcgcggcgccggcggagaagggcgacgcggatctcttcaaggtgccccagttgcctgccaagccctacggctacaagaagtgcgttgttcgagtgaagggggagaaagaaaccgctgtgccgccggcggcgaggaagggacgcaggaggcgctgcgtgagcgagcagcacaagtggaagcccaagggagctgtggacgaggacctgtacaagatctccccgcagcttctctgcaagaagaagctgctgaggaatttgcttggagggtgcctcggcttgggctgcatcgcctgatagtgagagatgcagagcttaataagtttcttgaaagttcgcttgcttggtgctctggagagagttgtatagttgtctacgctaatatgagattaatggaaacttactactgcttctgcactcgtttgaatgtaacactagcttgcattccatctttcctacggttgcttcagtgcctgactaagggctgtttgattctgaaaatgtataaattcagccttattgtctttcacaggtacgaattggaccttcattaactaatgtgttcagcaagacttgttagcccaagttgaatggttcaggcaagcttgtctgtaaccaagggcacccctgtctgtaaacccctattcaagctagtcatcaatgtacgacaactttcctggtcctgcatcccatgttcccgtttatcttttctcttctctctccttatctctcacgctttactaggatagtgtcactgggcattaataatatgtggagctagttcaaacttgccacaacctttcgtttctctcatcccctccttcctttgtgagccccggaggagaacgtgagatttgggctaaaaaaaaagattaaacctataagtaaattccgaaaataa

SEQ ID NO: 30981 - DNA, 1570 bp, Zea Mays
gtcgtcccccatccgtttcctcctccgcctcgcctcctctctacccagccccagcctctcccggtctcccctcctctcctctcctctcctctcctcctcttcctctgcttctctccccgatctctatttcccatttccgggcggctcccgttctccacctcaattattgcccacccatccccgctccctcctctcctctcctcccgtcccacccatcacctcgcaccagcgccgggggaatggcggccgcgctgtggacgctgctagtggcggtggccctgtcggcggcgctggcctcgaaccgccccgtggcggcgacggcgacggcggcggcggaggcggcgaacgaggtgctccgcgcgcaccagctgccggggggcctgctgccggcggggatcacggcgttccggcacgacgccgccacgggggcgttcgaggcccggctggacgcgccctgcacggcgcgcttcgaggtcggcctccgctacaacgccaccgtctccggggtcatcagccccggccagatcgccgacatctccggcgtcgccgcgcaggacctcttcatgtggttccccgtccacgacatcaaggtcgacatcccctcctccggcgtcatctacttcaacgtcggcgtcgtcaagaagcacctcccgctcgccgtcttcgacgcgccgccggcctgcacgcccgacccgctcctgcaggtcatttctcatcctagcctcactctctcgatggcacgagctctaattcatcgatcttgggaccagtgacctccttgacatcattcaatcctcaatgatcttgaatgttggcacaacctttatacccagtttctttactgaaagctgcaagtagcatgcgcgggagcttttcagcatgtcatattccacggggcagagagtcgtgaatacacaagaaacagggaaatattcccaactgagggcttgattagagggggatttaagagattgaattcttttctatttaattttgaatagcaagagatttaatccgctccaatctccttcaatctactcctaatcgaacaaggattaagggcttgttcgctttcctctcaatccatgtgaattggttggaattgagtgggtttaaatttcaaacaagtcaaaatcttttggacttgttcgttttgtacttaaaccatgtggatcttttggacttgttcgttttgtacttaaaccatgtggattgaggggtattggggtgtattaaggccttgttcggttatttccaatacatatggattggatgagattgaaaaaaattgagaagaagtttgacttgtttaggattcaaactcatctaatctcactcaatccacatggattgagagctaaccgatcaaggcgtaaggtaaattttgactagttgtggatttatttcctctcaatccacatggatttggaaaaaaatgaacatcataatatttttcaatcctatccaattgacttgggacagaaataaccgaactagagtctacagtgaggtgagacgtgttcgcctcttgttgagtgactgaaacaaataagagattgttagagctcgg

SEQ ID NO: 30982 - DNA, 4327 bp, Zea Mays
cgccagcgtcgttgtctcgctgatgcctgcctgcatccgtctccgccgccgtaggagcgaggcctgtgacgcggtctccgtccgttccatcgtggcatggcatcatcccgtccccttcgcgggccggagagagagagagagagagagtgaggtgttgtctgagaaaaagaccatgattcgacatggcagatgctgactagtcccctcgtctctctctgggtatcaccattcaccagtcactaccctacctccctacagcgaatagcaataccgggtctgggtggatggtcacactgtccatgtctgcagtgcagacagacagaagatgcctcctctctatcctaccggctgcagtctcgccaactaattcctcggtgcagcttagctaaccaacccctcgaatctttaatcattactagtatttttttctctatcgaatccaacaacgaaacgaagcgatatagttttactggtagtcgaaagaagtagatctggacatctggtgagctagcgtgtgcatgattgggtggcactgggggttcaggtacgcatgtgacgagtccggggcaataattctcggtcacaagcggacaggatgatgcgcatggagacccaaaatcccctgttcgactaacccgacagctcaggaatatctggatcgcaggagatgccatgccagtgccacacatcgcttgctcccggccggggtggttttggtactagttgcactgatgactggttcgtcgcggtctaaacttgacccggttgcccccctccttttttttcttgctataattaactgttaaagctcgtgtgagttgtgaccactgctccaggaaaggatagccgctgagatgctgacacgcgggtccagctgagaggtgggggtacgtcctacgtgtcagtgctggagtggggagtgacgggcaacagcgacgtgaccggacgcgacgcgattagcgggcgcatcgcatgtgcgagggaggaacgatgacggtaaggagacaagacaagcgtatcaactgcagcttcctgcaggctgccggggtgggttgctgcagtaggtgccgctgctggccaatgccaacgagccatttgcccggttggccgtggtcacctggcgtggctcttccggcctgtggattatgtgggcggaaccgcggaaggatagggatggagcctggaggaggggagagacgcgtccggtgacgtcccctgtccaccgttttgagtaggagcgctgtcaacgtggcgaggattcaaggaggacagacagtccagggcaggttgatcacaatatcaactgtttgttttaggtaggagccctgacaacttgacatccgacaccgtgacattgaggtgtgctccggaggcttctctcggatagttttattttggaacttgattgctggtcgaggtgaaatatatatactccatgtcctgattgccgtgctacccagaggccacactgcctgaaaagaaaagaaaaaaaagaaagatgtaaaagaaaataaaagcaaaggaaaaattaaaaccaaatttgggctgaattcactgatggcccgaaactgtaccgtagaccccaacccacacatcgcaagagaggcccagcccagaagttttcaaaactccgacgtataaaaaagaccccagacccacagtcccctcctctctctttccccccgtgtcagtgtgtcacgcttcgaccacgcggcggcgccatggcggcccagcccatccgcaaaccgcacttcgaccgcatcgtccgcgcgctcgcctccgaccacccgccaccgccccgcgccgagctgcacgcgtttctcgtccgctcgcacgccgcggccaccgcgcccgccctcgtccgctcgctcctcaacggcgccatcagccgcctctccaagcggcgcccgcgcgccgcgctcgccttgctcctcatcatgccgcgcctgcccgtgcgccccgaccacttcacgctccccttcgcgctcaacgccgccgcgtcgctccgcctcctcccgctcggcgcctccctgcacgccgtcgcgctccgcctcgcgctcctcccgctccgcctccccgtcgccaacgcgctcgtcgacctgtacgccaagtgcgaggagttccccgccgcgcacgccgcgctggcggacatccccgcccccgacgcggtctccttcaactccctcctctgcgcgcacgcccgcaacgcctccgtgcgtcccgccgagtccctcttcgctgccatgcccaccaggacccaggtctcctggaacgccatggtggtcctctacgtcagcgctggtgacctcgcggccgcttgccgtgtgtttgacgaaatgccgacgagggacacggcctcgtcgatggtgctcattgtcgggtattgtaagtgcgggctggtgcagaatgcgcgtgagctgtttgacaaaatgcctacaaaggatctcgtggcccggacggccatgattaatggttatgcacagactgggcggccaaaggtggcactcgctttatttagggatctggaggctgctgggattgagcctgatggagccacaatggttggggttatctctgcagtttcacagataggcagcacggagttggctgggtgggttggagcttacgtcgacaggaagaagatcgaaaggaatgagaaggttcttacagcactagtagatatgcacgcaaagtgtggcaacattgagcaggcactgagtgctttcagggagatcccacgacctgatgcctatccatacacagcactgattagcggcctggcaacacatggacacgaaaatctggcactttcagtgttcgaaaggatgcgggctgaagacatcaagcctcaccctatcactttcgttggtgtgcttacagcatgcagccacgcagggaatgttgaaaagggactggagtattgggaggcaatggtgcaggattatggtattgagcgccatgcggaccactatgcctgtgtcattgacatgctcgggcgtgcagggaggattgaggaggctttcgagatggttcaaacgatgccgatggggccacatccgggggctcttggtgcactcctgagtgcctgcaagacatatgataacgttgagattgcagaagttgtcgcaaacaagctatttgagttggaaccttggaacactgggaactatatactcttgtcaaacatatatgctgggaaagaactctgggaggaggcagaaagggtcagatcactgatgagaacaaaactgccatttaaaagtcctggatccacttggtttgaggatcgacagagagagcatgctaagatgtctatcatggactgaggatgagcagaaacaccactttctggagatggtggaagctaggaaggctgaaaacatagctatttgacagtcagcaaagcagaggagcttcgtatcagtttgccactaaggtcctatgtataggcactggtcaaggtcatttctcatcctagcctcactctctcgatggcacgagctctaattcatcgatcttgggaccagtgacctccttgacatcattcaatcctcaatgatcttgaatgttggcacaacctttatacccagtttctttactgaaagctgcaagtagcatgcgcgggagcttttcagcatgtcatattccacggggcagagagtcgtgaatacacaagaaacagggaaatattcccaactgagggcttgattagagggggatttaagagattgaattcttttctatttaattttgaatagcaagagatttaatccgctccaatctccttcaatctactcctaatcgaacaaggattaagggcttgttcgctttcctctcaatccatgtgaattggttggaattgagtgggtttaaatttcaaacaagtcaaaatcttttggacttgttcgttttgtacttaaaccatgtggatcttttggacttgttcgttttgtacttaaaccatgtggattgaggggtattggggtgtattaaggccttgttcggttatttccaatacatatggattggatgagattgaaaaaaattgagaagaagtttgacttgtttaggattcaaactcatctaatctcactcaatccacatggattgagagctaaccgatcaaggcgtaaggtaaattttgactagttgtggatttatttcctctcaatccacatggatttggaaaaaaatgaacatcataatatttttcaatcctatccaattgacttgggacagaaataaccgaactagagtctacagtgaggtgagacgtgttcgcctcttgttgagtgactgaaacaaataagagattgttagagctcgg

SEQ ID NO: 30983 - DNA, 2650 bp, Zea Mays
atggcggcccagcccatccgcaaaccgcacttcgaccgcatcgtccgcgcgctcgcctccgaccacccgccaccgccccgcgccgagctgcacgcgtttctcgtccgctcgcacgccgcggccaccgcgcccgccctcgtccgctcgctcctcaacggcgccatcagccgcctctccaagcggcgcccgcgcgccgcgctcgccttgctcctcatcatgccgcgcctgcccgtgcgccccgaccacttcacgctccccttcgcgctcaacgccgccgcgtcgctccgcctcctcccgctcggcgcctccctgcacgccgtcgcgctccgcctcgcgctcctcccgctccgcctccccgtcgccaacgcgctcgtcgacctgtacgccaagtgcgaggagttccccgccgcgcacgccgcgctggcggacatccccgcccccgacgcggtctccttcaactccctcctctgcgcgcacgcccgcaacgcctccgtgcgtcccgccgagtccctcttcgctgccatgcccaccaggacccaggtctcctggaacgccatggtggtcctctacgtcagcgctggtgacctcgcggccgcttgccgtgtgtttgacgaaatgccgacgagggacacggcctcgtcgatggtgctcattgtcgggtattgtaagtgcgggctggtgcagaatgcgcgtgagctgtttgacaaaatgcctacaaaggatctcgtggcccggacggccatgattaatggttatgcacagactgggcggccaaaggtggcactcgctttatttagggatctggaggctgctgggattgagcctgatggagccacaatggttggggttatctctgcagtttcacagataggcagcacggagttggctgggtgggttggagcttacgtcgacaggaagaagatcgaaaggaatgagaaggttcttacagcactagtagatatgcacgcaaagtgtggcaacattgagcaggcactgagtgctttcagggagatcccacgacctgatgcctatccatacacagcactgattagcggcctggcaacacatggacacgaaaatctggcactttcagtgttcgaaaggatgcgggctgaagacatcaagcctcaccctatcactttcgttggtgtgcttacagcatgcagccacgcagggaatgttgaaaagggactggagtattgggaggcaatggtgcaggattatggtattgagcgccatgcggaccactatgcctgtgtcattgacatgctcgggcgtgcagggaggattgaggaggctttcgagatggttcaaacgatgccgatggggccacatccgggggctcttggtgcactcctgagtgcctgcaagacatatgataacgttgagattgcagaagttgtcgcaaacaagctatttgagttggaaccttggaacactgggaactatatactcttgtcaaacatatatgctgggaaagaactctgggaggaggcagaaagggtcagatcactgatgagaacaaaactgccatttaaaagtcctggatccacttggtttgaggatcgacagagagagcatgctaagatgtctatcatggactgaggatgagcagaaacaccactttctggagatggtggaagctaggaaggctgaaaacatagctatttgacagtcagcaaagcagaggagcttcgtatcagtttgccactaaggtcctatgtataggcactggtcaaggtgatttcctatagtaagtgtacaatgtctcccaatgaacctaggtcatttctcatcctagcctcactctctcgatggcacgagctctaattcatcgatcttgggaccagtgacctccttgacatcattcaatcctcaatgatcttgaatgttggcacaacctttatacccagtttctttactgaaagctgcaagtagcatgcgcgggagcttttcagcatgtcatattccacggggcagagagtcgtgaatacacaagaaacagggaaatattcccaactgagggcttgattagagggggatttaagagattgaattcttttctatttaattttgaatagcaagagatttaatccgctccaatctccttcaatctactcctaatcgaacaaggattaagggcttgttcgctttcctctcaatccatgtgaattggttggaattgagtgggtttaaatttcaaacaagtcaaaatcttttggacttgttcgttttgtacttaaaccatgtggatcttttggacttgttcgttttgtacttaaaccatgtggattgaggggtattggggtgtattaaggccttgttcggttatttccaatacatatggattggatgagattgaaaaaaattgagaagaagtttgacttgtttaggattcaaactcatctaatctcactcaatccacatggattgagagctaaccgatcaaggcgtaaggtaaattttgactagttgtggatttatttcctctcaatccacatggatttggaaaaaaatgaacatcataatatttttcaatcctatccaattgacttgggacagaaataaccgaactagagtctacagtgaggtgagacgtgttcgcctcttgttgagtgactgaaacaaataagagattgttagagctcgg

SEQ ID NO: 30984 - DNA, 2619 bp, Zea Mays
atggcggcccagcccatccgcaaaccgcacttcgaccgcatcgtccgcgcgctcgcctccgaccacccgccaccgccccgcgccgagctgcacgcgtttctcgtccgctcgcacgccgcggccaccgcgcccgccctcgtccgctcgctcctcaacggcgccatcagccgcctctccaagcggcgcccgcgcgccgcgctcgccttgctcctcatcatgccgcgcctgcccgtgcgccccgaccacttcacgctccccttcgcgctcaacgccgccgcgtcgctccgcctcctcccgctcggcgcctccctgcacgccgtcgcgctccgcctcgcgctcctcccgctccgcctccccgtcgccaacgcgctcgtcgacctgtacgccaagtgcgaggagttccccgccgcgcacgccgcgctggcggacatccccgcccccgacgcggtctccttcaactccctcctctgcgcgcacgcccgcaacgcctccgtgcgtcccgccgagtccctcttcgctgccatgcccaccaggacccaggtctcctggaacgccatggtggtcctctacgtcagcgctggtgacctcgcggccgcttgccgtgtgtttgacgaaatgccgacgagggacacggcctcgtcgatggtgctcattgtcgggtattgtaagtgcgggctggtgcagaatgcgcgtgagctgtttgacaaaatgcctacaaaggatctcgtggcccggacggccatgattaatggttatgcacagactgggcggccaaaggtggcactcgctttatttagggatctggaggctgctgggattgagcctgatggagccacaatggttggggttatctctgcagtttcacagataggcagcacggagttggctgggtgggttggagcttacgtcgacaggaagaagatcgaaaggaatgagaaggttcttacagcactagtagatatgcacgcaaagtgtggcaacattgagcaggcactgagtgctttcagggagatcccacgacctgatgcctatccatacacagcactgattagcggcctggcaacacatggacacgaaaatctggcactttcagtgttcgaaaggatgcgggctgaagacatcaagcctcaccctatcactttcgttggtgtgcttacagcatgcagccacgcagggaatgttgaaaagggactggagtattgggaggcaatggtgcaggattatggtattgagcgccatgcggaccactatgcctgtgtcattgacatgctcgggcgtgcagggaggattgaggaggctttcgagatggttcaaacgatgccgatggggccacatccgggggctcttggtgcactcctgagtgcctgcaagacatatgataacgttgagattgcagaagttgtcgcaaacaagctatttgagttggaaccttggaacactgggaactatatactcttgtcaaacatatatgctgggaaagaactctgggaggaggcagaaagggtcagatcactgatgagaacaaaactgccatttaaaagtcctggatccacttggtttgaggatcgacagagagagcatgctaagatgtctatcatggactgaggatgagcagaaacaccactttctggagatggtggaagctaggaaggctgaaaacatagctatttgacagtcagcaaagcagaggagcttcgtatcagtttgccactaaggtcctatgtataggcactggtcaaggtgatttcctatagtcatttctcatcctagcctcactctctcgatggcacgagctctaattcatcgatcttgggaccagtgacctccttgacatcattcaatcctcaatgatcttgaatgttggcacaacctttatacccagtttctttactgaaagctgcaagtagcatgcgcgggagcttttcagcatgtcatattccacggggcagagagtcgtgaatacacaagaaacagggaaatattcccaactgagggcttgattagagggggatttaagagattgaattcttttctatttaattttgaatagcaagagatttaatccgctccaatctccttcaatctactcctaatcgaacaaggattaagggcttgttcgctttcctctcaatccatgtgaattggttggaattgagtgggtttaaatttcaaacaagtcaaaatcttttggacttgttcgttttgtacttaaaccatgtggatcttttggacttgttcgttttgtacttaaaccatgtggattgaggggtattggggtgtattaaggccttgttcggttatttccaatacatatggattggatgagattgaaaaaaattgagaagaagtttgacttgtttaggattcaaactcatctaatctcactcaatccacatggattgagagctaaccgatcaaggcgtaaggtaaattttgactagttgtggatttatttcctctcaatccacatggatttggaaaaaaatgaacatcataatatttttcaatcctatccaattgacttgggacagaaataaccgaactagagtctacagtgaggtgagacgtgttcgcctcttgttgagtgactgaaacaaataagagattgttagagctcgg

SEQ ID NO: 30985 - DNA, 2544 bp, Zea Mays
acaaatcgggtttgccgtgcggcacttgcgttttgggtcgggtacggacccgcaaaaagagctccgtcagttcctctacctcctctgtaggagcacacttgtttcggaaaggaacgcagattcacgccacgccgccgcctcaattatatggcgccggcgttctcggcacaggtccccgcgctccgacggggagcactgcgcgtgcggtgggtcacggctgcgctgttctcatcggggattctcgccggcaacaagccgattctggtgcgtgacttcgtgaggtcagcgttgtacgaccccaaccatggctacttctccaagcgggcgggaccggtgggcgttcttgacgccagcatccgcttcaaccagctcgaggggaggagtgcatatatacagcaccttgataagctgtataagaagcatgatatcgcttggtttactcccgtggagctctttaagccatggtatgcctacacaatagcagcatcgattctgcgtacagcaaatctttcagtcccattgaagatatacgagattggtggtggctctggaacatgcgcaaagtgcatacttgattacatgatgctgaatgcgccaccaaaagtctacaatgatatgaaatacatctcagtagagattagctcctctcttgctgagaagcaattggaaactgttggtgaagtgcaaagccatttgtcaaagttcacggtggagcaccgggatgcaattaacagacctggatggggccgcacggatcctcatccatgttgggtgcttatgcttgaggtacttgacaatctaccacatgaccttgtctattcaccagatcaggtctctccatggatggaagtgtggattgaaaaagtaaaaggcaggtttgtgacttttgtgttttcagaacctttgctgtgcactaccacagttgaagatcatctatgtttgctctcgtgttctttgttcatgtgggggtttcagctgagacattagaaaattctagacttgaataaatgtgatgaaaacacaatacacatatttggcaggatccttttatcaaaccatttaaccatccctccgttgctactagcctatggttgatggttgtgcatggtgattgcaaaccatgtttcatttttaacagaaaaaaccaggggaagttctttcttctttgagaggtgctgcatggaaggttgtatgttgttatacagtgtcctcatgccatgcttgtaatttgtgttgcaaagttcacagtttagttatagtatcattgaagtgttgcctcttttttcctttatgtagagcatatttgtcattgttgtgcttagggctatttttaactgaactgttgcatgtatatctgtaacttggtattattaatgattgaagtcttttctgctattagaaaattatatagttactcatctttaatttcacatgtatatctgttctgtgtgcctttttttctgaagaaagttcacaagcttccgaagtctataagccattacaagacccattgatttctcgctgtgttgatattattggcatgaatgaagacaaagcttctgtcagtgaaaaactaacatttgctgcaaaaggagttctatcaaaagtattcccaaagcctcgtagagcttggttgcccaccggctgcttgaaactaatggatactctacatcaagctttaccgagcatgtcccttattgcttcagacttcagctatcttccagacgttagcatacctggtgacagggctccattggtttcatcaaagaaggatgggaagacatcagatcatcgcaactactttgatgctcagggtgacgcggacatcttcttcccaaccgacttccggctcctggagcagatcgaccataactgcgctggcttctcaaaggagcagaagaatcccggcgcattcaaacccgtgaagaagaggagaacgatcatacttgatactgcagccttcatggaggagtttggcatgccgctgaagacgaggaccaaagacgggtataatccgcttctcgacgatttcaagaacacaaagttctatctcagcgtccctacacacaacgttcctacccatagcaggaggaactagtcttctttccttttgctgatgtgtcacgagtcaggaaaagacgtctgacaggctagaatcggtctgtcattttgagtagtctgaatttgcaagttttcttaccttaaggtgctgaaaattttatagtttctcttttctgtagaacaaagtttttattatcatttttgacattgatgcatgggtaataaaaggtggaagaagactgactaacaaggagtcaaaccaaatgaatggtaaaagcaattacaggctgcattccacacgtataacgaaagaaaatgttcagtggatacaaaagggtatattctttgcgattaatcttttcgttgccaatacagctgccgccccatactccagggaattacattatcttctaacaaaaaaaagaatggttacatcgaatggctccaatatacagcttctcaccatgctatcagcaaaaccgg

SEQ ID NO: 30986 - DNA, 1863 bp, Zea Mays
acaaatcgggtttgccgtgcggcacttgcgttttgggtcgggtacggacccgcaaaaagagctccgtcagttcctctacctcctctgtaggagcacacttgtttcggaaaggaacgcagattcacgccacgccgccgcctcaattatatggcgccggcgttctcggcacaggtccccgcgctccgacggggagcactgcgcgtgcggtgggtcacggctgcgctgttctcatcggggattctcgccggcaacaagccgattctggtgcgtgacttcgtgaggtcagcgttgtacgaccccaaccatggctacttctccaagcgggcgggaccggtgggcgttcttgacgccagcatccgcttcaaccagctcgaggggaggagtgcatatatacagcaccttgataagctgtataagaagcatgatatcgcttggtttactcccgtggagctctttaagccatggtatgcctacacaatagcagcatcgattctgcgtacagcaaatctttcagtcccattgaagatatacgagattggtggtggctctggaacatgcgcaaagtgcatacttgattacatgatgctgaatgcgccaccaaaagtctacaatgatatgaaatacattagagattagctcctctcttgctgagaagcaattggaaactgttggtgaagtgcaaagccatttgtcaaagttcacggtggagcaccgggatgcaattaacagacctggatggggccgcacggatcctcatccatgttgggtgcttatgcttgaggtatgttctgctgggacttctcagtttgttcttgtgttttatgtgtaaaccaaagaagcacaatgacatcatcatgcaccttcacccattatgaactgaggtacttgacaatctaccacatgaccttgtctattcaccagatcaggtctctccatggatggaagtgtggattgaaaaagtaaaaggcagaaactaatggatactctacatcaagctttaccgagcatgtcccttattgcttcagacttcagctatcttccagacgttagcatacctggtgacagggctccattggtttcatcaaagaaggatgggaagacatcagatcatcgcaactactttgatgctcagggtgacgcggacatcttcttcccaaccgacttccggctcctggagcagatcgaccataactgcgctggcttctcaaaggagcagaagaatcccggcgcattcaaacccgtgaagaagaggagaacgatcatacttgatactgcagccttcatggaggagtttggcatgccgctgaagacgaggaccaaagacgggtataatccgcttctcgacgatttcaagaacacaaagttctatctcagcgtccctacacacaacgttcctacccatagcaggaggaactagtcttctttccttttgctgatgtgtcacgagtcaggaaaagacgtctgacaggctagaatcggtctgtcattttgagtagtctgaatttgcaagttttcttaccttaaggtgctgaaaattttatagtttctcttttctgtagaacaaagtttttattatcatttttgacattgatgcatgggtaataaaaggtggaagaagactgactaacaaggagtcaaaccaaatgaatggtaaaagcaattacaggctgcattccacacgtataacgaaagaaaatgttcagtggatacaaaagggtatattctttgcgattaatcttttcgttgccaatacagctgccgccccatactccagggaattacattatcttctaacaaaaaaaagaatggttacatcgaatggctccaatatacagcttctcaccatgctatcagcaaaaccgg

SEQ ID NO: 30987 - DNA, 2543 bp, Zea Mays
acaaatcgggtttgccgtgcggcacttgcgttttgggtcgggtacggacccgcaaaaagagctccgtcagttcctctacctcctctgtaggagcacacttgtttcggaaaggaacgcagattcacgccacgccgccgcctcaattatatggcgccggcgttctcggcacaggtccccgcgctccgacggggagcactgcgcgtgcggtgggtcacggctgcgctgttctcatcggggattctcgccggcaacaagccgattctggtgcgtgacttcgtgaggtcagcgttgtacgaccccaaccatggctacttctccaagcgggcgggaccggtgggcgttcttgacgccagcatccgcttcaaccagctcgagggtggtctcctaaatctcctacgcgttgcacatttcctaagttcttatcgcattgcctcctccaatgggaagtttagtgtgtgttccggcattgcggggatgggaaggtacttgtgttttgtttcttcgtcgtgctggcatttcaacgaacaggtctcacatttgggacgtgtggtaatggataactccttgccgattgtctgatgctggttccgtgtcgtgctgtgtgttgatatgttgggcatttggtgaagatgtgaaaagcgtgctcgtttttcctttttaactttgacctaaaattcatttgcttcaataccatattaccatgtagggaggagtgcatatatacagcaccttgataagctgtataagaagcatgatatcgcttggtttactcccgtggagctctttaagccatggtatgcctacacaatagcagcatcgattctgcgtacagcaaatctttcagtcccattgaagatatacgagattggtggtggctctggaacatgcgcaaagtgcatacttgattacatgatgctgaatgcgccaccaaaagtctacaatgatatgaaatacattagagattagctcctctcttgctgagaagcaattggaaactgttggtgaagtgcaaagccatttgtcaaagttcacggtggagcaccgggatgcaattaacagacctggatggggccgcacggatcctcatccatgttgggtgcttatgcttgaggtatgttctgctgggacttctcagtttgttcttgtgttttatgtgtaaaccaaagaagcacaatgacatcatcatgcaccttcacccattatgaactgaggtatatgtgtccagtttaatcattgtatctagaagcattaaagtcttgcatgctgcggcatacaaaatactatgctgcaaaagaacacatgtacttgcttcaaaatttatctgctctgcgaagtgtaagtgtgccatttcactccatgtatgaatttcgtaaaattaatttcgttctgtagtaatattctgatcacaaaacaatacgaaactagtagctgtaaaaatcatagcaaacaaaacctccttggcatccattttttgctcattatgttacgaagtaagcaatgcatctaaaggaagatccacagtgatgcctacaacagtaactatctttccatggaatatcaggtacttgacaatctaccacatgaccttgtctattcaccagatcaggtctctccatggatggaagtgtggattgaaaaagtaaaaggcagaaactaatggatactctacatcaagctttaccgagcatgtcccttattgcttcagacttcagctatcttccagacgttagcatacctggtgacagggctccattggtttcatcaaagaaggatgggaagacatcagatcatcgcaactactttgatgctcagggtgacgcggacatcttcttcccaaccgacttccggctcctggagcagatcgaccataactgcgctggcttctcaaaggagcagaagaatcccggcgcattcaaacccgtgaagaagaggagaacgatcatacttgatactgcagccttcatggaggagtttggcatgccgctgaagacgaggaccaaagacgggtataatccgcttctcgacgatttcaagaacacaaagttctatctcagcgtccctacacacaacgttcctacccatagcaggaggaactagtcttctttccttttgctgatgtgtcacgagtcaggaaaagacgtctgacaggctagaatcggtctgtcattttgagtagtctgaatttgcaagttttcttaccttaaggtgctgaaaattttatagtttctcttttctgtagaacaaagtttttattatcatttttgacattgatgcatgggtaataaaaggtggaagaagactgactaacaaggagtcaaaccaaatgaatggtaaaagcaattacaggctgcattccacacgtataacgaaagaaaatgttcagtggatacaaaagggtatattctttgcgattaatcttttcgttgccaatacagctgccgccccatactccagggaattacattatcttctaacaaaaaaaagaatggttacatcgaatggctccaatatacagcttctcaccatgctatcagcaaaaccgg

SEQ ID NO: 30988 - DNA, 2724 bp, Zea Mays
acaaatcgggtttgccgtgcggcacttgcgttttgggtcgggtacggacccgcaaaaagagctccgtcagttcctctacctcctctgtaggagcacacttgtttcggaaaggaacgcagattcacgccacgccgccgcctcaattatatggcgccggcgttctcggcacaggtccccgcgctccgacggggagcactgcgcgtgcggtgggtcacggctgcgctgttctcatcggggattctcgccggcaacaagccgattctggtgcgtgacttcgtgaggtcagcgttgtacgaccccaaccatggctacttctccaagcgggcgggaccggtgggcgttcttgacgccagcatccgcttcaaccagctcgagggtggtctcctaaatctcctacgcgttgcacatttcctaagttcttatcgcattgcctcctccaatgggaagtttagtgtgtgttccggcattgcggggatgggaaggtacttgtgttttgtttcttcgtcgtgctggcatttcaacgaacaggtctcacatttgggacgtgtggtaatggataactccttgccgattgtctgatgctggttccgtgtcgtgctgtgtgttgatatgttgggcatttggtgaagatgtgaaaagcgtgctcgtttttcctttttaactttgacctaaaattcatttgcttcaataccatattaccatgtagggaggagtgcatatatacagcaccttgataagctgtataagaagcatgatatcgcttggtttactcccgtggagctctttaagccatggtatgcctacacaatagcagcatcgattctgcgtacagcaaatctttcagtcccattgaagatatacgagattggtggtggctctggaacatgcgcaaagtgcatacttgattacatgatgctgaatgcgccaccaaaagtctacaatgatatgaaatacattagagattagctcctctcttgctgagaagcaattggaaactgttggtgaagtgcaaagccatttgtcaaagttcacggtggagcaccgggatgcaattaacagacctggatggggccgcacggatcctcatccatgttgggtgcttatgcttgaggtatgttctgctgggacttctcagtttgttcttgtgttttatgtgtaaaccaaagaagcacaatgacatcatcatgcaccttcacccattatgaactgaggtatatgtgtccagtttaatcattgtatctagaagcattaaagtcttgcatgctgcggcatacaaaatactatgctgcaaaagaacacatgtacttgcttcaaaatttatctgctctgcgaagtgtaagtgtgccatttcactccatgtatgaatttcgtaaaattaatttcgttctgtagtaatattctgatcacaaaacaatacgaaactagtagctgtaaaaatcatagcaaacaaaacctccttggcatccattttttgctcattatgttacgaagtaagcaatgcatctaaaggaagatccacagtgatgcctacaacagtaactatctttccatggaatatcaggtacttgacaatctaccacatgaccttgtctattcaccagatcaggtctctccatggatggaagtgtggattgaaaaagtaaaaggcagttcacaagcttccgaagtctataagccattacaagacccattgatttctcgctgtgttgatattattggcatgaatgaagacaaagcttctgtcagtgaaaaactaacatttgctgcaaaaggagttctatcaaaagtattcccaaagcctcgtagagcttggttgcccaccggctgcttgaaactaatggatactctacatcaagctttaccgagcatgtcccttattgcttcagacttcagctatcttccagacgttagcatacctggtgacagggctccattggtttcatcaaagaaggatgggaagacatcagatcatcgcaactactttgatgctcagggtgacgcggacatcttcttcccaaccgacttccggctcctggagcagatcgaccataactgcgctggcttctcaaaggagcagaagaatcccggcgcattcaaacccgtgaagaagaggagaacgatcatacttgatactgcagccttcatggaggagtttggcatgccgctgaagacgaggaccaaagacgggtataatccgcttctcgacgatttcaagaacacaaagttctatctcagcgtccctacacacaacgttcctacccatagcaggaggaactagtcttctttccttttgctgatgtgtcacgagtcaggaaaagacgtctgacaggctagaatcggtctgtcattttgagtagtctgaatttgcaagttttcttaccttaaggtgctgaaaattttatagtttctcttttctgtagaacaaagtttttattatcatttttgacattgatgcatgggtaataaaaggtggaagaagactgactaacaaggagtcaaaccaaatgaatggtaaaagcaattacaggctgcattccacacgtataacgaaagaaaatgttcagtggatacaaaagggtatattctttgcgattaatcttttcgttgccaatacagctgccgccccatactccagggaattacattatcttctaacaaaaaaaagaatggttacatcgaatggctccaatatacagcttctcaccatgctatcagcaaaaccgg

SEQ ID NO: 30989 - DNA, 800 bp, Zea Mays
tgcgaaggctacttattattgattaaggatgggaagacatcagatcatcgcaactactttgatgctcagggtgacgcggacatcttcttcccaaccgacttccggctcctggagcagatcgaccataactgcgctggcttctcaaaggagcagaagaatcccggcgcattcaaacccgtgaagaagaggagaacgatcatacttgatactgcagccttcatggaggagtttggcatgccgctgaagacgaggaccaaagacgggtataatccgcttctcgacgatttcaagaacacaaagttctatctcagcgtccctacacacaacgttcctacccatagcaggaggaactagtcttctttccttttgctgatgtgtcacgagtcaggaaaagacgtctgacaggctagaatcggtctgtcattttgagtagtctgaatttgcaagttttcttaccttaaggtgctgaaaattttatagtttctcttttctgtagaacaaagtttttattatcatttttgacattgatgcatgggtaataaaaggtggaagaagactgactaacaaggagtcaaaccaaatgaatggtaaaagcaattacaggctgcattccacacgtataacgaaagaaaatgttcagtggatacaaaagggtatattctttgcgattaatcttttcgttgccaatacagctgccgccccatactccagggaattacattatcttctaacaaaaaaaagaatggttacatcgaatggctccaatatacagcttctcaccatgctatcagcaaaaccgg

SEQ ID NO: 30990 - DNA, 609 bp, Zea Mays
aatcgtgaaaccacgacgtgtttctgtctgagatgcaaacaaaactggagctgcccaagaagctataaatggtattagacgggctagcaaggccatgactgagcaagaagcccggcaaattcttggtatcagtgaaaattcgacgtgggaagagattgtccagaagtacgacacaatgtttgagaggaataacaaaaacggcagcttctatctccagtcaaaggttcatagagcgaaagaatgcctggaacctttatatcaaaagcctgatgtactgaactgagattttgcagacgccctagcttctgtttgaagcggtatgcctaattgatcgatttattagtgtgctcagagatcaacgttcagtttattgatcggtttgccaatgcgcccagagatcaacgttcagttttgagttatgtgttgggcgcatcaggttggttccttgtaatgccagaataatgtttaacaaacataccgaattttggctgattctcattggcaacgtctcagtcactggttttaattcatagtatgttatttcacactttgtcaaccaagcaacactttgaaactttttgtcgataataaatggttcggttcgttcat

SEQ ID NO: 30991 - DNA, 3005 bp, Zea Mays
cgcgccaggggtgagaagtatggtggccgaggagaggctggcgtgggcggtggagcgctcccctcggtcgccacgtgtgtcacgcagccgcatctcggttccctcctctctctctctcttcttctccctctccacctcctgcttgcactgttcgtctcctcagtaactgcacccacctccacacctacacccgagaggcggcggcggcagacacagacaccgtctctctcctccctttgtcgtcgtgtctctctgcatggaagcctccgccggctcgtcgccaccgcactcccaagagaacccgccggagcacggtggcgacatgggaggggcccccgcggaggagatcggaggggaggcggcggatgatttcatgttcgctgaagacacgttcccctccctcccggacttcccttgcctttcgtcgccgtccagctccaccttctcgtccaactcctcgtcaaactcctccagcgcctacaccaacacggcaggaagagccggcggcgagccctccgagcctgcttcggccggagaagggtttgatgcgctcgatgacatcgaccagctcctcgacttcgcgtcgctttccatgccgtgggactccgagccgttcccgggggttagcatgatgctagagaacgccatgtcggcgccgccgcagccggtgggcgacggcatgagtgaagagaaagccgtgccggaagggaccacagggggagaggaggcctgcatggatgcgtcggagggggaggagctgccgcggttcttcatggagtggctcacgagcaaccgcgaaaacatctcggccgaggatctccgcgggatccgcctccgccgctccaccatcgaggccgccgccgcccggctcggcggcgggcgccagggcaccatgcagctgctcaagctcatcctcacctgggtgcagaaccaccacctccagaggaagcgcccgcgcgacgtgatggaggaggaggcgggcctgcacgtccagctccccagcccggtcgccaacccaccaggatacgagttccccgccggcggacaggacatggccgcgggcggcggcacatcttggatgccccaccagcaggcattcacgccgcctgctgcgtacggcggcgacgcggtgtacccgagcgcggcaggccaacagtactctttccaccagggccccagcacgagcagcgtggtcgtgaacagccaaccgttctccccgccgcctgtgggcgacatgcacggcgcgaacatggcctggccgcagcagtacgtgccgttcccaccgcctggggcttccacgggctcttaccctatgccgcagccgttctcccccggattcggcgggcagtacgccggcgccggcgctggccacctctcagtggccccccagcgcatggcaggcgtggaggcctcggcgaccaaggaggcccgcaagaagcgcatggcgagacagcggcgcctgtcctgcctgcagcagcagcgcagccagcagctgagcctgggccagatccaggcctccgtccacctgcaggagccgtcccctcggtccacgcactccggcccggtcacgccgtcagcaggcggctggggattctggtcgccgagcagccagcagcaggtccagaacccgctctccaagtccaattcatcaagggcgccgcctccctcgctggaagcggcggcggtggcgccacagacaaagcccgcgcctgctggtgctcggcaggacgacattcaccaccgcctcgcagcggcttcagataagcggcagggcgccaaggcggacaagaacctgcggttcctgctgcagaaggtgctgaagcagagcgacgtcgggagcctcggccgcatcgtgctccccaaagaagcggaggttcacctgccggagctgaagacgagggatggcatctccatccccatggaggacatcggaacgtcgcgcgtgtggaacatgcggtacaggttttggcccaacaacaagagcagaatgtatctgctggagaacacaggggaatttgttcgttccaacgagcttcaggagggggatttcatagtgatctactccgatgtcaagtcgggcaaatatgtatgttcttctattgccgactatttccttgctacataatgctcgtttttctggtccatatgcctgcatcattagtcaactcaaacgtgttgtcgtccttgaaactgcaatccaaatctacgcaaccgttttgcatgccactgtttgtatgtggatgcctggatggcaatcaaggacatagtggcatcttttgatctcgctgttcatggaattggtttacttcagcagcaactcatcaagaaccctgaaaccccccttgtgtcctatatatatccacagctgatacggggcgtgaaggtaaggcccccgccggcgcaagagcaaggcagtggttccagcgggggaggcaagcacaggcccctctgtccagcaggtccagggagagccgcagccgccggtgctcctgaagacgccgtcgtcgacggggtcagcggcgcctgcaaggggaggtctccggaaggcgtgcggcgggttcggcagcagggagccggcgccatgagccagatggcggtgagcatctgaaagagcagcagactccgccatatattgatcgatcgaccaatcgatcgttagttctccaagttactattagctagctatagctcgaaacagctgaactgatgatgacgatggtaacctccgtcgtgtgtgctaagcatgtagcgtgctaggagatgatatattaaatataatcgagtagtagagccacccgctgtgtgacgctaaatttgtgtgcatggtttggtttgtgagttgggcccgtgcgtggctgtgtcatgtcgtggttaattagctatactagtcctgtctgtacatgcatggacatacctgatctctcggccattggtgtcggcgacgtgccattcggctaacaagacgacagctgcagcctgcagcaaaagctagaacattctacaca

SEQ ID NO: 30992 - DNA, 789 bp, Zea Mays
actgggggcagggagagatatataggttttggcccaacaacaagagcagaatgtatctgctggagaacacaggggaatttgttcgttccaacgagcttcaggagggggatttcatagtgatctactccgatgtcaagtcgggcaaatatctgatacggggcgtgaaggtaaggcccccgccggcgcaagagcaaggcagtggttccagcgggggaggcaagcacaggcccctctgtccagcaggtccagggagagccgcagccgccggtgctcctgaagacgccgtcgtcgacggggtcagcggcgcctgcaaggggaggtctccggaaggcgtgcggcgggttcggcagcagggagccggcgccatgagccagatggcggtgagcatctgaaagagcagcagactccgccatatattgatcgatcgaccaatcgatcgttagttctccaagttactattagctagctatagctcgaaacagctgaactgatgatgacgatggtaacctccgtcgtgtgtgctaagcatgtagcgtgctaggagatgatatattaaatataatcgagtagtagagccacccgctgtgtgacgctaaatttgtgtgcatggtttggtttgtgagttgggcccgtgcgtggctgtgtcatgtcgtggttaattagctatactagtcctgtctgtacatgcatggacatacctgatctctcggccattggtgtcggcgacgtgccattcggctaacaagacgacagctgcagcctgcagcaaaagctagaacattctacaca

SEQ ID NO: 30993 - DNA, 3001 bp, Zea Mays
caatccaaaagcctcgcaaattaatcatagccatacacatttccaaaatcctaaaaattccaccaccaccgaaccgagcactttcgctacgcaaacacgcgcgtggaaaacaaaacggcacacaaattatttattttttttcctttttcgatcccagacacaacacaagactgaaaaagtcagcgaggaaggaaaaaaaaatctgcgaggcagcgcagccggacgaggaggaggaggtcaggactcaggaggagaggcgtcgcggactcgcggtggcagtgccgcgcacggcaacccaacccagctcagctccggcgaggacgcaaccgttgacgtcgctcttggcctcgcctcgttatttgaggtcgcgcggccgcgagccggggtccagatcgagtctcgcgcgaggtgtttcggcaccgcgaaatgccgcctccggctgcgatgctgctccttacggcggcctcggggcctcccacgctgtcgctgaccctggccgcgaggcgggcgccgctccgggccccaagccggcggaggctgcgggcgctgcggccggcgaggatccgcgccgccgcggcgatcggtggcgagttcggcggcctcggccggcgccgcgtcgtcgtgggagagttcatcgagcgcctgcgcaacgttctgcccgggggcagttggtggcgcctcgaggacggcgatgaggccggggacggggccggccgcgcagaggggagcggtaccaccgccgtgtccgcgctcaggcggatgtgggccctcgttgccggcgacagattggtcatctatgtcggcttcgcgtccctcgtcggcgctgcgctttcggagatcgccataccacatctccttgcagcgtccattttctctgcgcagaatggaggcgcggtgttctaccgaaatgccaagcttctggttgtcctatgtctggtttccggggtgtttagtggcatacgaagttgctgttttggtgttgcaaacatgatattggttaaacggatgagagaggagttatttgattccattctttcacaggatatttccttttttgatgaagaaacagtaggagatctgacaagtagacttggttcggactgccaacaagtgtctcgtgttataggcaatgaccttaacctgatttcacgcaatttacttcagggtgcaggtgcattaatttatctgctagtcttatcttggcctctcggattgtgtacaatgtttgtttgtgcaactctatcagcaattatgctagttcatggacggtttcagaaaagggcagctaaatttgcacaggagttcaccgcaaacgccaataatgttgctcaagaggtgataactttggttaggacagtgcgagtatatggaacagaaaagcaggagtttaaaaggtatgcaaactggcttgataagctgtatgatgtgagctttcggcagacagtggcttatggaggctggagcctgagcttgaactatctataccattctactcaggtcattggagtggtgattggaggcctagcaatcatgtctgggaagttaactgctgagcagttgacaaaattcacactctatgctgaatggctaattttgtccacatggtggattggggacaactggtcctccctgatgcagtctgtcggagcaagtgaaaaagtttttcgtttaatggatctccttcctagcaagcagcttagctctgaaggcctcaagttagagaagttgaaagggcaaattcagtatgctgatgtatcattttcatatccatcaagacctacggtaccaattttgggaggcttgaatttaacactgaatccaaacgaagtagttgcaattgttggtcttagtggaagtggcaagagcactataatcaatttactacttagattatacgaacctacaaatgggcaaatactaattgatggtgtcccgctcactgagcttgatatcagatggttcagggaaagaattggtttcgtcggacaggaaccacgcttattccgaatggatatcagctctaatattaaatatggttgcccaagagatgtcagtcatgaagaagtgatatgggctgcaaagcaggcctatgctcatgacttcataatggctttgcctgatggttataacaccatcgttgatgatgctcttctcagtggaggtcagaaacaacgtgttgctattgccagggcccttctgagggacccatctatcttactgcttgatgaagccactagtgcgcttgatgctgagagtgaacattatgtcaagagcgtcatcacaaaagttagtcgagattcaaaggctaaaagaactgtggtaatcatagcacacaggctatctacaattcaaacagctgatagaattattgtgatggaaaatggtaatattgtggaggatggtaaacacattgatcttattgagaagggtggtctatattcaagattagccaggcgacaaaatgacgatctcaagtagccctggatcacagaatgtggtttagtgcacgccttctttttaaatggaatggcagaagggagagtcgtctgtcattagtgtattctttgcaagaactgacctggacccaggagctcgaataagctggcattgtttttcccatgaaccagaaacggtttgtgactgatcaaaataaaccaaaacggtttcccccacgaggacgagcacattaagcatcgagagcggcagtatggagaacagacttctaagaggtccagtattgtaaaagtagcttccataacaaagtgtatatgcgtttttatcttgttatcgggaactctgaaacttatcttacactacacacggaggaaacgctccaattttgttacgagcactgtgtgccttatttcctgaattttcgtgtaaaaatgtactccctgcgtcccaaaacagttgacgttataatatttatagttaaacttgtaacttaaattattagcaacataaattattataaaaatatatttaaagatctattgaaata

SEQ ID NO: 30994 - DNA, 3088 bp, Zea Mays
caaaagcctcgcaaattaatcatagccatacacatttccaaaatcctaaaaattccaccaccaccgaaccgagcactttcgctacgcaaacacgcgcgtggaaaacaaaacggcacacaaattatttattttttttcctttttcgatcccagacacaacacaagactgaaaaagtcagcgaggaaggaaaaaaaaatctgcgaggcagcgcagccggacgaggaggaggaggtcaggactcaggaggagaggcgtcgcggactcgcggtggcagtgccgcgcacggcaacccaacccagctcagctccggcgaggacgcaaccgttgacgtcgctcttggcctcgcctcgttatttgaggtcgcgcggccgcgagccggggtccagatcgagtctcgcgcgaggtgtttcggcaccgcgaaatgccgcctccggctgcgatgctgctccttacggcggcctcggggcctcccacgctgtcgctgaccctggccgcgaggcgggcgccgctccgggccccaagccggcggaggctgcgggcgctgcggccggcgaggatccgcgccgccgcggcgatcggtggcgagttcggcggcctcggccggcgccgcgtcgtcgtgggagagttcatcgagcgcctgcgcaacgttctgcccgggggcagttggtggcgcctcgaggacggcgatgaggccggggacggggccggccgcgcagaggggagcggtaccaccgccgtgtccgcgctcaggcggatgtgggccctcgttgccggcgacagattggtcatctatgtcggcttcgcgtccctcgtcggcgctgcgctttcggagatcgccataccacatctccttgcagcgtccattttctctgcgcagaatggaggcgcggtgttctaccgaaatgccaagcttctggttgtcctatgtctggtttccggggtgtttagactgtagtttgtactgtagcgttctgaaagctctgtgatcagcaaagtttggaagcatactctgacacatttgggagttgagaagttctcattggcatacgaagttgctgttttggtgttgcaaacatgatattggttaaacggatgagagaggagttatttgattccattctttcacaggatatttccttttttgatgaagaaacagtaggagatctgacaagtagacttggttcggactgccaacaagtgtctcgtgttataggcaatgaccttaacctgatttcacgcaatttacttcagggtgcaggtgcattaatttatctgctagtcttatcttggcctctcggattgtgtacaatgtttgtttgtgcaactctatcagcaattatgctagttcatggacggtttcagaaaagggcagctaaatttgcacaggagttcaccgcaaacgccaataatgttgctcaagaggtgataactttggttaggacagtgcgagtatatggaacagaaaagcaggagtttaaaaggtatgcaaactggcttgataagctgtatgatgtgagctttcggcagacagtggcttatggaggctggagcctgagcttgaactatctataccattctactcaggtcattggagtggtgattggaggcctagcaatcatgtctgggaagttaactgctgagcagttgacaaaattcacactctatgctgaatggctaattttgtccacatggtggattggggacaactggtcctccctgatgcagtctgtcggagcaagtgaaaaagtttttcgtttaatggatctccttcctagcaagcagcttagctctgaaggcctcaagttagagaagttgaaagggcaaattcagtatgctgatgtatcattttcatatccatcaagacctacggtaccaattttgggaggcttgaatttaacactgaatccaaacgaagtagttgcaattgttggtcttagtggaagtggcaagagcactataatcaatttactacttagattatacgaacctacaaatgggcaaatactaattgatggtgtcccgctcactgagcttgatatcagatggttcagggaaagaattggtttcgtcggacaggaaccacgcttattccgaatggatatcagctctaatattaaatatggttgcccaagagatgtcagtcatgaagaagtgatatgggctgcaaagcaggcctatgctcatgacttcataatggctttgcctgatggttataacaccatcgttgatgatgctcttctcagtggaggtcagaaacaacgtgttgctattgccagggcccttctgagggacccatctatcttactgcttgatgaagccactagtgcgcttgatgctgagagtgaacattatgtcaagagcgtcatcacaaaagttagtcgagattcaaaggctaaaagaactgtggtaatcatagcacacaggctatctacaattcaaacagctgatagaattattgtgatggaaaatggtaatattgtggaggatggtaaacacattgatcttattgagaagggtggtctatattcaagattagccaggcgacaaaatgacgatctcaagtagccctggatcacagaatgtggtttagtgcacgccttctttttaaatggaatggcagaagggagagtcgtctgtcattagtgtattctttgcaagaactgacctggacccaggagctcgaataagctggcattgtttttcccatgaaccagaaacggtttgtgactgatcaaaataaaccaaaacggtttcccccacgaggacgagcacattaagcatcgagagcggcagtatggagaacagacttctaagaggtccagtattgtaaaagtagcttccataacaaagtgtatatgcgtttttatcttgttatcgggaactctgaaacttatcttacactacacacggaggaaacgctccaattttgttacgagcactgtgtgccttatttcctgaattttcgtgtaaaaatgtactccctgcgtcccaaaacagttgacgttataatatttatagttaaacttgtaacttaaattattagcaacataaattattataaaaatatatttaaagatctattgaaata

SEQ ID NO: 30995 - DNA, 2949 bp, Zea Mays
aaatcctaaaaattccaccaccaccgaaccgagcactttcgctacgcaaacacgcgcgtggaaaacaaaacggcacacaaattatttattttttttcctttttcgatcccagacacaacacaagactgaaaaagtcagcgaggaaggaaaaaaaaatctgcgaggcagcgcagccggacgaggaggaggaggtcaggactcaggaggagaggcgtcgcggactcgcggtggcagtgccgcgcacggcaacccaacccagctcagctccggcgaggacgcaaccgttgacgtcgctcttggcctcgcctcgttatttgaggtcgcgcggccgcgagccggggtccagatcgagtctcgcgcgaggtgtttcggcaccgcgaaatgccgcctccggctgcgatgctgctccttacggcggcctcggggcctcccacgctgtcgctgaccctggccgcgaggcgggcgccgctccgggccccaagccggcggaggctgcgggcgctgcggccggcgaggatccgcgccgccgcggcgatcggtggcgagttcggcggcctcggccggcgccgcgtcgtcgtgggagagttcatcgagcgcctgcgcaacgttctgcccgggggcagttggtggcgcctcgaggacggcgatgaggccggggacggggccggccgcgcagaggggagcggtaccaccgccgtgtccgcgctcaggcggatgtgggccctcgttgccggcgacagattggtcatctatgtcggcttcgcgtccctcgtcggcgctgcgctttcggagatcgccataccacatctccttgcagcgtccattttctctgcgcagaatggaggcgcggtgttctaccgaaatgccaagcttctggttgtcctatgtctggtttccggggtgtttagtggcatacgaagttgctgttttggtgttgcaaacatgatattggttaaacggatgagagaggagttatttgattccattctttcacaggatatttccttttttgatgaagaaacagtaggagatctgacaagtagacttggttcggactgccaacaagtgtctcgtgttataggcaatgaccttaacctgatttcacgcaatttacttcagggtgcaggtgcattaatttatctgctagtcttatcttggcctctcggattgtgtacaatgtttgtttgtgcaactctatcagcaattatgctagttcatggacgaaaagggcagctaaatttgcacaggagttcaccgcaaacgccaataatgttgctcaagaggtgataactttggttaggacagtgcgagtatatggaacagaaaagcaggagtttaaaaggtatgcaaactggcttgataagctgtatgatgtgagctttcggcagacagtggcttatggaggctggagcctgagcttgaactatctataccattctactcaggtcattggagtggtgattggaggcctagcaatcatgtctgggaagttaactgctgagcagttgacaaaattcacactctatgctgaatggctaattttgtccacatggtggattggggacaactggtcctccctgatgcagtctgtcggagcaagtgaaaaagtttttcgtttaatggatctccttcctagcaagcagcttagctctgaaggcctcaagttagagaagttgaaagggcaaattcagtatgctgatgtatcattttcatatccatcaagacctacggtaccaattttgggaggcttgaatttaacactgaatccaaacgaagtagttgcaattgttggtcttagtggaagtggcaagagcactataatcaatttactacttagattatacgaacctacaaatgggcaaatactaattgatggtgtcccgctcactgagcttgatatcagatggttcagggaaagaattggtttcgtcggacaggaaccacgcttattccgaatggatatcagctctaatattaaatatggttgcccaagagatgtcagtcatgaagaagtgatatgggctgcaaagcaggcctatgctcatgacttcataatggctttgcctgatggttataacaccatcgttgatgatgctcttctcagtggaggtcagaaacaacgtgttgctattgccagggcccttctgagggacccatctatcttactgcttgatgaagccactagtgcgcttgatgctgagagtgaacattatgtcaagagcgtcatcacaaaagttagtcgagattcaaaggctaaaagaactgtggtaatcatagcacacaggctatctacaattcaaacagctgatagaattattgtgatggaaaatggtaatattgtggaggatggtaaacacattgatcttattgagaagggtggtctatattcaagattagccaggcgacaaaatgacgatctcaagtagccctggatcacagaatgtggtttagtgcacgccttctttttaaatggaatggcagaagggagagtcgtctgtcattagtgtattctttgcaagaactgacctggacccaggagctcgaataagctggcattgtttttcccatgaaccagaaacggtttgtgactgatcaaaataaaccaaaacggtttcccccacgaggacgagcacattaagcatcgagagcggcagtatggagaacagacttctaagaggtccagtattgtaaaagtagcttccataacaaagtgtatatgcgtttttatcttgttatcgggaactctgaaacttatcttacactacacacggaggaaacgctccaattttgttacgagcactgtgtgccttatttcctgaattttcgtgtaaaaatgtactccctgcgtcccaaaacagttgacgttataatatttatagttaaacttgtaacttaaattattagcaacataaattattataaaaatatatttaaagatctattgaaata

SEQ ID NO: 30996 - DNA, 2966 bp, Zea Mays
aaatcctaaaaattccaccaccaccgaaccgagcactttcgctacgcaaacacgcgcgtggaaaacaaaacggcacacaaattatttattttttttcctttttcgatcccagacacaacacaagactgaaaaagtcagcgaggaaggaaaaaaaaatctgcgaggcagcgcagccggacgaggaggaggaggtcaggactcaggaggagaggcgtcgcggactcgcggtggcagtgccgcgcacggcaacccaacccagctcagctccggcgaggacgcaaccgttgacgtcgctcttggcctcgcctcgttatttgaggtcgcgcggccgcgagccggggtccagatcgagtctcgcgcgaggtgtttcggcaccgcgaaatgccgcctccggctgcgatgctgctccttacggcggcctcggggcctcccacgctgtcgctgaccctggccgcgaggcgggcgccgctccgggccccaagccggcggaggctgcgggcgctgcggccggcgaggatccgcgccgccgcggcgatcggtggcgagttcggcggcctcggccggcgccgcgtcgtcgtgggagagttcatcgagcgcctgcgcaacgttctgcccgggggcagttggtggcgcctcgaggacggcgatgaggccggggacggggccggccgcgcagaggggagcggtaccaccgccgtgtccgcgctcaggcggatgtgggccctcgttgccggcgacagattggtcatctatgtcggcttcgcgtccctcgtcggcgctgcgctttcggagatcgccataccacatctccttgcagcgtccattttctctgcgcagaatggaggcgcggtgttctaccgaaatgccaagcttctggttgtcctatgtctggtttccggggtgtttagtggcatacgaagttgctgttttggtgttgcaaacatgatattggttaaacggatgagagaggagttatttgattccattctttcacaggatatttccttttttgatgaagaaacagtaggagatctgacaagtagacttggttcggactgccaacaagtgtctcgtgttataggcaatgaccttaacctgatttcacgcaatttacttcagggtgcaggtgcattaatttatctgctagtcttatcttggcctctcggattgtgtacaatgtttgtttgtgcaactctatcagcaattatgctagttcatggacggtttcagaaaagggcagctaaatttgcacaggagttcaccgcaaacgccaataatgttgctcaagaggtgataactttggttaggacagtgcgagtatatggaacagaaaagcaggagtttaaaaggtatgcaaactggcttgataagctgtatgatgtgagctttcggcagacagtggcttatggaggctggagcctgagcttgaactatctataccattctactcagctttgcgtaggtcattggagtggtgattggaggcctagcaatcatgtctgggaagttaactgctgagcagttgacaaaattcacactctatgctgaatggctaattttgtccacatggtggattggggacaactggtcctccctgatgcagtctgtcggagcaagtgaaaaagtttttcgtttaatggatctccttcctagcaagcagcttagctctgaaggcctcaagttagagaagttgaaagggcaaattcagtatgctgatgtatcattttcatatccatcaagacctacggtaccaattttgggaggcttgaatttaacactgaatccaaacgaagtagttgcaattgttggtcttagtggaagtggcaagagcactataatcaatttactacttagattatacgaacctacaaatgggcaaatactaattgatggtgtcccgctcactgagcttgatatcagatggttcagggaaagaattggtttcgtcggacaggaaccacgcttattccgaatggatatcagctctaatattaaatatggttgcccaagagatgtcagtcatgaagaagtgatatgggctgcaaagcaggcctatgctcatgacttcataatggctttgcctgatggttataacaccatcgttgatgatgctcttctcagtggaggtcagaaacaacgtgttgctattgccagggcccttctgagggacccatctatcttactgcttgatgaagccactagtgcgcttgatgctgagagtgaacattatgtcaagagcgtcatcacaaaagttagtcgagattcaaaggctaaaagaactgtggtaatcatagcacacaggctatctacaattcaaacagctgatagaattattgtgatggaaaatggtaatattgtggaggatggtaaacacattgatcttattgagaagggtggtctatattcaagattagccaggcgacaaaatgacgatctcaagtagccctggatcacagaatgtggtttagtgcacgccttctttttaaatggaatggcagaagggagagtcgtctgtcattagtgtattctttgcaagaactgacctggacccaggagctcgaataagctggcattgtttttcccatgaaccagaaacggtttgtgactgatcaaaataaaccaaaacggtttcccccacgaggacgagcacattaagcatcgagagcggcagtatggagaacagacttctaagaggtccagtattgtaaaagtagcttccataacaaagtgtatatgcgtttttatcttgttatcgggaactctgaaacttatcttacactacacacggaggaaacgctccaattttgttacgagcactgtgtgccttatttcctgaattttcgtgtaaaaatgtactccctgcgtcccaaaacagttgacgttataatatttatagttaaacttgtaacttaaattattagcaacataaattattataaaaatatatttaaagatctattgaaata

SEQ ID NO: 30997 - DNA, 2911 bp, Zea Mays
aaatcctaaaaattccaccaccaccgaaccgagcactttcgctacgcaaacacgcgcgtggaaaacaaaacggcacacaaattatttattttttttcctttttcgatcccagacacaacacaagactgaaaaagtcagcgaggaaggaaaaaaaaatctgcgaggcagcgcagccggacgaggaggaggaggtcaggactcaggaggagaggcgtcgcggactcgcggtggcagtgccgcgcacggcaacccaacccagctcagctccggcgaggacgcaaccgttgacgtcgctcttggcctcgcctcgttatttgaggtcgcgcggccgcgagccggggtccagatcgagtctcgcgcgaggtgtttcggcaccgcgaaatgccgcctccggctgcgatgctgctccttacggcggcctcggggcctcccacgctgtcgctgaccctggccgcgaggcgggcgccgctccgggccccaagccggcggaggctgcgggcgctgcggccggcgaggatccgcgccgccgcggcgatcggtggcgagttcggcggcctcggccggcgccgcgtcgtcgtgggagagttcatcgagcgcctgcgcaacgttctgcccgggggcagttggtggcgcctcgaggacggcgatgaggccggggacggggccggccgcgcagaggggagcggtaccaccgccgtgtccgcgctcaggcggatgtgggccctcgttgccggcgacagattggtcatctatgtcggcttcgcgtccctcgtcggcgctgcgctttcggagatcgccataccacatctccttgcagcgtccattttctctgcgcagaatggaggcgcggtgttctaccgaaatgccaagcttctggttgtcctatgtctggtttccggggtgtttagtggcatacgaagttgctgttttggtgttgcaaacatgatattggatatttccttttttgatgaagaaacagtaggagatctgacaagtagacttggttcggactgccaacaagtgtctcgtgttataggcaatgaccttaacctgatttcacgcaatttacttcagggtgcaggtgcattaatttatctgctagtcttatcttggcctctcggattgtgtacaatgtttgtttgtgcaactctatcagcaattatgctagttcatggacggtttcagaaaagggcagctaaatttgcacaggagttcaccgcaaacgccaataatgttgctcaagaggtgataactttggttaggacagtgcgagtatatggaacagaaaagcaggagtttaaaaggtatgcaaactggcttgataagctgtatgatgtgagctttcggcagacagtggcttatggaggctggagcctgagcttgaactatctataccattctactcaggtcattggagtggtgattggaggcctagcaatcatgtctgggaagttaactgctgagcagttgacaaaattcacactctatgctgaatggctaattttgtccacatggtggattggggacaactggtcctccctgatgcagtctgtcggagcaagtgaaaaagtttttcgtttaatggatctccttcctagcaagcagcttagctctgaaggcctcaagttagagaagttgaaagggcaaattcagtatgctgatgtatcattttcatatccatcaagacctacggtaccaattttgggaggcttgaatttaacactgaatccaaacgaagtagttgcaattgttggtcttagtggaagtggcaagagcactataatcaatttactacttagattatacgaacctacaaatgggcaaatactaattgatggtgtcccgctcactgagcttgatatcagatggttcagggaaagaattggtttcgtcggacaggaaccacgcttattccgaatggatatcagctctaatattaaatatggttgcccaagagatgtcagtcatgaagaagtgatatgggctgcaaagcaggcctatgctcatgacttcataatggctttgcctgatggttataacaccatcgttgatgatgctcttctcagtggaggtcagaaacaacgtgttgctattgccagggcccttctgagggacccatctatcttactgcttgatgaagccactagtgcgcttgatgctgagagtgaacattatgtcaagagcgtcatcacaaaagttagtcgagattcaaaggctaaaagaactgtggtaatcatagcacacaggctatctacaattcaaacagctgatagaattattgtgatggaaaatggtaatattgtggaggatggtaaacacattgatcttattgagaagggtggtctatattcaagattagccaggcgacaaaatgacgatctcaagtagccctggatcacagaatgtggtttagtgcacgccttctttttaaatggaatggcagaagggagagtcgtctgtcattagtgtattctttgcaagaactgacctggacccaggagctcgaataagctggcattgtttttcccatgaaccagaaacggtttgtgactgatcaaaataaaccaaaacggtttcccccacgaggacgagcacattaagcatcgagagcggcagtatggagaacagacttctaagaggtccagtattgtaaaagtagcttccataacaaagtgtatatgcgtttttatcttgttatcgggaactctgaaacttatcttacactacacacggaggaaacgctccaattttgttacgagcactgtgtgccttatttcctgaattttcgtgtaaaaatgtactccctgcgtcccaaaacagttgacgttataatatttatagttaaacttgtaacttaaattattagcaacataaattattataaaaatatatttaaagatctattgaaata

SEQ ID NO: 30998 - DNA, 2868 bp, Zea Mays
aaatcctaaaaattccaccaccaccgaaccgagcactttcgctacgcaaacacgcgcgtggaaaacaaaacggcacacaaattatttattttttttcctttttcgatcccagacacaacacaagactgaaaaagtcagcgaggaaggaaaaaaaaatctgcgaggcagcgcagccggacgaggaggaggaggtcaggactcaggaggagaggcgtcgcggactcgcggtggcagtgccgcgcacggcaacccaacccagctcagctccggcgaggacgcaaccgttgacgtcgctcttggcctcgcctcgttatttgaggtcgcgcggccgcgagccggggtccagatcgagtctcgcgcgaggtgtttcggcaccgcgaaatgccgcctccggctgcgatgctgctccttacggcggcctcggggcctcccacgctgtcgctgaccctggccgcgaggcgggcgccgctccgggccccaagccggcggaggctgcgggcgctgcggccggcgaggatccgcgccgccgcggcgatcggtggcgagttcggcggcctcggccggcgccgcgtcgtcgtgggagagttcatcgagcgcctgcgcaacgttctgcccgggggcagttggtggcgcctcgaggacggcgatgaggccggggacggggccggccgcgcagaggggagcggtaccaccgccgtgtccgcgctcaggcggatgtgggccctcgttgccggcgacagattggtcatctatgtcggcttcgcgtccctcgtcggcgctgcgctttcggagatcgccataccacatctccttgcagcgtccattttctctgcgcagaatggaggcgcggtgttctaccgaaatgccaagcttctggttgtcctatgtctggtttccggggtgtttaggatatttccttttttgatgaagaaacagtaggagatctgacaagtagacttggttcggactgccaacaagtgtctcgtgttataggcaatgaccttaacctgatttcacgcaatttacttcagggtgcaggtgcattaatttatctgctagtcttatcttggcctctcggattgtgtacaatgtttgtttgtgcaactctatcagcaattatgctagttcatggacggtttcagaaaagggcagctaaatttgcacaggagttcaccgcaaacgccaataatgttgctcaagaggtgataactttggttaggacagtgcgagtatatggaacagaaaagcaggagtttaaaaggtatgcaaactggcttgataagctgtatgatgtgagctttcggcagacagtggcttatggaggctggagcctgagcttgaactatctataccattctactcaggtcattggagtggtgattggaggcctagcaatcatgtctgggaagttaactgctgagcagttgacaaaattcacactctatgctgaatggctaattttgtccacatggtggattggggacaactggtcctccctgatgcagtctgtcggagcaagtgaaaaagtttttcgtttaatggatctccttcctagcaagcagcttagctctgaaggcctcaagttagagaagttgaaagggcaaattcagtatgctgatgtatcattttcatatccatcaagacctacggtaccaattttgggaggcttgaatttaacactgaatccaaacgaagtagttgcaattgttggtcttagtggaagtggcaagagcactataatcaatttactacttagattatacgaacctacaaatgggcaaatactaattgatggtgtcccgctcactgagcttgatatcagatggttcagggaaagaattggtttcgtcggacaggaaccacgcttattccgaatggatatcagctctaatattaaatatggttgcccaagagatgtcagtcatgaagaagtgatatgggctgcaaagcaggcctatgctcatgacttcataatggctttgcctgatggttataacaccatcgttgatgatgctcttctcagtggaggtcagaaacaacgtgttgctattgccagggcccttctgagggacccatctatcttactgcttgatgaagccactagtgcgcttgatgctgagagtgaacattatgtcaagagcgtcatcacaaaagttagtcgagattcaaaggctaaaagaactgtggtaatcatagcacacaggctatctacaattcaaacagctgatagaattattgtgatggaaaatggtaatattgtggaggatggtaaacacattgatcttattgagaagggtggtctatattcaagattagccaggcgacaaaatgacgatctcaagtagccctggatcacagaatgtggtttagtgcacgccttctttttaaatggaatggcagaagggagagtcgtctgtcattagtgtattctttgcaagaactgacctggacccaggagctcgaataagctggcattgtttttcccatgaaccagaaacggtttgtgactgatcaaaataaaccaaaacggtttcccccacgaggacgagcacattaagcatcgagagcggcagtatggagaacagacttctaagaggtccagtattgtaaaagtagcttccataacaaagtgtatatgcgtttttatcttgttatcgggaactctgaaacttatcttacactacacacggaggaaacgctccaattttgttacgagcactgtgtgccttatttcctgaattttcgtgtaaaaatgtactccctgcgtcccaaaacagttgacgttataatatttatagttaaacttgtaacttaaattattagcaacataaattattataaaaatatatttaaagatctattgaaata

SEQ ID NO: 30999 - DNA, 3061 bp, Zea Mays
aaatcctaaaaattccaccaccaccgaaccgagcactttcgctacgcaaacacgcgcgtggaaaacaaaacggcacacaaattatttattttttttcctttttcgatcccagacacaacacaagactgaaaaagtcagcgaggaaggaaaaaaaaatctgcgaggcagcgcagccggacgaggaggaggaggtcaggactcaggaggagaggcgtcgcggactcgcggtggcagtgccgcgcacggcaacccaacccagctcagctccggcgaggacgcaaccgttgacgtcgctcttggcctcgcctcgttatttgaggtcgcgcggccgcgagccggggtccagatcgagtctcgcgcgaggtgtttcggcaccgcgaaatgccgcctccggctgcgatgctgctccttacggcggcctcggggcctcccacgctgtcgctgaccctggccgcgaggcgggcgccgctccgggccccaagccggcggaggctgcgggcgctgcggccggcgaggatccgcgccgccgcggcgatcggtggcgagttcggcggcctcggccggcgccgcgtcgtcgtgggagagttcatcgagcgcctgcgcaacgttctgcccgggggcagttggtggcgcctcgaggacggcgatgaggccggggacggggccggccgcgcagaggggagcggtaccaccgccgtgtccgcgctcaggcggatgtgggccctcgttgccggcgacagattggtcatctatgtcggcttcgcgtccctcgtcggcgctgcgctttcggagatcgccataccacatctccttgcagcgtccattttctctgcgcagaatggaggcgcggtgttctaccgaaatgccaagcttctggttgtcctatgtctggtttccggggtgtttagtaaaacgtgttgttttgcagactgtagtttgtactgtagcgttctgaaagctctgtgatcagcaaagtttggaagcatactctgacacatttgggagttgagaagttctcattggcatacgaagttgctgttttggtgttgcaaacatgatattggttaaacggatgagagaggagttatttgattccattctttcacaggatatttccttttttgatgaagaaacagtaggagatctgacaagtagacttggttcggactgccaacaagtgtctcgtgttataggcaatgaccttaacctgatttcacgcaatttacttcagggtgcaggtgcattaatttatctgctagtcttatcttggcctctcggattgtgtacaatgtttgtttgtgcaactctatcagcaattatgctagttcatggacgaaaagggcagctaaatttgcacaggagttcaccgcaaacgccaataatgttgctcaagaggtgataactttggttaggacagtgcgagtatatggaacagaaaagcaggagtttaaaaggtatgcaaactggcttgataagctgtatgatgtgagctttcggcagacagtggcttatggaggctggagcctgagcttgaactatctataccattctactcaggtcattggagtggtgattggaggcctagcaatcatgtctgggaagttaactgctgagcagttgacaaaattcacactctatgctgaatggctaattttgtccacatggtggattggggacaactggtcctccctgatgcagtctgtcggagcaagtgaaaaagtttttcgtttaatggatctccttcctagcaagcagcttagctctgaaggcctcaagttagagaagttgaaagggcaaattcagtatgctgatgtatcattttcatatccatcaagacctacggtaccaattttgggaggcttgaatttaacactgaatccaaacgaagtagttgcaattgttggtcttagtggaagtggcaagagcactataatcaatttactacttagattatacgaacctacaaatgggcaaatactaattgatggtgtcccgctcactgagcttgatatcagatggttcagggaaagaattggtttcgtcggacaggaaccacgcttattccgaatggatatcagctctaatattaaatatggttgcccaagagatgtcagtcatgaagaagtgatatgggctgcaaagcaggcctatgctcatgacttcataatggctttgcctgatggttataacaccatcgttgatgatgctcttctcagtggaggtcagaaacaacgtgttgctattgccagggcccttctgagggacccatctatcttactgcttgatgaagccactagtgcgcttgatgctgagagtgaacattatgtcaagagcgtcatcacaaaagttagtcgagattcaaaggctaaaagaactgtggtaatcatagcacacaggctatctacaattcaaacagctgatagaattattgtgatggaaaatggtaatattgtggaggatggtaaacacattgatcttattgagaagggtggtctatattcaagattagccaggcgacaaaatgacgatctcaagtagccctggatcacagaatgtggtttagtgcacgccttctttttaaatggaatggcagaagggagagtcgtctgtcattagtgtattctttgcaagaactgacctggacccaggagctcgaataagctggcattgtttttcccatgaaccagaaacggtttgtgactgatcaaaataaaccaaaacggtttcccccacgaggacgagcacattaagcatcgagagcggcagtatggagaacagacttctaagaggtccagtattgtaaaagtagcttccataacaaagtgtatatgcgtttttatcttgttatcgggaactctgaaacttatcttacactacacacggaggaaacgctccaattttgttacgagcactgtgtgccttatttcctgaattttcgtgtaaaaatgtactccctgcgtcccaaaacagttgacgttataatatttatagttaaacttgtaacttaaattattagcaacataaattattataaaaatatatttaaagatctattgaaata

SEQ ID NO: 31000 - DNA, 2525 bp, Zea Mays
aaatcctaaaaattccaccaccaccgaaccgagcactttcgctacgcaaacacgcgcgtggaaaacaaaacggcacacaaattatttattttttttcctttttcgatcccagacacaacacaagactgaaaaagtcagcgaggaaggaaaaaaaaatctgcgaggcagcgcagccggacgaggaggaggaggtcaggactcaggaggagaggcgtcgcggactcgcggtggcagtgccgcgcacggcaacccaacccagctcagctccggcgaggacgcaaccgttgacgtcgctcttggcctcgcctcgttatttgaggtcgcgcggccgcgagccggggtccagatcgagtctcgcgcgaggtgtttcggcaccgcgaaatgccgcctccggctgcgatgctgctccttacggcggcctcggggcctcccacgctgtcgctgaccctggccgcgaggcgggcgccgctccgggccccaagccggcggaggctgcgggcgctgcggccggcgaggatccgcgccgccgcggcgatcggtggcgagttcggcggcctcggccggcgccgcgtcgtcgtgggagagttcatcgagcgcctgcgcaacgttctgcccgggggcagttggtggcgcctcgaggacggcgatgaggccggggacggggccggccgcgcagaggggagcggtaccaccgccgtgtccgcgctcaggcggatgtgggccctcgttgccggcgacagattggtcatctatgtcggcttcgcgtccctcgtcggcgctgcgctttcggagatcgccataccacatctccttgcagcgtccattttctctgcgcagaatggaggcgcggtgttctaccgaaatgccaagcttctggttgtcctatgtctggtttccggggtgtttaggtatgcaaactggcttgataagctgtatgatgtgagctttcggcagacagtggcttatggaggctggagcctgagcttgaactatctataccattctactcagctttgcgtaggtcattggagtggtgattggaggcctagcaatcatgtctgggaagttaactgctgagcagttgacaaaattcacactctatgctgaatggctaattttgtccacatggtggattggggacaactggtcctccctgatgcagtctgtcggagcaagtgaaaaagtttttcgtttaatggatctccttcctagcaagcagcttagctctgaaggcctcaagttagagaagttgaaagggcaaattcagtatgctgatgtatcattttcatatccatcaagacctacggtaccaattttgggaggcttgaatttaacactgaatccaaacgaagtagttgcaattgttggtcttagtggaagtggcaagagcactataatcaatttactacttagattatacgaacctacaaatgggcaaatactaattgatggtgtcccgctcactgagcttgatatcagatggttcagggaaagaattggtttcgtcggacaggaaccacgcttattccgaatggatatcagctctaatattaaatatggttgcccaagagatgtcagtcatgaagaagtgatatgggctgcaaagcaggcctatgctcatgacttcataatggctttgcctgatggttataacaccatcgttgatgatgctcttctcagtggaggtcagaaacaacgtgttgctattgccagggcccttctgagggacccatctatcttactgcttgatgaagccactagtgcgcttgatgctgagagtgaacattatgtcaagagcgtcatcacaaaagttagtcgagattcaaaggctaaaagaactgtggtaatcatagcacacaggctatctacaattcaaacagctgatagaattattgtgatggaaaatggtaatattgtggaggatggtaaacacattgatcttattgagaagggtggtctatattcaagattagccaggcgacaaaatgacgatctcaagtagccctggatcacagaatgtggtttagtgcacgccttctttttaaatggaatggcagaagggagagtcgtctgtcattagtgtattctttgcaagaactgacctggacccaggagctcgaataagctggcattgtttttcccatgaaccagaaacggtttgtgactgatcaaaataaaccaaaacggtttcccccacgaggacgagcacattaagcatcgagagcggcagtatggagaacagacttctaagaggtccagtattgtaaaagtagcttccataacaaagtgtatatgcgtttttatcttgttatcgggaactctgaaacttatcttacactacacacggaggaaacgctccaattttgttacgagcactgtgtgccttatttcctgaattttcgtgtaaaaatgtactccctgcgtcccaaaacagttgacgttataatatttatagttaaacttgtaacttaaattattagcaacataaattattataaaaatatatttaaagatctattgaaata

SEQ ID NO: 31001 - DNA, 2148 bp, Zea Mays
tgtagtttgtactgtagcgttctgaaagctctgtgatcagcaaagtttggaagcatactctgacacatttgggagttgagaagttctcattggcatacgaagttgctgttttggtgttgcaaacatgatattggttaaacggatgagagaggagttatttgattccattctttcacaggatatttccttttttgatgaagaaacagtaggagatctgacaagtagacttggttcggactgccaacaagtgtctcgtgttataggcaatgaccttaacctgatttcacgcaatttacttcagggtgcaggtgcattaatttatctgctagtcttatcttggcctctcggattgtgtacaatgtttgtttgtgcaactctatcagcaattatgctagttcatggacggtttcagaaaagggcagctaaatttgcacaggagttcaccgcaaacgccaataatgttgctcaagaggtgataactttggttaggacagtgcgagtatatggaacagaaaagcaggagtttaaaaggtatgcaaactggcttgataagctgtatgatgtgagctttcggcagacagtggcttatggaggctggagcctgagcttgaactatctataccattctactcagctttgcgtaggtcattggagtggtgattggaggcctagcaatcatgtctgggaagttaactgctgagcagttgacaaaattcacactctatgctgaatggctaattttgtccacatggtggattggggacaactggtcctccctgatgcagtctgtcggagcaagtgaaaaagtttttcgtttaatggatctccttcctagcaagcagcttagctctgaaggcctcaagttagagaagttgaaagggcaaattcagtatgctgatgtatcattttcatatccatcaagacctacggtaccaattttgggaggcttgaatttaacactgaatccaaacgaagtagttgcaattgttggtcttagtggaagtggcaagagcactataatcaatttactacttagattatacgaacctacaaatgggcaaatactaattgatggtgtcccgctcactgagcttgatatcagatggttcagggaaagaattggtttcgtcggacaggaaccacgcttattccgaatggatatcagctctaatattaaatatggttgcccaagagatgtcagtcatgaagaagtgatatgggctgcaaagcaggcctatgctcatgacttcataatggctttgcctgatggttataacaccatcgttgatgatgctcttctcagtggaggtcagaaacaacgtgttgctattgccagggcccttctgagggacccatctatcttactgcttgatgaagccactagtgcgcttgatgctgagagtgaacattatgtcaagagcgtcatcacaaaagttagtcgagattcaaaggctaaaagaactgtggtaatcatagcacacaggctatctacaattcaaacagctgatagaattattgtgatggaaaatggtaatattgtggaggatggtaaacacattgatcttattgagaagggtggtctatattcaagattagccaggcgacaaaatgacgatctcaagtagccctggatcacagaatgtggtttagtgcacgccttctttttaaatggaatggcagaagggagagtcgtctgtcattagtgtattctttgcaagaactgacctggacccaggagctcgaataagctggcattgtttttcccatgaaccagaaacggtttgtgactgatcaaaataaaccaaaacggtttcccccacgaggacgagcacattaagcatcgagagcggcagtatggagaacagacttctaagaggtccagtattgtaaaagtagcttccataacaaagtgtatatgcgtttttatcttgttatcgggaactctgaaacttatcttacactacacacggaggaaacgctccaattttgttacgagcactgtgtgccttatttcctgaattttcgtgtaaaaatgtactccctgcgtcccaaaacagttgacgttataatatttatagttaaacttgtaacttaaattattagcaacataaattattataaaaatatatttaaagatctattgaaata

SEQ ID NO: 31002 - DNA, 1998 bp, Zea Mays
tggcatacgaagttgctgttttggtgttgcaaacatgatattggttaaacggatgagagaggagttatttgattccattctttcacaggatatttccttttttgatgaagaaacagtaggagatctgacaagtagacttggttcggactgccaacaagtgtctcgtgttataggcaatgaccttaacctgatttcacgcaatttacttcagggtgcaggtgcattaatttatctgctagtcttatcttggcctctcggattgtgtacaatgtttgtttgtgcaactctatcagcaattatgctagttcatggacggtttcagaaaagggcagctaaatttgcacaggagttcaccgcaaacgccaataatgttgctcaagaggtgataactttggttaggacagtgcgagtatatggaacagaaaagcaggagtttaaaagtggcttatggaggctggagcctgagcttgaactatctataccattctactcaggtcattggagtggtgattggaggcctagcaatcatgtctgggaagttaactgctgagcagttgacaaaattcacactctatgctgaatggctaattttgtccacatggtggattggggacaactggtcctccctgatgcagtctgtcggagcaagtgaaaaagtttttcgtttaatggatctccttcctagcaagcagcttagctctgaaggcctcaagttagagaagttgaaagggcaaattcagtatgctgatgtatcattttcatatccatcaagacctacggtaccaattttgggaggcttgaatttaacactgaatccaaacgaagtagttgcaattgttggtcttagtggaagtggcaagagcactataatcaatttactacttagattatacgaacctacaaatgggcaaatactaattgatggtgtcccgctcactgagcttgatatcagatggttcagggaaagaattggtttcgtcggacaggaaccacgcttattccgaatggatatcagctctaatattaaatatggttgcccaagagatgtcagtcatgaagaagtgatatgggctgcaaagcaggcctatgctcatgacttcataatggctttgcctgatggttataacaccatcgttgatgatgctcttctcagtggaggtcagaaacaacgtgttgctattgccagggcccttctgagggacccatctatcttactgcttgatgaagccactagtgcgcttgatgctgagagtgaacattatgtcaagagcgtcatcacaaaagttagtcgagattcaaaggctaaaagaactgtggtaatcatagcacacaggctatctacaattcaaacagctgatagaattattgtgatggaaaatggtaatattgtggaggatggtaaacacattgatcttattgagaagggtggtctatattcaagattagccaggcgacaaaatgacgatctcaagtagccctggatcacagaatgtggtttagtgcacgccttctttttaaatggaatggcagaagggagagtcgtctgtcattagtgtattctttgcaagaactgacctggacccaggagctcgaataagctggcattgtttttcccatgaaccagaaacggtttgtgactgatcaaaataaaccaaaacggtttcccccacgaggacgagcacattaagcatcgagagcggcagtatggagaacagacttctaagaggtccagtattgtaaaagtagcttccataacaaagtgtatatgcgtttttatcttgttatcgggaactctgaaacttatcttacactacacacggaggaaacgctccaattttgttacgagcactgtgtgccttatttcctgaattttcgtgtaaaaatgtactccctgcgtcccaaaacagttgacgttataatatttatagttaaacttgtaacttaaattattagcaacataaattattataaaaatatatttaaagatctattgaaata

SEQ ID NO: 31003 - DNA, 2041 bp, Zea Mays
tggcatacgaagttgctgttttggtgttgcaaacatgatattggttaaacggatgagagaggagttatttgattccattctttcacaggatatttccttttttgatgaagaaacagtaggagatctgacaagtagacttggttcggactgccaacaagtgtctcgtgttataggcaatgaccttaacctgatttcacgcaatttacttcaggtgcattaatttatctgctagtcttatcttggcctctcggattgtgtacaatgtttgtttgtgcaactctatcagcaattatgctagttcatggacggtttcagaaaagggcagctaaatttgcacaggagttcaccgcaaacgccaataatgttgctcaagaggtgataactttggttaggacagtgcgagtatatggaacagaaaagcaggagtttaaaaggtatgcaaactggcttgataagctgtatgatgtgagctttcggcagacagtggcttatggaggctggagcctgagcttgaactatctataccattctactcaggtcattggagtggtgattggaggcctagcaatcatgtctgggaagttaactgctgagcagttgacaaaattcacactctatgctgaatggctaattttgtccacatggtggattggggacaactggtcctccctgatgcagtctgtcggagcaagtgaaaaagtttttcgtttaatggatctccttcctagcaagcagcttagctctgaaggcctcaagttagagaagttgaaagggcaaattcagtatgctgatgtatcattttcatatccatcaagacctacggtaccaattttgggaggcttgaatttaacactgaatccaaacgaagtagttgcaattgttggtcttagtggaagtggcaagagcactataatcaatttactacttagattatacgaacctacaaatgggcaaatactaattgatggtgtcccgctcactgagcttgatatcagatggttcagggaaagaattggtttcgtcggacaggaaccacgcttattccgaatggatatcagctctaatattaaatatggttgcccaagagatgtcagtcatgaagaagtgatatgggctgcaaagcaggcctatgctcatgacttcataatggctttgcctgatggttataacaccatcgttgatgatgctcttctcagtggaggtcagaaacaacgtgttgctattgccagggcccttctgagggacccatctatcttactgcttgatgaagccactagtgcgcttgatgctgagagtgaacattatgtcaagagcgtcatcacaaaagttagtcgagattcaaaggctaaaagaactgtggtaatcatagcacacaggctatctacaattcaaacagctgatagaattattgtgatggaaaatggtaatattgtggaggatggtaaacacattgatcttattgagaagggtggtctatattcaagattagccaggcgacaaaatgacgatctcaagtagccctggatcacagaatgtggtttagtgcacgccttctttttaaatggaatggcagaagggagagtcgtctgtcattagtgtattctttgcaagaactgacctggacccaggagctcgaataagctggcattgtttttcccatgaaccagaaacggtttgtgactgatcaaaataaaccaaaacggtttcccccacgaggacgagcacattaagcatcgagagcggcagtatggagaacagacttctaagaggtccagtattgtaaaagtagcttccataacaaagtgtatatgcgtttttatcttgttatcgggaactctgaaacttatcttacactacacacggaggaaacgctccaattttgttacgagcactgtgtgccttatttcctgaattttcgtgtaaaaatgtactccctgcgtcccaaaacagttgacgttataatatttatagttaaacttgtaacttaaattattagcaacataaattattataaaaatatatttaaagatctattgaaata

SEQ ID NO: 31004 - DNA, 2080 bp, Zea Mays
aaaccatgttaaacggatgagagaggagttatttgattccattctttcacagaaacagtaggagatctgacaagtagacttggttcggactgccaacaagtgtctcgtgttataggcaatgaccttaacctgatttcacgcaatttacttcaggtgcattaatttatctgctagtcttatcttggcctctcggattgtgtacaatgtttgtttgtgcaactctatcagcaattatgctagttcatggacgaaaagggcagctaaatttgcacaggagttcaccgcaaacgccaataatgttgctcaagaggtgataactttggttaggacagtgcgagtatatggaacagaaaagcaggagtttaaaaggtatgcaaactggcttgataagctgtatgatgtgagctttcggcagacagtggcttatggaggctggagcctgagcttgaactatctataccattctactcaggtcattggagtggtgattggaggcctagcaatcatgtctgggaagttaactgctgagcagttgacaaaattcacactctatgctgaatggctaattttgtccacatggtggattggggacaactggtcctccctgatgcagtctgtcggagcaagtgaaaaagtttttcgtttaatggatctccttcctagcaagcagcttagctctgaaggcctcaagttagagaagttgaaagggcaaattcagtatgctgatgtatcattttcatatccatcaagacctacggtaccaattttgggaggcttgaatttaacactgaatccaaacgaagtagttgcaattgttggtcttagtggaagtggcaagagcactataatcaatttactacttagattatacgaacctacaaatgggcaaatactaattgatggtgtcccgctcactgagcttgatatcagatggttcagggaaagaattggtttcgtcggacaggaaccacgcttattccgaatggatatcagctctaatattaaatatggttgcccaagagatgtcagtcatgaagaagtgatatgggctgcaaagcaggcctatgctcatgacttcataatggctttgcctgatggttataacaccatcgttgatgatgctcttctcagtggaggtcagaaacaacgtgttgctattgccagggcccttctgagggacccatctatcttactgcttgatgaagccactagtgcgcttgatgctgagagtgaacattatgtcaaggtaaatcattaatgaggaatttgaatatcctgtgagttcaaatggtgtatgtacattccaaatgttcctaggaaaaatctattgacatctttctgtcaaactagagcgtcatcacaaaagttagtcgagattcaaaggctaaaagaactgtggtaatcatagcacacaggctatctacaattcaaacagctgatagaattattgtgatggaaaatggtaatattgtggaggatggtaaacacattgatcttattgagaagggtggtctatattcaagattagccaggcgacaaaatgacgatctcaagtagccctggatcacagaatgtggtttagtgcacgccttctttttaaatggaatggcagaagggagagtcgtctgtcattagtgtattctttgcaagaactgacctggacccaggagctcgaataagctggcattgtttttcccatgaaccagaaacggtttgtgactgatcaaaataaaccaaaacggtttcccccacgaggacgagcacattaagcatcgagagcggcagtatggagaacagacttctaagaggtccagtattgtaaaagtagcttccataacaaagtgtatatgcgtttttatcttgttatcgggaactctgaaacttatcttacactacacacggaggaaacgctccaattttgttacgagcactgtgtgccttatttcctgaattttcgtgtaaaaatgtactccctgcgtcccaaaacagttgacgttataatatttatagttaaacttgtaacttaaattattagcaacataaattattataaaaatatatttaaagatctattgaaata

SEQ ID NO: 31005 - DNA, 1958 bp, Zea Mays
gttatttgattccattctttcacagtaggagatctgacaagtagacttggttcggactgccaacaagtgtctcgtgttataggcaatgaccttaacctgatttcacgcaatttacttcagggtgcaggtgcattaatttatctgctagtcttatcttggcctctcggattgtgtacaatgtttgtttgtgcaactctatcagcaattatgctagttcatggacggtttcagaaaagggcagctaaatttgcacaggagttcaccgcaaacgccaataatggttgctcaagaggtgataactttggttaggacagtgcgagtatatggaacagaaaagcaggagtttaaaaggtatgcaaactggcttgataagctgtatgatgtgagctttcggcagacagtggcttatggaggctggagcctgagcttgaactatctataccattctactcaggtcattggagtggtgattggaggcctagcaatcatgtctgggaagttaactgctgagcagttgacaaaattcacactctatgctgaatggctaattttgtccacatggtggattggggacaactggtcctccctgatgcagtctgtcggagcaagtgaaaaagtttttcgtttaatggatctccttcctagcaagcagcttagctctgaaggcctcaagttagagaagttgaaagggcaaattcagtatgctgatgtatcattttcatatccatcaagacctacggtaccaattttgggaggcttgaatttaacactgaatccaaacgaagtagttgcaattgttggtcttagtggaagtggcaagagcactataatcaatttactacttagattatacgaacctacaaatgggcaaatactaattgatggtgtcccgctcactgagcttgatatcagatggttcagggaaagaattggtttcgtcggacaggaaccacgcttattccgaatggatatcagctctaatattaaatatggttgcccaagagatgtcagtcatgaagaagtgatatgggctgcaaagcaggcctatgctcatgacttcataatggctttgcctgatggttataacaccatcgttgatgatgctcttctcagtggaggtcagaaacaacgtgttgctattgccagggcccttctgagggacccatctatcttactgcttgatgaagccactagtgcgcttgatgctgagagtgaacattatgtcaagagcgtcatcacaaaagttagtcgagattcaaaggctaaaagaactgtggtaatcatagcacacaggctatctacaattcaaacagctgatagaattattgtgatggaaaatggtaatattgtggaggatggtaaacacattgatcttattgagaagggtggtctatattcaagattagccaggcgacaaaatgacgatctcaagtagccctggatcacagaatgtggtttagtgcacgccttctttttaaatggaatggcagaagggagagtcgtctgtcattagtgtattctttgcaagaactgacctggacccaggagctcgaataagctggcattgtttttcccatgaaccagaaacggtttgtgactgatcaaaataaaccaaaacggtttcccccacgaggacgagcacattaagcatcgagagcggcagtatggagaacagacttctaagaggtccagtattgtaaaagtagcttccataacaaagtgtatatgcgtttttatcttgttatcgggaactctgaaacttatcttacactacacacggaggaaacgctccaattttgttacgagcactgtgtgccttatttcctgaattttcgtgtaaaaatgtactccctgcgtcccaaaacagttgacgttataatatttatagttaaacttgtaacttaaattattagcaacataaattattataaaaatatatttaaagatctattgaaata

SEQ ID NO: 31006 - DNA, 1990 bp, Zea Mays
attccattctttcacagaggatatttccttttttgatgaagaaacagtaggagatctgacaagtagacttggttcggactgccaacaagtgtctcgtgttataggcaatgaccttaacctgatttcacgcaatttacttcagggtgcaggtgcattaatttatctgctagtcttatcttggcctctcggattgtgtacaatgtttgtttgtgcaactctatcagcaattatgctagttcatggacggtttcagaaaagggcagctaaatttgcacaggagttcaccgcaaacgccaataatggttgctcaagaggtgataactttggttaggacagtgcgagtatatggaacagaaaagcaggagtttaaaaggtatgcaaactggcttgataagctgtatgatgtgagctttcggcagacagtggcttatggaggctggagcctgagcttgaactatctataccattctactcagctttgcgtaggtcattggagtggtgattggaggcctagcaatcatgtctgggaagttaactgctgagcagttgacaaaattcacactctatgctgaatggctaattttgtccacatggtggattggggacaactggtcctccctgatgcagtctgtcggagcaagtgaaaaagtttttcgtttaatggatctccttcctagcaagcagcttagctctgaaggcctcaagttagagaagttgaaagggcaaattcagtatgctgatgtatcattttcatatccatcaagacctacggtaccaattttgggaggcttgaatttaacactgaatccaaacgaagtagttgcaattgttggtcttagtggaagtggcaagagcactataatcaatttactacttagattatacgaacctacaaatgggcaaatactaattgatggtgtcccgctcactgagcttgatatcagatggttcagggaaagaattggtttcgtcggacaggaaccacgcttattccgaatggatatcagctctaatattaaatatggttgcccaagagatgtcagtcatgaagaagtgatatgggctgcaaagcaggcctatgctcatgacttcataatggctttgcctgatggttataacaccatcgttgatgatgctcttctcagtggaggtcagaaacaacgtgttgctattgccagggcccttctgagggacccatctatcttactgcttgatgaagccactagtgcgcttgatgctgagagtgaacattatgtcaagagcgtcatcacaaaagttagtcgagattcaaaggctaaaagaactgtggtaatcatagcacacaggctatctacaattcaaacagctgatagaattattgtgatggaaaatggtaatattgtggaggatggtaaacacattgatcttattgagaagggtggtctatattcaagattagccaggcgacaaaatgacgatctcaagtagccctggatcacagaatgtggtttagtgcacgccttctttttaaatggaatggcagaagggagagtcgtctgtcattagtgtattctttgcaagaactgacctggacccaggagctcgaataagctggcattgtttttcccatgaaccagaaacggtttgtgactgatcaaaataaaccaaaacggtttcccccacgaggacgagcacattaagcatcgagagcggcagtatggagaacagacttctaagaggtccagtattgtaaaagtagcttccataacaaagtgtatatgcgtttttatcttgttatcgggaactctgaaacttatcttacactacacacggaggaaacgctccaattttgttacgagcactgtgtgccttatttcctgaattttcgtgtaaaaatgtactccctgcgtcccaaaacagttgacgttataatatttatagttaaacttgtaacttaaattattagcaacataaattattataaaaatatatttaaagatctattgaaata

SEQ ID NO: 31007 - DNA, 1979 bp, Zea Mays
attccattctttcacagaggatatttccttttttgatgaagaaacagtaggagatctgacaagtagacttggttcggactgccaacaagtgtctcgtgttataggcaatgaccttaacctgatttcacgcaatttacttcagggtgcaggtgcattaatttatctgctagtcttatcttggcctctcggattgtgtacaatgtttgtttgtgcaactctatcagcaattatgctagttcatggacggtttcagaaaagggcagctaaatttgcacaggagttcaccgcaaacgccaataatgttgctcaagaggtgataactttggttaggacagtgcgagtatatggaacagaaaagcaggagtttaaaaggtatgcaaactggcttgataagctgtatgatgtgagctttcggcagacagtggcttatggaggctggagcctgagcttgaactatctataccattctactcaggtcattggagtggtgattggaggcctagcaatcatgtctgggaagttaactgctgagcagttgacaaaattcacactctatgctgaatggctaattttgtccacatggtggattggggacaactggtcctccctgatgcagtctgtcggagcaagtgaaaaagtttttcgtttaatggatctccttcctagcaagcagcttagctctgaaggcctcaagttagagaagttgaaagggcaaattcagtatgctgatgtatcattttcatatccatcaagacctacggtaccaattttgggaggcttgaatttaacactgaatccaaacgaagtagttgcaattgttggtcttagtggaagtggcaagagcactataatcaatttactacttagattatacgaacctacaaatgggcaaatactaattgatggtgtcccgctcactgagcttgatatcagatggttcagggaaagaattggtttcgtcggacaggaaccacgcttattccgaatggatatcagctctaatattaaatatggttgcccaagagatgtcagtcatgaagaagtgatatgggctgcaaagcaggcctatgctcatgacttcataatggctttgcctgatggttataacaccatcgttgatgatgctcttctcagtggaggtcagaaacaacgtgttgctattgccagggcccttctgagggacccatctatcttactgcttgatgaagccactagtgcgcttgatgctgagagtgaacattatgtcaagagcgtcatcacaaaagttagtcgagattcaaaggctaaaagaactgtggtaatcatagcacacaggctatctacaattcaaacagctgatagaattattgtgatggaaaatggtaatattgtggaggatggtaaacacattgatcttattgagaagggtggtctatattcaagattagccaggcgacaaaatgacgatctcaagtagccctggatcacagaatgtggtttagtgcacgccttctttttaaatggaatggcagaagggagagtcgtctgtcattagtgtattctttgcaagaactgacctggacccaggagctcgaataagctggcattgtttttcccatgaaccagaaacggtttgtgactgatcaaaataaaccaaaacggtttcccccacgaggacgagcacattaagcatcgagagcggcagtatggagaacagacttctaagaggtccagtattgtaaaagtagcttccataacaaagtgtatatgcgtttttatcttgttatcgggaactctgaaacttatcttacactacacacggaggaaacgctccaattttgttacgagcactgtgtgccttatttcctgaattttcgtgtaaaaatgtactccctgcgtcccaaaacagttgacgttataatatttatagttaaacttgtaacttaaattattagcaacataaattattataaaaatatatttaaagatctattgaaata

SEQ ID NO: 31008 - DNA, 1187 bp, Zea Mays
cgggcacaacagtaccacgcgacgtcaaatacgggcacaactcgtgaacgacggcggcgcctagcggcgacatcgtccccctcgactcctcctccatccccgatgcggcgcgccagcctgcagattagcttattacctccatgggtaaaagaaagcggtcgttgtgtcaacaagataaccataatgattctctagccagcaaaataatgagaactagaatcccagatcttcctgaggacatttggtctcatgtacattccctaatgccaatgcgtgatgctggccgtgctgcttgcctatctcgtgcctttttacgttcctggagacgtcatcctaatcttatctttaataaggatacgattggcatgaaaaaaaattcatatggagagaatttccaccacaaaattagccgcattctcaggaatcactctggcattagtttgaaaacattcaagcttgactacagtggcatgtgtgggttcgatggaactatatcttgacagttggcttcaggctgctcttaatccagggattgaagaactcaccctctggttgttccatacaaggagaatatatgaattcccatgctcacttttatctgatggggttcgaaattcacttcggtaccttaaacttcgttgttgtgctctccgtcccacagttgaacttgcccccatgagaagcctaacaagtttacatttgtcctttgtgagcattaaatgggatgggttaaagcgcctcctttccaactcccttgctctggaggaattagagctagtatgttgtgacaagatcgtttgcctcaagataccttctgccctgcagcgtctcaacagccttaatatttttggatgctcggccctcaaagtgctagagagcaaagctccaaatctctctagtctttctcttttacattttggaggcaggctagtcttctcacgtgtgaaaacattgcaaatgaagaaactaatcactgaaagtaccgtctatgatgctcgtaccaggctgccatccactatgcccaatcttgaaactcttgtcataaactcatttgattgggtatgtatgtatgtgtgtgtgtgtgtgtgtgtgtgtatatatatatatatatatatatatatatatatatatatatatatatatatatatatatatatatatatatatactatttaaagatagatgtt

SEQ ID NO: 31009 - DNA, 1159 bp, Zea Mays
gtcaaatacgggcacaactcgtgaacgacggcggcgcctagcggcgacatcgtccccctcgactcctcctccatccccgatgcggcgcgccagcctgcagcttattacctccatgggtaaaagaaagcggtcgttgtgtcaacaagataaccataatgattctctagccagcaaaataatgagaactagaatcccagatcttcctgaggacatttggtctcatgtacattccctaatgccaatgcgtgatgctggccgtgctgcttgcctatctcgtgcctttttacgttcctggagacgtcatcctaatcttatctttaataaggatacgattggcatgaaaaaaaattcatatggagagaatttccaccacaaaattagccgcattctcaggaatcactctggcattagtttgaaaacattcaagcttgactacagtggcatgtgtgggttcgatggaactatatcttgacagttggcttcaggctgctcttaatccagggattgaagaactcaccctctggttgttccatacaaggagaatatatgaattcccatgctcacttttatctgatggggttcgaaattcacttcggtaccttaaacttcgttgttgtgctctccgtcccacagttgaacttgcccccatgagaagcctaacaagtttacatttgtcctttgtgagcattaaatgggatgggttaaagcgcctcctttccaactcccttgctctggaggaattagagctagtatgttgtgacaagatcgtttgcctcaagataccttctgccctgcagcgtctcaacagccttaatatttttggatgctcggccctcaaagtgctagagagcaaagctccaaatctctctagtctttctcttttacattttggaggcaggctagtcttctcacgtgtgaaaacattgcaaatgaagaaactaatcactgaaagtaccgtctatgatgctcgtaccaggctgccatccactatgcccaatcttgaaactcttgtcataaactcatttgattgggtatgtatgtatgtgtgtgtgtgtgtgtgtgtgtgtatatatatatatatatatatatatatatatatatatatatatatatatatatatatatatatatatatatatactatttaaagatagatgtt

SEQ ID NO: 31010 - DNA, 1322 bp, Zea Mays
tgaacgacggcggcgcctagcggcgacatcgtccccctcgactcctcctccatccccgatgcggcgcgccagcctgcaggtgcccaattgtctaaatttctacaactcagatgagaccaaaactcctactccaatatctaatcagatttagtcccataagttgtctgagttattgtttggtccatcagtcgccttctatagcaccgaaagcaccccccgtattttgcggggggaaacggtgttctttcggggctacagattagcttattacctccatgggtaaaagaaagcggtcgttgtgtcaacaagataaccataatgattctctagccagcaaaataatgagaactagaatcccagatcttcctgaggacatttggtctcatgtacattccctaatgccaatgcgtgatgctggccgtgctgcttgcctatctcgtgcctttttacgttcctggagacgtcatcctaatcttatctttaataaggatacgattggcatgaaaaaaaattcatatggagagaatttccaccacaaaattagccgcattctcaggaatcactctggcattagtttgaaaacattcaagcttgactacagtggcatgtgtgggttcgatggaactatatcttgacagttggcttcaggctgctcttaatccagggattgaagaactcaccctctggttgttccatacaaggagaatatatgaattcccatgctcacttttatctgatggggttcgaaattcacttcggtaccttaaacttcgttgttgtgctctccgtcccacagttgaacttgcccccatgagaagcctaacaagtttacatttgtcctttgtgagcattaaatgggatgggttaaagcgcctcctttccaactcccttgctctggaggaattagagctagtatgttgtgacaagatcgtttgcctcaagataccttctgccctgcagcgtctcaacagccttaatatttttggatgctcggccctcaaagtgctagagagcaaagctccaaatctctctagtctttctcttttacattttggaggcaggctagtcttctcacgtgtgaaaacattgcaaatgaagaaactaatcactgaaagtaccgtctatgatgctcgtaccaggctgccatccactatgcccaatcttgaaactcttgtcataaactcatttgattgggtatgtatgtatgtgtgtgtgtgtgtgtgtgtgtgtatatatatatatatatatatatatatatatatatatatatatatatatatatatatatatatatatatatatactatttaaagatagatgtt

SEQ ID NO: 31011 - DNA, 1317 bp, Zea Mays
tgaacgacggcggcgcctagcggcgacatcgtccccctcgactcctcctccatccccgatgcggcgcgccagcctgcaggtgcccaattgtctaaatttctacaactcagatgagaccaaaactcctactccaatatctaatcagatttagtcccataagttgtctgagttattgtttggtccatcagtcgccttctatagcaccgaaagcaccccccgtattttgcggggggaaacggtgttctttcggggctacagcttattacctccatgggtaaaagaaagcggtcgttgtgtcaacaagataaccataatgattctctagccagcaaaataatgagaactagaatcccagatcttcctgaggacatttggtctcatgtacattccctaatgccaatgcgtgatgctggccgtgctgcttgcctatctcgtgcctttttacgttcctggagacgtcatcctaatcttatctttaataaggatacgattggcatgaaaaaaaattcatatggagagaatttccaccacaaaattagccgcattctcaggaatcactctggcattagtttgaaaacattcaagcttgactacagtggcatgtgtgggttcgatggaactatatcttgacagttggcttcaggctgctcttaatccagggattgaagaactcaccctctggttgttccatacaaggagaatatatgaattcccatgctcacttttatctgatggggttcgaaattcacttcggtaccttaaacttcgttgttgtgctctccgtcccacagttgaacttgcccccatgagaagcctaacaagtttacatttgtcctttgtgagcattaaatgggatgggttaaagcgcctcctttccaactcccttgctctggaggaattagagctagtatgttgtgacaagatcgtttgcctcaagataccttctgccctgcagcgtctcaacagccttaatatttttggatgctcggccctcaaagtgctagagagcaaagctccaaatctctctagtctttctcttttacattttggaggcaggctagtcttctcacgtgtgaaaacattgcaaatgaagaaactaatcactgaaagtaccgtctatgatgctcgtaccaggctgccatccactatgcccaatcttgaaactcttgtcataaactcatttgattgggtatgtatgtatgtgtgtgtgtgtgtgtgtgtgtgtatatatatatatatatatatatatatatatatatatatatatatatatatatatatatatatatatatatatactatttaaagatagatgtt

SEQ ID NO: 31012 - DNA, 583 bp, Zea Mays
gaacgacggcggcgcctagcggcgacatcgtccccctcgactcctcctccatccccgatgcggcgcgccagcctgcaggtacgtttccttcccagtctccacggctaaaccagggcaccagtccatctcgatcttctccccagtccccagtggcccagtcccgttcatctctacaggtgttggatacttggattggattcgagtgctctggaatatagttgttagttgtttgccttgttcaaagcctgaaatcttccagttttgtccatgtttgggcgtatggctgtttgccttgttcaaagcctgaagccatgtccatggacgtataggcgtatggctgttgcctgtttatccactgcagttcaaagtccgaagccatgtccaaaccctaatctccctcccatcttgatctcgcgtcgcattggcgatgtatcctgttcccggcttccggcggctcgacggcgatgagcggctccgtgcatcagtgatgccgcgtcacggtggccaagacgtgcgggccgtggctgcagcggcggtgcgccgctcgcatcggcgagccacactgcgcatccgcgattccaca

SEQ ID NO: 31013 - DNA, 647 bp, Zea Mays
ccaaagtctgtttcttccgttcgcctggagctaaatacagctgagcagccccacgtctcgtccataaaaaaaggaagccacagctctgcatggtagaagccacgtaccgcaaaacccagcccagaaacaaccacgtgagcgagagagaaaccacaggtggaggcttccatcctcacccatgggccatgctgccgctcggtgtcaaacggggctgggtgattcgccggaggccactgaagctgttcttggcagaggatggcggccgggaacgctcctatgcgatagcaaccgtgccccgcgacaactgcatgcgcgcggccgcaccagcacaatggatgtcacaaaggaccagtcggatgcgggacctctccgcggccgggactctcgtgattgcgcgggctctgaaactgcgtgtggtcacgaggatctgaagaatcaccctggtaactggaatctcaagtgccaggcaagttgtgcccttgattcacttttgttacccaataatgttctttgtaatcatttaccatgcataggtctaattttgatgggacccaataggtcaccctagattgtttatctcattaccttgtttacccctgaatcacatgggtagtttttgctattgctttacatgattttgggataat

SEQ ID NO: 31014 - DNA, 534 bp, Zea Mays
ataaaaaaaggaagccacagctctgcatggtagaagccacgtaccgcaaaacccagcccagaaacaaccacgtgagcgagagagaaaccacaggtggaggcttccatcctcacccatgggccatgctgccgctcggtgtcaaacggggctgggtgattcgccggaggccactgaagctgttcttggcagaggatggcggccgggaacgctcctatgcgatagcaaccgtgccccgcgacaactgcatgcgcgcggccgcaccagcacaatggatgtcacaaaggaccagtcggatgcgggacctctccgcggccgggactctcgtgattgcgcgggctctgaaactggagaagaacaggtgattcaggaggagccacgtatcgaggagtatgatctgatctaggtggcgtttctcagttgacattggcgccgacgatccttagttcattttatatttattcttttattttgtaataagtcttccgctatgtattaaatactctgattattgtgacatttatctctatgcactct

SEQ ID NO: 31015 - DNA, 1056 bp, Zea Mays
caaagccaaggcgcggcgcagccagagtaagcagagagttgcactaccgtgcttcttcagttcttcttcctagtatgcactcgcttgtgaggcgtggcaatggctacggctacggctatggtggttacggcagcagcaatccccatatgaactaccaccgccaaaacaccgagtccgtgaccaccgtcgtcacggagatgaaccgaatggccgtcgacgacaagccctgctacggcggcggcgtgcagaagcaggcctgcaaggtggaggcgttccaggagcacgacgaagcgtacaagggcgccgtggccgtgcagcagaagcactcctccttcaaggaggacaaggaggagagcggctaccagtacgaggaggcgtacgctggaactggcgcgggaggatacggcgctcactatggtggtggcgccgccgtcgctcagaagcaaggctacaggcagggcatatacgagagcgagagcgagagcgaaagcgagagcgagagcgacgagagcgactgcgaggaggcgttcctgccgcacggcggccggacgccgcagggcggcgtgcagcacagctacggctacgggggcggggcgtacaagcacggggctggcaacctcggcggcttgcgccgctaccagtcgtacgagagccgcgaggatctcggcggcggacgccgctacgagacctaccagagcaccgtccagtacaccggctccccgaccaagaaccgccacgtcctacgctacggcgcgtaggcatatatacgctctgatccagttgcattgcagcacgtgcacctacgtatattcctatgccgcgtcgtgtgactcgtgtcgtataggcaggcggcaccgctacttggtgggccttgtgtttgctggtgcagatcgaaaaatctgacaataagatgtacttaatgccaccttgatataataatgtatgaagacgaaactttgaaaactgttttacgcatgttggttgtctggggtcagtactcagtactgcagagtgcagtgagtgctcaaagcaaggcataatgcaacgtttgccggt

SEQ ID NO: 31016 - DNA, 1615 bp, Zea Mays
atgcactcgcttgtgaggcgtggcaatggctacggctacggctatggtggttacggcagcagcaatccccatatgaactaccaccgccaaaacaccgagtccgtgaccaccgtcgtcacggagatgaaccgaatggccgtcgacgacaagccctgctacggcggcggcgtgcagaagcaggcctgcaaggtggaggcgttccaggagcacgacgaattatacaaggaggaggaggaggagaagcgcgtcgtcgacacggagtacggtgcccgctacgggggtgtggccgccgtgaagaagccgggctacaactacaagcagcacgaggcatacggggagaccgaaggtgcagggtacggctacggcgccggcggcgtgaagaagcaagcaggctacagctacgcgcaggaggcgtgcggagagagctacggcggcgctcaccacggtggtgccggtgccgtcgcgcagacgtacgcctacgaccagcagcaggcctacaagcacaagaacgcggcaggggcgggggcggggtacggtgctccctacggtggtggcgccgtgcagcagcacgacggacacaaagatgtgtaccggcacggcgccgccgccggtggcaaagtaaagaagaacggctaccagtaccaagaggcgtacggcggaactgacgcaggagggtacggtgcgcactacggcggcggtggtggcgccgtgcagcagtacgggtacggcggcgccactaccgatggcaaagtgaagaagggcggccaccagtactacggcggaagtggtgcaggagggtacgactctcactacggcggcggcggcggtggcgccgtgcagcagtacggcggctaccataaagatgcgtacgggtacggcggcggcgccaccgccggtggaaaagcgaagaagagcggctaccagtacgaggaggcgtacgctggaactggcgcgggaggatacggcgctcactatggtggtggcgccgccgtcgctcagaagcaaggctacaggcagggcatatacgagagcgagagcgagagcgaaagcgagagcgagagcgacgagagcgactgcgaggaggcgttcctgccgcacggcggccggacgccgcagggcggcgtgcagcacagctacggctacgggggcggggcgtacaagcacggggctggcaacctcggcggcttgcgccgctaccagtcgtacgagagccgcgaggatctcggcggcggacgccgctacgagacctaccagagcaccgtccagtacaccggctccccgaccaagaaccgccacgtcctacgctacggcgcgtaggcatatatacgctctgatccagttgcattgcagcacgtgcacctacgtatattcctatgccgcgtcgtgtgactcgtgtcgtataggcaggcggcaccgctacttggtgggccttgtgtttgctggtgcagatcgaaaaatctgacaataagatgtacttaatgccaccttgatataataatgtatgaagacgaaactttgaaaactgttttacgcatgttggttgtctggggtcagtactcagtactgcagagtgcagtgagtgctcaaagcaaggcataatgcaacgtttgccggt

SEQ ID NO: 31017 - DNA, 1416 bp, Zea Mays
caaaacttgataaaaggttaaaactacctaattaaagatgatttggtcctttctcgcctctaatagcttcgcaaacatcagcacgtgtgagcctgctttgagttccttcttcaaaacttgcttgttgcgcttcctactgatgaggaccatgatgaggaccactgcacgagtcacctttcaactttttttatatgaactttctaccagctgaagagaatgttgctcctgcaaacttcattaaatggcctacgacacaagatcatccaatcgagaataatatgcaatgggacaataactagatcgtcctgggatgtttcgctgcagctagagacaacaaacttcggtcgagcatgttctatcaagtgctgcgcagtggggggacgaccgtggatgaaggagctggtttgtttcatctagagaagcagggcgccgccatatgggtgcaattctttggttggctggccctccgcgggtgcttacaatgtcgtgcgaatctcatcatcaagaatgtggtgcctgacatctgtgtggaaacttcagcgcacatcctgttccagtgtcagcgtggctgacctgtggaagccggagttggtgacgccgccgactgccgtggaggagccgagccaccggcgaggggcggaaaacacaggcccgcgacgaaccgtggagggaggcaggaagcaaggcgcagggccgcagggaggtgaggaggtcgccgactgcccggttcgctagttgctagatccatggagggcgcgcagcggccgtcgagcttgtcatagggagcactggtgactggccgtcgacctcaagtcgccgccagggcaaggttgaggctaggtcgatcagggttgcagccgccatacgcccaggcttcaagtggagaggaaggataaatggttgggctgaaaaaacctaagtataagtggatatttgggccacgactcgggccacggcccaggtggcccggaacccaaatctgcccctgctccagcgtggcatgtggacaatctttaattttttgagaagaaatgggaagaatcgagaggaactgggaaggtcccctcccttgtcctcgcgccgtgccatcctcgcgggcgacgtcctgctcgcgaccgccatgtctgcaaccattaggaggtgaccgtgcctgtccacagactggccgcgctaggcacggaccgtagccgcgacgcacacgtccacgaagccacggatcatgtcgcacaagtcatccacggtgtttgccgccgccacgccgctgtaggagccgctgtaggaggacacggtgaggaccgtggtggtcctgctcatgcctgatggatggctcatagttcttgcatcaaacatactcccgcatacactacagagcacatcgtaagtagctaacttggcatgataattaccatagagaac

SEQ ID NO: 31018 - DNA, 5619 bp, Zea Mays
ctctacgtcagccaacgacagcttgctctcgcccctgccttctcctctcctctgggtgttcccggcggtttcttcgccgctcaagccgcctccactctccctgccgcgctagcaactacgtttcggacttccccgctcgactttcgacctcccctgccgccaacaccgcccaaccgccgtcctccaccaccctcggccggcggcgccccgccttgccggaggcggagcagacgacgcgtggcagccgattccgcgatggatgcatccactgccggcgatggagacacgaatactttgaagaggccatgcaaaacatcgcctccagaaggcgaaacagacaagtataaacggcagaagagggaatgccaggatttctctcccagaaggtaccagcttgatgtctatgaggttgctacgaggcacaacacaattgcgatgcttgacacgggagctgggaagacaatgattgctgtcatgctcatcaagcattttgggaagatcaacaaagcaaacaatgatcgaaagctcatcatattccttgcaccaactgttcaactcgtcacacagcaatgcgaggttattaagagctacactgattttgaggtggagcattatcatggtgcaaagggtgttgatcaatggaaggctcatagctggcaacagcaactcttaaagtatcaggttatggtcatgacaccacaggtgttgctagacgctttacgccaagctttcttgatcttggacatggttagtctcatgatatttgatgaatgccatcacgcaactggtaaccacccatatactaggataatgaaggagttctatcatggatcagagcataagccaaatgtgttcggtatgacagcctctcctatcataagaaaaggggtctcctctgatttggattgcaaaaatcagctatctgagctggaaaatattttagattccaagatacactctgtggtggatagagaagagatagaactttgtgttccttctgcaaaagaagtgaatagatactatgagccaagaactgtttcttttgacgatttaagtgaagaactggaaattttgtgttccaagtatgatgggctgatcatacaattgcataacagatcgaccaatcagtacaaagatgctgatgaaataacaaaagaatcacggaaacgtctctcaaattctttagcaaagatttgctattgcctagaagatgctggtcttctttgtgctagtgaggctactaaaatctgcattgaaaggggccagagaaaaggttggctgaaggggggcagtgacaccactgatcagcaaagtggtcaaaatggacctatcctgtttgcagaaatttcaatgcttcatatggagttttttcaggaagtgttggatataatcggcaaacgcgtccaacagcaacaaggaattgatgcccttctgaactcagagcgtggatgtgtggaagcaaaaaatatgggctatatttcaccaaagctctatgagctcatgcaagtatttctctctttcagtgaccctgataacgttagatgccttgtttttgtggatcgaaagattagtgctagagtcattgagcggacgatgaagaaaataggccaactctcctgtttcagagtctcttttctaactggagggagttcttcagtggatgcactcacccctaaaatgcaaaaggatacactggattcgttccgctctggaaaggtcaacttactgtttactacagatgttgcagaagagggtatacatattccagactgctcgtgtgtaataagatttgatttgccgagaactacccgcagctatgtccaatcacgtggacgagcccgacagagggactctcagtacatactaatgattgaacagggaaatgtgaaacaagatgatttgatatctgggattatgagaagtaaggcctcgatgactgggattgcttcaaaccgagagcctgaggattcacaccccagtttcttacccactgaagaaataaatgaataccatataagcaaaacaggagccaaaataactactgattctagcatcagtgttctcaaccagtactgtgataagctcccgaaggacaagtactacaccccaaggcccaagtttcagttcactcattacggtgatggttatgagtgtactgtaacactaccatccagtgccatgtttcaacttttggtaggtcaaaaagcaagaaacatgcagaaagcaaagcagcttgtttgccttgatgcatgtaagaggctgcatcagctcggagcacttgatgaccatctttctccatcagttgaagagccgcctccggaaatttcaagcaagtctagtatctcgacacctggtgcaggtttaggtacaaccaaacggaaagaactgcatggtacaaccaaagttctttccatgtctggctcttggggttcagatagaagtgtgactaaacttcaaggctacaagttgaattttgtttgtgatcaagttggtcaaaaatactctgcctttgtccttttaattgatgctagtatagcaaaagaagctgctactttagatattgatctatatttgcatgacaagatggtaaaagcttcagtttccccttgtggacctcttgagttggatgcttggcagatggaacaaacaaaactatttcaagcacttctctttaatagtttgtttggaaaactgttcattggatcaaaagcatcaaaaaccccaagggagttcattctcaagaaagatgatgtgttcctttggaacaaagaaaatatgtatttgcttttacctgtggattctactctggattctcataaaagtgtttgcatcaactggagtgtaattgatgtagtggctacagctgttggattcatgagaagcatttattcagatggcaaatgtaacctaactgataaacttaattatgaaaaaaatggtgaagatcttattcatttggccaacaagtcatgcaagggtaatgatcttaaaaatatggtggttctagcaattcacactggaaagatctatactattgttgttgtatctgatttatgtgccaatagtaaatttgatggtacaactgacaagaaagaagcaaaattccggacatttgcagaatattttgagaagaagtatagtatatttctttgtcatcctttacaaccattgctagtgttgaaacccacccataatcctcacaatcttctttcctcaaagaatagagatgaagacaatgttgtggaaaataaaaatagggcgaacagccttgttcacatgcctccagagttgctgattccccttgatttacctattgatgttttgagagtattctacttgtttccatctctgatgcatcgtcttgagtcactaatgctagccagccaactaagaagtgaaattgcatacagagattctgatatatcaagcttcgtgattttggaagctatgacaacacttagatgctgtgaggacttctctatggagcgattagagttattgggggactctgttcttaagtatgcagtgagtgcccatcttttcatgacatttcttaataagcatgagggacagttatcgtccagaaggcaagaaacaatatgtaatgccacactttataggcttggtattgaacgcaggatacagggttacatacgtgatgctgcatttgatcctcgtcgatggcttgctcctggacagctgtccagacgtccttgtccttgtgaatgcccagtaaattctgaggttgtaactgaggatattcataggattgatgacaagtctataattataggcaaggcgtgtgacaagggacacagatggatatgttcgaaaaccatctctgattgtgttgaggctctaattggggcctattatgtcgaagggggattaaaagcagcttttgctgttctcaaatggttccagattgagactgaaatcgaggaagagttaattatggaagctctgtcgagtgcttcagtgcgaaactatcttccaaaagttgatgtagttgaattgcttgaagcaaaactaggctacacttttcaaatgaaaggtttgttaatagaggctctcacccactcatcacagcaagaatctggagcaacatactgctaccaacgcttggagttccttggtgatgcagtcttggatattttaataactcgccatctgttccttagtcataaagacacagatgagggggagctgacagatttacggtctgcatcagtaaataatgagaattttgcacaagttgcggtaaagcacaatctccatcagtttctacaacattcttcggggttcttacaagaccaaattactgaatatgtgaatagtcttgaaagttcgtccatggacagagccagccttttatccagtggaccatgtagggggccaaaagttttaggtgatattgtagaaagtatagcaggtgctattcttattgacagcaaacttgatttggatttagtttggcgggtttttaaacctcttctttcaccaattgtcacacctgagaatttggagttgccccgattcagagaacttaatgagtggtctgacaagaatgggtactttattggaattaagtgtgaaaatcgaggagacagcacaatggctatccttaacttacaactcaaggatttgcttcttgtgaggcaaggttgtgggaagaataaagtagatgcgaaagcacatgcagcttccttattgcttagggatctagaggaaaaaggacttataattccaaggaatgcaagcagagtggaacaacttgaaaagaattctggtactgtaaaacattgcaacaacgtgcttgatgttatggacacacaaaacgtagcaccacctaggcaaaaggaagtagctgtgttaagtaccaccactcctggctctgttcttgataagccattggttgtgaaggttaagttgagcaaaggaggacctcgtatatcattgtacgagtcgtgtaaaaagcttcagtggccaatgccgacctttgaattcgtgaaggtcgaaccaagcgtgtgctcctcttcctgtggttcgtcacaaaaggttgcgccccaaggattcgcatttgcttcgacaataacgttgcatataccgaacggcgatgtcatcagcctcacaggagatgggcgtgcggataagaagagctcacaggattctgctgcgttgctcatgctctatgagctgcagcggcaacgtagattccaagttcaagaagtatgaggaatcacctcgtggttccatcaccaaagatgcaatgttaccgccaccggcgattattgcttgggcatcttggagtaatgtcaccgccaaatcagtctttagtcgtcagccgcacgggggtgtaagaaaataatgtacttcattctgattctaaattataagacaccccgaattatgtaatctaattatcataatgtcctataatttgaaatggagcggtgttggttactctcgttcccgtctgatggattcagacatttcatctgtacacattaggttctggtgcatgttaaaagagcctggaagggcactgcttacgtccgccgtggtcgtgatgtgtgtacacgtgcagtaataagattttaacaggaaattgctatcttg

SEQ ID NO: 31019 - DNA, 5534 bp, Zea Mays
cgacagcttgctctcgcccctgccttctcctctcctctgggtgttcccggcggtttcttcgccgctcaagccgcctccactctccctgccgcgctagcaactacgtttcggacttccccgctcgactttcgacctcccctgccgccaacaccgcccaaccgccgtcctccaccaccctcggccggcggcgccccgccttgccggaggcggagcagacgacgcgtggcagccgattccgcgatggatgcatccactgccggcgatggagacacgaatactttgaagaggccatgcaaaacatcgcctccagaaggcgaaacagacaagtataaacggcagaagagggaatgccaggatttctctcccagaaggtaccagcttgatgtctatgaggttgctacgaggcacaacacaattgcgatgcttgacacgggagctgggaagacaatgattgctgtcatgctcatcaagcattttgggaagatcaacaaagcaaacaatgatcgaaagctcatcatattccttgcaccaactgttcaactcgtcacacagcaatgcgaggttattaagagctacactgattttgaggtggagcattatcatggtgcaaagggtgttgatcaatggaaggctcatagctggcaacagcaactcttaaagtatcaggttatggtcatgacaccacaggtgttgctagacgctttacgccaagctttcttgatcttggacatggttagtctcatgatatttgatgaatgccatcacgcaactggtaaccacccatatactaggataatgaaggagttctatcatggatcagagcataagccaaatgtgttcggtatgacagcctctcctatcataagaaaaggggtctcctctgatttggattgcaaaaatcagctatctgagctggaaaatattttagattccaagatacactctgtggtggatagagaagagatagaactttgtgttccttctgcaaaagaagtgaatagatactatgagccaagaactgtttcttttgacgatttaagtgaagaactggaaattttgtgttccaagtatgatgggctgatcatacaattgcataacagatcgaccaatcagtacaaagatgctgatgaaataacaaaagaatcacggaaacgtctctcaaattctttagcaaagatttgctattgcctagaagatgctggtcttctttgtgctagtgaggctactaaaatctgcattgaaaggggccagagaaaaggttggctgaaggggggcagtgacaccactgatcagcaaagtggtcaaaatggacctatcctgtttgcagaaatttcaatgcttcatatggagttttttcaggaagtgttggatataatcggcaaacgcgtccaacagcaacaaggaattgatgcccttctgaactcagagcgtggatgtgtggaagcaaaaaatatgggctatatttcaccaaagctctatgagctcatgcaagtatttctctctttcagtgaccctgataacgttagatgccttgtttttgtggatcgaaagattagtgctagagtcattgagcggacgatgaagaaaataggccaactctcctgtttcagagtctcttttctaactggagggagttcttcagtggatgcactcacccctaaaatgcaaaaggatacactggattcgttccgctctggaaaggtcaacttactgtttactacagatgttgcagaagagggtatacatattccagactgctcgtgtgtaataagatttgatttgccgagaactacccgcagctatgtccaatcacgtggacgagcccgacagagggactctcagtacatactaatgattgaacagggaaatgtgaaacaagatgatttgatatctgggattatgagaagtaaggcctcgatgactgggattgcttcaaaccgagagcctgaggattcacaccccagtttcttacccactgaagaaataaatgaataccatataagcaaaacaggagccaaaataactactgattctagcatcagtgttctcaaccagtactgtgataagctcccgaaggacaagtactacaccccaaggcccaagtttcagttcactcattacggtgatggttatgagtgtactgtaacactaccatccagtgccatgtttcaacttttggtaggtcaaaaagcaagaaacatgcagaaagcaaagcagcttgtttgccttgatgcatgtaagaggctgcatcagctcggagcacttgatgaccatctttctccatcagttgaagagccgcctccggaaatttcaagcaagtctagtatctcgacacctggtgcaggtttaggtacaaccaaacggaaagaactgcatggtacaaccaaagttctttccatgtctggctcttggggttcagatagaagtgtgactaaacttcaaggctacaagttgaattttgtttgtgatcaagttggtcaaaaatactctgcctttgtccttttaattgatgctagtatagcaaaagaagctgctactttagatattgatctatatttgcatgacaagatggtaaaagcttcagtttccccttgtggacctcttgagttggatgcttggcagatggaacaaacaaaactatttcaagcacttctctttaatagtttgtttggaaaactgttcattggatcaaaagcatcaaaaaccccaagggagttcattctcaagaaagatgatgtgttcctttggaacaaagaaaatatgtatttgcttttacctgtggattctactctggattctcataaaagtgtttgcatcaactggagtgtaattgatgtagtggctacagctgttggattcatgagaagcatttattcagatggcaaatgtaacctaactgataaacttaattatgaaaaaaatggtgaagatcttattcatttggccaacaagtcatgcaagggtaatgatcttaaaaatatggtggttctagcaattcacactggaaagatctatactattgttgttgtatctgatttatgtgccaatagtaaatttgatggtacaactgacaagaaagaagcaaaattccggacatttgcagaatattttgagaagaagtatagtatatttctttgtcatcctttacaaccattgctagtgttgaaacccacccataatcctcacaatcttctttcctcaaagaatagagatgaagacaatgttgtggaaaataaaaatagggcgaacagccttgttcacatgcctccagagttgctgattccccttgatttacctattgatgttttgagagtattctacttgtttccatctctgatgcatcgtcttgagtcactaatgctagccagccaactaagaagtgaaattgcatacagagattctgatatatcaagcttcgtgattttggaagctatgacaacacttagatgctgtgaggacttctctatggagcgattagagttattgggggactctgttcttaagtatgcagtgagtgcccatcttttcatgacatttcttaataagcatgagggacagttatcgtccagaaggcaagaaacaatatgtaatgccacactttataggcttggtattgaacgcaggatacagggttacatacgtgatgctgcatttgatcctcgtcgatggcttgctcctggacagctgtccagacgtccttgtccttgtgaatgcccagtaaattctgaggttgtaactgaggatattcataggattgatgacaagtctataattataggcaaggcgtgtgacaagggacacagatggatatgttcgaaaaccatctctgattgtgttgaggctctaattggggcctattatgtcgaagggggattaaaagcagcttttgctgttctcaaatggttccagattgagactgaaatcgaggaagagttaattatggaagctctgtcgagtgcttcagtgcgaaactatcttccaaaagttgatgtagttgaattgcttgaagcaaaactaggctacacttttcaaatgaaaggtttgttaatagaggctctcacccactcatcacagcaagaatctggagcaacatactgctaccaacgcttggagttccttggtgatgcagtcttggatattttaataactcgccatctgttccttagtcataaagacacagatgagggggagctgacagatttacggtctgcatcagtaaataatgagaattttgcacaagttgcggtaaagcacaatctccatcagtttctacaacattcttcggggttcttacaagaccaaattactgaatatgtgaatagtcttgaaagttcgtccatggacagagccagccttttatccagtggaccatgtagggggccaaaatttggcgggtttttaaacctcttctttcaccaattgtcacacctgagaatttggagttgccccgattcagagaacttaatgagtggtctgacaagaatgggtactttattggaattaagtgtgaaaatcgaggagacagcacaatggctatccttaacttacaactcaaggatttgcttcttgtgaggcaaggttgtgggaagaataaagtagatgcgaaagcacatgcagcttccttattgcttagggatctagaggaaaaaggacttataattccaaggaatgcaagcagagtggaacaacttgaaaagaattctggtactgtaaaacattgcaacaacgtgcttgatgttatggacacacaaaacgtagcaccacctaggcaaaaggaagtagctgtgttaagtaccaccactcctggctctgttcttgataagccattggttgtgaaggttaagttgagcaaaggaggacctcgtatatcattgtacgagtcgtgtaaaaagcttcagtggccaatgccgacctttgaattcgtgaaggtcgaaccaagcgtgtgctcctcttcctgtggttcgtcacaaaaggttgcgccccaaggattcgcatttgcttcgacaataacgttgcatataccgaacggcgatgtcatcagcctcacaggagatgggcgtgcggataagaagagctcacaggattctgctgcgttgctcatgctctatgagctgcagcggcaacgtagattccaagttcaagaagtatgaggaatcacctcgtggttccatcaccaaagatgcaatgttaccgccaccggcgattattgcttgggcatcttggagtaatgtcaccgccaaatcagtctttagtcgtcagccgcacgggggtgtaagaaaataatgtacttcattctgattctaaattataagacaccccgaattatgtaatctaattatcataatgtcctataatttgaaatggagcggtgttggttactctcgttcccgtctgatggattcagacatttcatctgtacacattaggttctggtgcatgttaaaagagcctggaagggcactgcttacgtccgccgtggtcgtgatgtgtgtacacgtgcagtaataagattttaacaggaaattgctatcttg

SEQ ID NO: 31020 - DNA, 5582 bp, Zea Mays
cgacagcttgctctcgcccctgccttctcctctcctctgggtgttcccggcggtttcttcgccgctcaagccgcctccactctccctgccgcgctagcaactacgtttcggacttccccgctcgactttcgacctcccctgccgccaacaccgcccaaccgccgtcctccaccaccctcggccggcggcgccccgccttgccggaggcggagcagacgacgcgtggcagccgattccgcgatggatgcatccactgccggcgatggagacacgaatactttgaagaggccatgcaaaacatcgcctccagaaggcgaaacagacaagtataaacggcagaagagggaatgccaggatttctctcccagaaggtaccagcttgatgtctatgaggttgctacgaggcacaacacaattgcgatgcttgacacgggagctgggaagacaatgattgctgtcatgctcatcaagcattttgggaagatcaacaaagcaaacaatgatcgaaagctcatcatattccttgcaccaactgttcaactcgtcacacagcaatgcgaggttattaagagctacactgattttgaggtggagcattatcatggtgcaaagggtgttgatcaatggaaggctcatagctggcaacagcaactcttaaagtatcaggttatggtcatgacaccacaggtgttgctagacgctttacgccaagctttcttgatcttggacatggttagtctcatgatatttgatgaatgccatcacgcaactggtaaccacccatatactaggataatgaaggagttctatcatggatcagagcataagccaaatgtgttcggtatgacagcctctcctatcataagaaaaggggtctcctctgatttggattgcaaaaatcagctatctgagctggaaaatattttagattccaagatacactctgtggtggatagagaagagatagaactttgtgttccttctgcaaaagaagtgaatagatactatgagccaagaactgtttcttttgacgatttaagtgaagaactggaaattttgtgttccaagtatgatgggctgatcatacaattgcataacagatcgaccaatcagtacaaagatgctgatgaaataacaaaagaatcacggaaacgtctctcaaattctttagcaaagatttgctattgcctagaagatgctggtcttctttgtgctagtgaggctactaaaatctgcattgaaaggggccagagaaaaggttggctgaaggggggcagtgacaccactgatcagcaaagtggtcaaaatggacctatcctgtttgcagaaatttcaatgcttcatatggagttttttcaggaagtgttggatataatcggcaaacgcgtccaacagcaacaaggaattgatgcccttctgaactcagagcgtggatgtgtggaagcaaaaaatatgggctatatttcaccaaagctctatgagctcatgcaagtatttctctctttcagtgaccctgataacgttagatgccttgtttttgtggatcgaaagattagtgctagagtcattgagcggacgatgaagaaaataggccaactctcctgtttcagagtctcttttctaactggagggagttcttcagtggatgcactcacccctaaaatgcaaaaggatacactggattcgttccgctctggaaagatgttgcagaagagggtatacatattccagactgctcgtgtgtaataagatttgatttgccgagaactacccgcagctatgtccaatcacgtggacgagcccgacagagggactctcagtacatactaatgattgaacagggaaatgtgaaacaagatgatttgatatctgggattatgagaagtaaggcctcgatgactgggattgcttcaaaccgagagcctgaggattcacaccccagtttcttacccactgaagaaataaatgaataccatataagcaaaacaggagccaaaataactactgattctagcatcagtgttctcaaccagtactgtgataagctcccgaaggacaagtactacaccccaaggcccaagtttcagttcactcattacggtgatggttatgagtgtactgtaacactaccatccagtgccatgtttcaacttttggtaggtcaaaaagcaagaaacatgcagaaagcaaagcagcttgtttgccttgatgcatgtaagaggctgcatcagctcggagcacttgatgaccatctttctccatcagttgaagagccgcctccggaaatttcaagcaagtctagtatctcgacacctggtgcaggtttaggtacaaccaaacggaaagaactgcatggtacaaccaaagttctttccatgtctggctcttggggttcagatagaagtgtgactaaacttcaaggctacaagttgaattttgtttgtgatcaagttggtcaaaaatactctgcctttgtccttttaattgatgctagtatagcaaaagaagctgctactttagatattgatctatatttgcatgacaagatggtaaaagcttcagtttccccttgtggacctcttgagttggatgcttggcagatggaacaaacaaaactatttcaagcacttctctttaatagtttgtttggaaaactgttcattggatcaaaagcatcaaaaaccccaagggagttcattctcaagaaagatgatgtgttcctttggaacaaagaaaatatgtatttgcttttacctgtggattctactctggattctcataaaagtgtttgcatcaactggagtgtaattgatgtagtggctacagctgttggattcatgagaagcatttattcagatggcaaatgtaacctaactgataaacttaattatgaaaaaaatggtgaagatcttattcatttggccaacaagtcatgcaagggtaatgatcttaaaaatatggtggttctagcaattcacactggaaagatctatactattgttgttgtatctgatttatgtgccaatagtaaatttgatggtacaactgacaagaaagaagcaaaattccggacatttgcagaatattttgagaagaagtatagtatatttctttgtcatcctttacaaccattgctagtgttgaaacccacccataatcctcacaatcttctttcctcaaagaatagagatgaagacaatgttgtggaaaataaaaatagggcgaacagccttgttcacatgcctccagagttgctgattccccttgatttacctattgatgttttgagagtattctacttgtttccatctctgatgcatcgtcttgagtcactaatgctagccagccaactaagaagtgaaattgcatacagagattctgatatatcaagcttcgtgattttggaagctatgacaacacttagatgctgtgaggacttctctatggagcgattagagttattgggggactctgttcttaagtatgcagtgagtgcccatcttttcatgacatttcttaataagcatgagggacagttatcgtccagaaggcaagaaacaatatgtaatgccacactttataggcttggtattgaacgcaggatacagggttacatacgtgatgctgcatttgatcctcgtcgatggcttgctcctggacagctgtccagacgtccttgtccttgtgaatgcccagtaaattctgaggttgtaactgaggatattcataggattgatgacaagtctataattataggcaaggcgtgtgacaagggacacagatggatatgttcgaaaaccatctctgattgtgttgaggctctaattggggcctattatgtcgaagggggattaaaagcagcttttgctgttctcaaatggttccagattgagactgaaatcgaggaagagttaattatggaagctctgtcgagtgcttcagtgcgaaactatcttccaaaagttgatgtagttgaattgcttgaagcaaaactaggctacacttttcaaatgaaaggtttgttaatagaggctctcacccactcatcacagcaagaatctggagcaacatactgctaccaacgcttggagttccttggtgatgcagtcttggatattttaataactcgccatctgttccttagtcataaagacacagatgagggggagctgacagatttacggtctgcatcagtaaataatgagaattttgcacaagttgcggtaaagcacaatctccatcagtttctacaacattcttcggggttcttacaagaccaaattactgaatatgtgaatagtcttgaaagttcgtccatggacagagccagccttttatccagtggaccatgtagggggccaaaagttttaggtgatattgtagaaagtatagcaggtgctattcttattgacagcaaacttgatttggatttagtttggcgggtttttaaacctcttctttcaccaattgtcacacctgagaatttggagttgccccgattcagagaacttaatgagtggtctgacaagaatgggtactttattggaattaagtgtgaaaatcgaggagacagcacaatggctatccttaacttacaactcaaggatttgcttcttgtgaggcaaggttgtgggaagaataaagtagatgcgaaagcacatgcagcttccttattgcttagggatctagaggaaaaaggacttataattccaaggaatgcaagcagagtggaacaacttgaaaagaattctggtactgtaaaacattgcaacaacgtgcttgatgttatggacacacaaaacgtagcaccacctaggcaaaaggaagtagctgtgttaagtaccaccactcctggctctgttcttgataagccattggttgtgaaggttaagttgagcaaaggaggacctcgtatatcattgtacgagtcgtgtaaaaagcttcagtggccaatgccgacctttgaattcgtgaaggtcgaaccaagcgtgtgctcctcttcctgtggttcgtcacaaaaggttgcgccccaaggattcgcatttgcttcgacaataacgttgcatataccgaacggcgatgtcatcagcctcacaggagatgggcgtgcggataagaagagctcacaggattctgctgcgttgctcatgctctatgagctgcagcggcaacgtagattccaagttcaagaagtatgaggaatcacctcgtggttccatcaccaaagatgcaatgttaccgccaccggcgattattgcttgggcatcttggagtaatgtcaccgccaaatcagtctttagtcgtcagccgcacgggggtgtaagaaaataatgtacttcattctgattctaaattataagacaccccgaattatgtaatctaattatcataatgtcctataatttgaaatggagcggtgttggttactctcgttcccgtctgatggattcagacatttcatctgtacacattaggttctggtgcatgttaaaagagcctggaagggcactgcttacgtccgccgtggtcgtgatgtgtgtacacgtgcagtaataagattttaacaggaaattgctatcttg

SEQ ID NO: 31021 - DNA, 5487 bp, Zea Mays
cgacagcttgctctcgcccctgccttctcctctcctctgggtgttcccggcggtttcttcgccgctcaagccgcctccactctccctgccgcgctagcaactacgtttcggacttccccgctcgactttcgacctcccctgccgccaacaccgcccaaccgccgtcctccaccaccctcggccggcggcgccccgccttgccggaggcggagcagacgacgcgtggcagccgattccgcgatggatgcatccactgccggcgatggagacacgaatactttgaagaggccatgcaaaacatcgcctccagaaggcgaaacagacaagtataaacggcagaagagggaatgccaggatttctctcccagaaggtaccagcttgatgtctatgaggttgctacgaggcacaacacaattgcgatgcttgacacgggagctgggaagacaatgattgctgtcatgctcatcaagcattttgggaagatcaacaaagcaaacaatgatcgaaagctcatcatattccttgcaccaactgttcaactcgtcacacagcaatgcgaggttattaagagctacactgattttgaggtggagcattatcatggtgcaaagggtgttgatcaatggaaggctcatagctggcaacagcaactcttaaagtatcaggttatggtcatgacaccacaggtgttgctagacgctttacgccaagctttcttgatcttggacatggttagtctcatgatatttgatgaatgccatcacgcaactggtaaccacccatatactaggataatgaaggagttctatcatggatcagagcataagccaaatgtgttcggtatgacagcctctcctatcataagaaaaggggtctcctctgatttggattgcaaaaatcagctatctgagctggaaaatattttagattccaagatacactctgtggtggatagagaagagatagaactttgtgttccttctgcaaaagaagtgaatagatactatgagccaagaactgtttcttttgacgatttaagtgaagaactggaaattttgtgttccaagtatgatgggctgatcatacaattgcataacagatcgaccaatcagtacaaagatgctgatgaaataacaaaagaatcacggaaacgtctctcaaattctttagcaaagatttgctattgcctagaagatgctggtcttctttgtgctagtgaggctactaaaatctgcattgaaaggggccagagaaaaggttggctgaaggggggcagtgacaccactgatcagcaaagtggtcaaaatggacctatcctgtttgcagaaatttcaatgcttcatatggagttttttcaggaagtgttggatataatcggcaaacgcgtccaacagcaacaaggaattgatgcccttctgaactcagagcgtggatgtgtggaagcaaaaaatatgggctatatttcaccaaagctctatgagctcatgcaagtatttctctctttcagtgaccctgataacgttagatgccttgtttttgtggatcgaaagattagtgctagagtcattgagcggacgatgaagaaaataggccaactctcctgtttcagagtctcttttctaactggagggagttcttcagtggatgcactcacccctaaaatgcaaaaggatacactggattcgttccgctctggaaaggtcaacttactgtttactacagatgttgcagaagagggtatacatattccagactgctcgtgtgtaataagatttgatttgccgagaactacccgcagctatgtccaatcacgtggacgagcccgacagagggactctcagtacatactaatgattgaacagggaaatgtgaaacaagatgatttgatatctgggattatgagaagtaaggcctcgatgactgggattgcttcaaaccgagagcctgaggattcacaccccagtttcttacccactgaagaaataaatgaataccatataagcaaaacaggagccaaaataactactgattctagcatcagtgttctcaaccagtactgtgataagctcccgaaggacaagtactacaccccaaggcccaagtttcagttcactcattacggtgatggttatgagtgtactgtaacactaccatccagtgccatgtttcaacttttggtaggtcaaaaagcaagaaacatgcagaaagcaaagcagcttgtttgccttgatgcatgtaagaggctgcatcagctcggagcacttgatgaccatctttctccatcagttgaagagccgcctccggaaatttcaagcaagtctagtatctcgacacctggtgcaggtttaggtacaaccaaacggaaagaactgcatggtacaaccaaagttctttccatgtctggctcttggggttcagatagaagtgtgactaaacttcaaggctacaagttgaattttgtttgtgatcaagttggtcaaaaatactctgcctttgtccttttaattgatgctagtatagcaaaagaagctgctactttagatattgatctatatttgcatgacaagatggtaaaagcttcagtttccccttgtggacctcttgagttggatgcttggcagatggaacaaacaaaactatttcaagcacttctctttaatagtttgtttggaaaactgttcattggatcaaaagcatcaaaaaccccaagggagttcattctcaagaaagatgatgtgttcctttggaacaaagaaaatatgtatttgcttttacctgtggattctactctggattctcataaaagtgtttgcatcaactggagtgtaattgatgtagtggctacagctgttggattcatgagaagcatttattcagatggcaaatgtaacctaactgataaacttaattatgaaaaaaatggtgaagatcttattcatttggccaacaagtcatgcaagggtaatgatcttaaaaatatggtggttctagcaattcacactggaaagatctatactattgttgttgtatctgatttatgtgccaatagtaaatttgatggtacaactgacaagaaagaagcaaaattccggacatttgcagaatattttgagaagaagtatagtatatttctttgtcatcctttacaaccattgctagtgttgaaacccacccataatcctcacaatcttctttcctcaaagaatagagatgaagacaatgttgtggaaaataaaaatagggcgaacagccttgttcacatgcctccagagttgctgattccccttgatttacctattgatgttttgagagtattctacttgtttccatctctgatgcatcgtcttgagtcactaatgctagccagccaactaagaagtgaaattgcatacagagattctgatatatcaagcttcgtgattttggaagctatgacaacacttagatgctgtgaggacttctctatggagcgattagagttattgggggactctgttcttaagtatgcagtgagtgcccatcttttcatgacatttcttaataagcatgagggacagttatcgtccagaaggcaagaaacaatatgtaatgccacactttataggcttggtattgaacgcaggatacagggttacatacgtgatgctgcatttgatcctcgtcgatggcttgctcctggacagctgtccagacgtccttgtccttgtgaatgcccagtaaattctgaggttgtaactgaggatattcataggattgatgacaagtctataattataggcaaggcgtgtgacaagggacacagatggatatgttcgaaaaccatctctgattgtgttgaggctctaattggggcctattatgtcgaagggggattaaaagcagcttttgctgttctcaaatggttccagattgagactgaaatcgaggaagagttaattatggaagctctgtcgagtgcttcagtgcgaaactatcttccaaaagttgatgtagttgaattgcttgaagcaaaactaggctacacttttcaaatgaaaggtttgttaatagaggctctcacccactcatcacagcaagaatctggagcaacatactgctaccaacgcttggagttccttggtgatgcagtcttggatattttaataactcgccatctgttccttagtcataaagacacagatgagggggagctgacagatttacggtctgcatcagtaaataatgagaattttgcacaagttgcggtaaagcacaatctccatcagtttctacaacattcttcggggttcttacaagaccaaattactgaatatgtgaatagtcttgaaagttcgtccatggacagagccagccttttatccagtggaccatgtagggggccaaaaaatttggagttgccccgattcagagaacttaatgagtggtctgacaagaatgggtactttattggaattaagtgtgaaaatcgaggagacagcacaatggctatccttaacttacaactcaaggatttgcttcttgtgaggcaaggttgtgggaagaataaagtagatgcgaaagcacatgcagcttccttattgcttagggatctagaggaaaaaggacttataattccaaggaatgcaagcagagtggaacaacttgaaaagaattctggtactgtaaaacattgcaacaacgtgcttgatgttatggacacacaaaacgtagcaccacctaggcaaaaggaagtagctgtgttaagtaccaccactcctggctctgttcttgataagccattggttgtgaaggttaagttgagcaaaggaggacctcgtatatcattgtacgagtcgtgtaaaaagcttcagtggccaatgccgacctttgaattcgtgaaggtcgaaccaagcgtgtgctcctcttcctgtggttcgtcacaaaaggttgcgccccaaggattcgcatttgcttcgacaataacgttgcatataccgaacggcgatgtcatcagcctcacaggagatgggcgtgcggataagaagagctcacaggattctgctgcgttgctcatgctctatgagctgcagcggcaacgtagattccaagttcaagaagtatgaggaatcacctcgtggttccatcaccaaagatgcaatgttaccgccaccggcgattattgcttgggcatcttggagtaatgtcaccgccaaatcagtctttagtcgtcagccgcacgggggtgtaagaaaataatgtacttcattctgattctaaattataagacaccccgaattatgtaatctaattatcataatgtcctataatttgaaatggagcggtgttggttactctcgttcccgtctgatggattcagacatttcatctgtacacattaggttctggtgcatgttaaaagagcctggaagggcactgcttacgtccgccgtggtcgtgatgtgtgtacacgtgcagtaataagattttaacaggaaattgctatcttg

SEQ ID NO: 31022 - DNA, 5566 bp, Zea Mays
acagcttgctctcgcccctgccttctcctctcctctgggtgttcccggcggtttcttcgccgctcaagccgcctccactctccctgccgcgctagcaactacgtttcggacttccccgctcgactttcgacctcccctgccgccaacaccgcccaaccgccgtcctccaccaccctcggccggcggcgccccgccttgccggaggcggagcagacgacgcgtggcagccgattccgcgatggatgcatccactgccggcgatggagacacgaatactttgaagaggccatgcaaaacatcgcctccagaaggcgaaacagacaagtataaacggcagaagagggaatgccaggatttctctcccagaaggtaccagcttgatgtctatgaggttgctacgaggcacaacacaattgcgatgcttgacacgggagctgggaagacaatgattgctgtcatgctcatcaagcattttgggaagatcaacaaagcaaacaatgatcgaaagctcatcatattccttgcaccaactgttcaactcgtcacacagcaatgcgaggttattaagagctacactgattttgaggtggagcattatcatggtgcaaagggtgttgatcaatggaaggctcatagctggcaacagcaactcttaaagtatcaggttatggtcatgacaccacaggtgttgctagacgctttacgccaagctttcttgatcttggacatggttagtctcatgatatttgatgaatgccatcacgcaactggtaaccacccatatactaggataatgaaggagttctatcatggatcagagcataagccaaatgtgttcggtatgacagcctctcctatcataagaaaaggggtctcctctgatttggattgcaaaaatcagctatctgagctggaaaatattttagattccaagatacactctgtggtggatagagaagagatagaactttgtgttccttctgcaaaagaagtgaatagatactatgagccaagaactgtttcttttgacgatttaagtgaagaactggaaattttgtgttccaagtatgatgggctgatcatacaattgcataacagatcgaccaatcagtacaaagatgctgatgaaataacaaaagaatcacggaaacgtctctcaaattctttagcaaagatttgctattgcctagaagatgctggtcttctttgtgctagtgaggctactaaaatctgcattgaaaggggccagagaaaaggttggctgaaggggggcagtgacaccactgatcagcaaagtggtcaaaatggacctatcctgtttgcagaaatttcaatgcttcatatggagttttttcaggaagtgttggatataatcggcaaacgcgtccaacagcaacaaggaattgatgcccttctgaactcagagcgtggatgtgtggaagcaaaaaatatgggctatatttcaccaaagctctatgagctcatgcaagtatttctctctttcagtgaccctgataacgttagatgccttgtttttgtggatcgaaagattagtgctagagtcattgagcggacgatgaagaaaataggccaactctcctgtttcagagtctcttttctaactggagggagttcttcagtggatgcactcacccctaaaatgcaaaaggatacactggattcgttccgctctggaaaggtcaacttactgtttactacagatgttgcagaagagggtatacatattccagactgctcgtgtgtaataagatttgatttgccgagaactacccgcagctatgtccaatcacgtggacgagcccgacagagggactctcagtacatactaatgattgaacagggaaatgtgaaacaagatgatttgatatctgggattatgagaagtaaggcctcgatgactgggattgcttcaaaccgagagcctgaggattcacaccccagtttcttacccactgaagaaataaatgaataccatataagcaaaacaggagccaaaataactactgattctagcatcagtgttctcaaccagtactgtgataagctcccgaaggacaagtactacaccccaaggcccaagtttcagttcactcattacggtgatggttatgagtgtactgtaacactaccatccagtgccatgtttcaacttttggtaggtcaaaaagcaagaaacatgcagaaagcaaagcagcttgtttgccttgatgcatgtaagaggctgcatcagctcggagcacttgatgaccatctttctccatcagttgaagagccgcctccggaaatttcaagtacaaccaaacggaaagaactgcatggtacaaccaaagttctttccatgtctggctcttggggttcagatagaagtgtgactaaacttcaaggctacaagttgaattttgtttgtgatcaagttggtcaaaaatactctgcctttgtccttttaattgatgctagtatagcaaaagaagctgctactttagatattgatctatatttgcatgacaagatggtaaaagcttcagtttccccttgtggacctcttgagttggatgcttggcagatggaacaaacaaaactatttcaagcacttctctttaatagtttgtttggaaaactgttcattggatcaaaagcatcaaaaaccccaagggagttcattctcaagaaagatgatgtgttcctttggaacaaagaaaatatgtatttgcttttacctgtggattctactctggattctcataaaagtgtttgcatcaactggagtgtaattgatgtagtggctacagctgttggattcatgagaagcatttattcagatggcaaatgtaacctaactgataaacttaattatgaaaaaaatggtgaagatcttattcatttggccaacaagtcatgcaagggtaatgatcttaaaaatatggtggttctagcaattcacactggaaagatctatactattgttgttgtatctgatttatgtgccaatagtaaatttgatggtacaactgacaagaaagaagcaaaattccggacatttgcagaatattttgagaagaagtatagtatatttctttgtcatcctttacaaccattgctagtgttgaaacccacccataatcctcacaatcttctttcctcaaagaatagagatgaagacaatgttgtggaaaataaaaatagggcgaacagccttgttcacatgcctccagagttgctgattccccttgatttacctattgatgttttgagagtattctacttgtttccatctctgatgcatcgtcttgagtcactaatgctagccagccaactaagaagtgaaattgcatacagagattctgatatatcaagcttcgtgattttggaagctatgacaacacttagatgctgtgaggacttctctatggagcgattagagttattgggggactctgttcttaagtatgcagtgagtgcccatcttttcatgacatttcttaataagcatgagggacagttatcgtccagaaggcaagaaacaatatgtaatgccacactttataggcttggtattgaacgcaggatacagggttacatacgtgatgctgcatttgatcctcgtcgatggcttgctcctggacagctgtccagacgtccttgtccttgtgaatgcccagtaaattctgaggttgtaactgaggatattcataggattgatgacaagtctataattataggcaaggcgtgtgacaagggacacagatggatatgttcgaaaaccatctctgattgtgttgaggctctaattggggcctattatgtcgaagggggattaaaagcagcttttgctgttctcaaatggttccagattgagactgaaatcgaggaagagttaattatggaagctctgtcgagtgcttcagtgcgaaactatcttccaaaagttgatgtagttgaattgcttgaagcaaaactaggctacacttttcaaatgaaaggtttgttaatagaggctctcacccactcatcacagcaagaatctggagcaacatactgctaccaacgcttggagttccttggtgatgcagtcttggatattttaataactcgccatctgttccttagtcataaagacacagatgagggggagctgacagatttacggtctgcatcagtaaataatgagaattttgcacaagttgcggtaaagcacaatctccatcagtttctacaacattcttcggggttcttacaagaccaaattactgaatatgtgaatagtcttgaaagttcgtccatggacagagccagccttttatccagtggaccatgtagggggccaaaagttttaggtgatattgtagaaagtatagcaggtgctattcttattgacagcaaacttgatttggatttagtttggcgggtttttaaacctcttctttcaccaattgtcacacctgagaatttggagttgccccgattcagagaacttaatgagtggtctgacaagaatgggtactttattggaattaagtgtgaaaatcgaggagacagcacaatggctatccttaacttacaactcaaggatttgcttcttgtgaggcaaggttgtgggaagaataaagtagatgcgaaagcacatgcagcttccttattgcttagggatctagaggaaaaaggacttataattccaaggaatgcaagcagagtggaacaacttgaaaagaattctggtactgtaaaacattgcaacaacgtgcttgatgttatggacacacaaaacgtagcaccacctaggcaaaaggaagtagctgtgttaagtaccaccactcctggctctgttcttgataagccattggttgtgaaggttaagttgagcaaaggaggacctcgtatatcattgtacgagtcgtgtaaaaagcttcagtggccaatgccgacctttgaattcgtgaaggtcgaaccaagcgtgtgctcctcttcctgtggttcgtcacaaaaggttgcgccccaaggattcgcatttgcttcgacaataacgttgcatataccgaacggcgatgtcatcagcctcacaggagatgggcgtgcggataagaagagctcacaggattctgctgcgttgctcatgctctatgagctgcagcggcaacgtagattccaagttcaagaagtatgaggaatcacctcgtggttccatcaccaaagatgcaatgttaccgccaccggcgattattgcttgggcatcttggagtaatgtcaccgccaaatcagtctttagtcgtcagccgcacgggggtgtaagaaaataatgtacttcattctgattctaaattataagacaccccgaattatgtaatctaattatcataatgtcctataatttgaaatggagcggtgttggttactctcgttcccgtctgatggattcagacatttcatctgtacacattaggttctggtgcatgttaaaagagcctggaagggcactgcttacgtccgccgtggtcgtgatgtgtgtacacgtgcagtaataagattttaacaggaaattgctatcttg

SEQ ID NO: 31023 - DNA, 5088 bp, Zea Mays
gcttgctctcgcccctgccttctcctctcctctgggtgttcccggcggtttcttcgccgctcaagccgcctccactctccctgccgcgctagcaactacgtttcggacttccccgctcgactttcgacctcccctgccgccaacaccgcccaaccgccgtcctccaccaccctcggccggcggcgccccgccttgccggaggcggagcagacgacgcgtggcagccgattccgcgatggatgcatccactgccggcgatggagacacgaatactttgaagaggccatgcaaaacatcgcctccagaaggcgaaacagacaagtataaacggcagaagagggaatgccaggatttctctcccagaaggtaccagcttgatgtctatgaggttgctacgaggcacaacacaattgcgatgcttgacacgggagctgggaagacaatgattgctgtcatgctcatcaagcattttgggaagatcaacaaagcaaacaatgatcgaaagctcatcatattccttgcaccaactgttcaactcgtcacacagcaatgcgaggttattaagagctacactgattttgaggtggagcattatcatggtgcaaagggtgttgatcaatggaaggctcatagctggcaacagcaactcttaaagtatcaggttatggtcatgacaccacaggtgttgctagacgctttacgccaagctttcttgatcttggacatggttagtctcatgatatttgatgaatgccatcacgcaactggtaaccacccatatactaggataatgaaggagttctatcatggatcagagcataagccaaatgtgttcggtatgacagcctctcctatcataagaaaaggggtctcctctgatttggattgcaaaaatcagctatctgagctggaaaatattttagattccaagatacactctgtggtggatagagaagagatagaactttgtgttccttctgcaaaagaagtgaatagatactatgagccaagaactgtttcttttgacgatttaagtgaagaactggaaattttgtgttccaagtatgatgggctgatcatacaattgcataacagatcgaccaatcagtacaaagatgctgatgaaataacaaaagaatcacggaaacgtctctcaaattctttagcaaagatttgctattgcctagaagatgctggtcttctttgtgctagtgaggctactaaaatctgcattgaaaggggccagagaaaaggttggctgaaggggggcagtgacaccactgatcagcaaagtggtcaaaatggacctatcctgtttgcagaaatttcaatgcttcatatggagttttttcaggaagtgttggatataatcggcaaacgcgtccaacagcaacaaggaattgatgcccttctgaactcagagcgtggatgtgtggaagcaaaaaatatgggctatatttcaccaaagctctatgagctcatgcaagtatttctctctttcagtgaccctgataacgttagatgccttgtttttgtggatcgaaagattagtgctagagtcattgagcggacgatgaagaaaataggccaactctcctgtttcagagtctcttttctaactggagggagttcttcagtggatgcactcacccctaaaatgcaaaaggatacactggattcgttccgctctggaaaggtcaacttactgtttactacagatgttgcagaagagggtatacatattccagactgctcgtgtgtaataagatttgatttgccgagaactacccgcagctatgtccaatcacgtggacgagcccgacagagggactctcagtacatactaatgattgaacagggaaatgtgaaacaagatgatttgatatctgggattatgagaagtaaggcctcgatgactgggattgcttcaaaccgagagcctgaggattcacaccccagtttcttacccactgaagaaataaatgaataccatataagcaaaacaggagccaaaataactactgattctagcatcagtgttctcaaccagtactgtgataagctcccgaaggacaagtactacaccccaaggcccaagtttcagttcactcattacggtgatggttatgagtgtactgtaacactaccatccagtgccatgtttcaacttttggtaggtcaaaaagcaagaaacatgcagaaagcaaagcagcttgtttgccttgatgcatgtaagaggctgcatcagctcggagcacttgatgaccatctttctccatcagttgaagagccgcctccggaaatttcaagcaagtctagtatctcgacacctggtgcaggtttaggtacaaccaaacggaaagaactgcatggtacaaccaaagttctttccatgtctggctcttggggttcagatagaagtgtgactaaacttcaaggctacaagttgaattttgtttgtgatcaagttggtcaaaaatactctgcctttgtccttttaattgatgctagtatagcaaaagaagctgctactttagatattgatctatatttgcatgacaagatggtaaaagcttcagtttccccttgtggacctcttgagttggatgcttggcagatggaacaaacaaaactatttcaagcacttctctttaatagtttgtttggaaaactgttcattggatcaaaagcatcaaaaaccccaagggagttcattctcaagaaagatgatgtgttcctttggaacaaagaaaatatgtatttgcttttacctgtggattctactctggattctcataaaagtgtttgcatcaactggagtgtaattgatgtagtggctacagctgttggattcatgagaagcatttattcagatggcaaatgtaacctaactgataaacttaattatgaaaaaaatggtgaagatcttattcatttggccaacaagtcatgcaagggtaatgatcttaaaaatatggtggttctagcaattcacactggaaagatctatactattgttgttgtatctgatttatgtgccaatagtaaatttgatggtacaactgacaagaaagaagcaaaattccggacatttgcagaatattttgagaagaagtatagtatatttctttgtcatcctttacaaccattgctagtgttgaaacccacccataatcctcacaatcttctttcctcaaagaatagagatgaagacaatgttgtggaaaataaaaatagggcgaacagccttgttcacatgcctccagagttgctgattccccttgatttacctattgatgttttgagagtattctacttgtttccatctctgatgcatcgtcttgagtcactaatgctagccagccaactaagaagtgaaattgcatacagagattctgatatatcaagcttcgtgattttggaagctatgacaacacttagatgctgtgaggacttctctatggagcgattagagttattgggggactctgttcttaagtatgcagtgagtgcccatcttttcatgacatttcttaataagcatgagggacagttatcgtccagaaggcaagaaacaatatgtaatgccacactttataggcttggtattgaacgcaggatacagggttacatacgtgatgctgcatttgatcctcgtcgatggcttgctcctggacagctgtccagacgtccttgtccttgtgaatgcccagtaaattctgaggttgtaactgaggatattcataggattgatgacaagtctataattataggcaaggcgtgtgacaagggacacagatggatatgttcgaaaaccatctctgattgtgttgaggctctaattggggcctattatgtcgaagggggattaaaagcagcttttgctgttctcaaatggttccagattgagactgaaatcgaggaagagttaattatggaagctctgtcgagtgcttcagtgcgaaactatcttccaaaagttgatgtagttgaattgcttgaagcaaaactaggctacacttttcaaatgaaaggtttgttaatagaggctctcacccactcatcacagcaagaatctggagcaacatactgctaccaacgcttggagttccttggtgatgcagtcttggatattttaataactcgccatctgttccttagtcataaagacacagatgagggggagctgacagatttacggtctgcatcagtaaataatgagaattttgcacaagttgcggtaaagcacaatctccatcagtttctacaacattcttcggggttcttacaagaccaaattactgaatatgtgaatagtcttgaaagttcgtccatggacagagccagccttttatccagtggaccatgtagggggccaaaatggttgtgaaggttaagttgagcaaaggaggacctcgtatatcattgtacgagtcgtgtaaaaagcttcagtggccaatgccgacctttgaattcgtgaaggtcgaaccaagcgtgtgctcctcttcctgtggttcgtcacaaaaggttgcgccccaaggattcgcatttgcttcgacaataacgttgcatataccgaacggcgatgtcatcagcctcacaggagatgggcgtgcggataagaagagctcacaggattctgctgcgttgctcatgctctatgagctgcagcggcaacgtagattccaagttcaagaagtatgaggaatcacctcgtggttccatcaccaaagatgcaatgttaccgccaccggcgattattgcttgggcatcttggagtaatgtcaccgccaaatcagtctttagtcgtcagccgcacgggggtgtaagaaaataatgtacttcattctgattctaaattataagacaccccgaattatgtaatctaattatcataatgtcctataatttgaaatggagcggtgttggttactctcgttcccgtctgatggattcagacatttcatctgtacacattaggttctggtgcatgttaaaagagcctggaagggcactgcttacgtccgccgtggtcgtgatgtgtgtacacgtgcagtaataagattttaacaggaaattgctatcttg

SEQ ID NO: 31024 - DNA, 5459 bp, Zea Mays
gcttgctctcgcccctgccttctcctctcctctgggtgttcccggcggtttcttcgccgctcaagccgcctccactctccctgccgcgctagcaactacgtttcggacttccccgctcgactttcgacctcccctgccgccaacaccgcccaaccgccgtcctccaccaccctcggccggcggcgccccgccttgccggaggcggagcagacgacgcgtggcagccgattccgcgatggatgcatccactgccggcgatggagacacgaatactttgaagaggccatgcaaaacatcgcctccagaaggcgaaacagacaagtataaacggcagaagagggaatgccaggatttctctcccagaaggtaccagcttgatgtctatgaggttgctacgaggcacaacacaattgcgatgcttgacacgggagctgggaagacaatgattgctgtcatgctcatcaagcattttgggaagatcaacaaagcaaacaatgatcgaaagctcatcatattccttgcaccaactgttcaactcgtcacacagcaatgcgaggttattaagagctacactgattttgaggtggagcattatcatggtgcaaagggtgttgatcaatggaaggctcatagctggcaacagcaactcttaaagtatcaggttatggtcatgacaccacaggtgttgctagacgctttacgccaagctttcttgatcttggacatggttagtctcatgatatttgatgaatgccatcacgcaactggtaaccacccatatactaggataatgaaggagttctatcatggatcagagcataagccaaatgtgttcggtatgacagcctctcctatcataagaaaaggggtctcctctgatttggattgcaaaaatcagctatctgagctggaaaatattttagattccaagatacactctgtggtggatagagaagagatagaactttgtgttccttctgcaaaagaagtgaatagatactatgagccaagaactgtttcttttgacgatttaagtgaagaactggaaattttgtgttccaagtatgatgggctgatcatacaattgcataacagatcgaccaatcagtacaaagatgctgatgaaataacaaaagaatcacggaaacgtctctcaaattctttagcaaagatttgctattgcctagaagatgctggtcttctttgtgctagtgaggctactaaaatctgcattgaaaggggccagagaaaaggttggctgaaggggggcagtgacaccactgatcagcaaagtggtcaaaatggacctatcctgtttgcagaaatttcaatgcttcatatggagttttttcaggaagtgttggatataatcggcaaacgcgtccaacagcaacaaggaattgatgcccttctgaactcagagcgtggatgtgtggaagcaaaaaatatgggctatatttcaccaaagctctatgagctcatgcaagtatttctctctttcagtgaccctgataacgttagatgccttgtttttgtggatcgaaagattagtgctagagtcattgagcggacgatgaagaaaataggccaactctcctgtttcagagtctcttttctaactggagggagttcttcagtggatgcactcacccctaaaatgcaaaaggatacactggattcgttccgctctggaaaggtcaacttactgtttactacagatgttgcagaagagggtatacatattccagactgctcgtgtgtaataagatttgatttgccgagaactacccgcagctatgtccaatcacgtggacgagcccgacagagggactctcagtacatactaatgattgaacagggaaatgtgaaacaagatgatttgatatctgggattatgagaagtaaggcctcgatgactgggattgcttcaaaccgagagcctgaggattcacaccccagtttcttacccactgaagaaataaatgaataccatataagcaaaacaggagccaaaataactactgattctagcatcagtgttctcaaccagtactgtgataagctcccgaaggacaagtactacaccccaaggcccaagtttcagttcactcattacggtgatggttatgagtgtactgtaacactaccatccagtgccatgtttcaacttttggtaggtcaaaaagcaagaaacatgcagaaagcaaagcagcttgtttgccttgatgcatgtaagaggctgcatcagctcggagcacttgatgaccatctttctccatcagttgaagagccgcctccggaaatttcaagcaagtctagtatctcgacacctggtgcaggtttaggtacaaccaaacggaaagaactgcatggtacaaccaaagttctttccatgtctggctcttggggttcagatagaagtgtgactaaacttcaaggctacaagttgaattttgtttgtgatcaagttggtcaaaaatactctgcctttgtccttttaattgatgctagtatagcaaaagaagctgctactttagatattgatctatatttgcatgacaagatggtaaaagcttcagtttccccttgtggacctcttgagttggatgcttggcagatggaacaaacaaaactatttcaagcacttctctttaatagtttgtttggaaaactgttcattggatcaaaagcatcaaaaaccccaagggagttcattctcaagaaagatgatgtgttcctttggaacaaagaaaatatgtatttgcttttacctgtggattctactctggattctcataaaagtgtttgcatcaactggagtgtaattgatgtagtggctacagctgttggattcatgagaagcatttattcagatggcaaatgtaacctaactgataaacttaattatgaaaaaaatggtgaagatcttattcatttggccaacaagtcatgcaagggtaatgatcttaaaaatatggtggttctagcaattcacactggaaagatctatactattgttgttgtatctgatttatgtgccaatagtaaatttgatggtacaactgacaagaaagaagcaaaattccggacatttgcagaatattttgagaagaagtatagtatatttctttgtcatcctttacaaccattgctagtgttgaaacccacccataatcctcacaatcttctttcctcaaagaatagagatgaagacaatgttgtggaaaataaaaatagggcgaacagccttgttcacatgcctccagagttgctgattccccttgatttacctattgatgttttgagagtattctacttgtttccatctctgatgcatcgtcttgagtcactaatgctagccagccaactaagaagtgaaattgcatacagagattctgatatatcaagcttcgtgattttggaagctatgacaacacttagatgctgtgaggacttctctatggagcgattagagttattgggggactctgttcttaagtatgcagtgagtgcccatcttttcatgacatttcttaataagcatgagggacagttatcgtccagaaggcaagaaacaatatgtaatgccacactttataggcttggtattgaacgcaggatacagggttacatacgtgatgctgcatttgatcctcgtcgatggcttgctcctggacagctgtccagacgtccttgtccttgtgaatgcccagtaaattctgaggttgtaactgaggatattcataggattgatgacaagtctataattataggcaaggcgtgtgacaagggacacagatggatatgttcgaaaaccatctctgattgtgttgaggctctaattggggcctattatgtcgaagggggattaaaagcagcttttgctgttctcaaatggttccagattgagactgaaatcgaggaagagttaattatggaagctctgtcgagtgcttcagtgcgaaactatcttccaaaagttgatgtagttgaattgcttgaagcaaaactaggctacacttttcaaatgaaaggtttgttaatagaggctctcacccactcatcacagcaagaatctggagcaacatactgctaccaacgcttggagttccttggtgatgcagtcttggatattttaataactcgccatctgttccttagtcataaagacacagatgagggggagctgacagatttacggtctgcatcagtaaataatgagaattttgcacaagttgcggtaaagcacaatctccatcagtttctacaacattcttcggggttcttacaagaccaaattactgaatatgtgaatagtcttgaaagttcgtccatggacagagccagccttttatccagtggaccatgtagggggccaaaaagaacttaatgagtggtctgacaagaatgggtactttattggaattaagtgtgaaaatcgaggagacagcacaatggctatccttaacttacaactcaaggatttgcttcttgtgaggcaaggttgtgggaagaataaagtagatgcgaaagcacatgcagcttccttattgcttagggatctagaggaaaaaggacttataattccaaggaatgcaagcagagtggaacaacttgaaaagaattctggtactgtaaaacattgcaacaacgtgcttgatgttatggacacacaaaacgtagcaccacctaggcaaaaggaagtagctgtgttaagtaccaccactcctggctctgttcttgataagccattggttgtgaaggttaagttgagcaaaggaggacctcgtatatcattgtacgagtcgtgtaaaaagcttcagtggccaatgccgacctttgaattcgtgaaggtcgaaccaagcgtgtgctcctcttcctgtggttcgtcacaaaaggttgcgccccaaggattcgcatttgcttcgacaataacgttgcatataccgaacggcgatgtcatcagcctcacaggagatgggcgtgcggataagaagagctcacaggattctgctgcgttgctcatgctctatgagctgcagcggcaacgtagattccaagttcaagaagtatgaggaatcacctcgtggttccatcaccaaagatgcaatgttaccgccaccggcgattattgcttgggcatcttggagtaatgtcaccgccaaatcagtctttagtcgtcagccgcacgggggtgtaagaaaataatgtacttcattctgattctaaattataagacaccccgaattatgtaatctaattatcataatgtcctataatttgaaatggagcggtgttggttactctcgttcccgtctgatggattcagacatttcatctgtacacattaggttctggtgcatgttaaaagagcctggaagggcactgcttacgtccgccgtggtcgtgatgtgtgtacacgtgcagtaataagattttaacaggaaattgctatcttg

SEQ ID NO: 31025 - DNA, 5534 bp, Zea Mays
gcttgctctcgcccctgccttctcctctcctctgggtgttcccggcggtttcttcgccgctcaagccgcctccactctccctgccgcgctagcaactacgtttcggacttccccgctcgactttcgacctcccctgccgccaacaccgcccaaccgccgtcctccaccaccctcggccggcggcgccccgccttgccggaggcggagcagacgacgcgtggcagccgattccgcgatggatgcatccactgccggcgatggagacacgaatactttgaagaggccatgcaaaacatcgcctccagaaggcgaaacagacaagtataaacggcagaagagggaatgccaggatttctctcccagaaggtaccagcttgatgtctatgaggttgctacgaggcacaacacaattgcgatgcttgacacgggagctgggaagacaatgattgctgtcatgctcatcaagcattttgggaagatcaacaaagcaaacaatgatcgaaagctcatcatattccttgcaccaactgttcaactcgtcacacagcaatgcgaggttattaagagctacactgattttgaggtggagcattatcatggtgcaaagggtgttgatcaatggaaggctcatagctggcaacagcaactcttaaagtatcaggttatggtcatgacaccacaggtgttgctagacgctttacgccaagctttcttgatcttggacatggttagtctcatgatatttgatgaatgccatcacgcaactggtaaccacccatatactaggataatgaaggagttctatcatggatcagagcataagccaaatgtgttcggtatgacagcctctcctatcataagaaaaggggtctcctctgatttggattgcaaaaatcagctatctgagctggaaaatattttagattccaagatacactctgtggtggatagagaagagatagaactttgtgttccttctgcaaaagaagtgaatagatactatgagccaagaactgtttcttttgacgatttaagtgaagaactggaaattttgtgttccaagtatgatgggctgatcatacaattgcataacagatcgaccaatcagtacaaagatgctgatgaaataacaaaagaatcacggaaacgtctctcaaattctttagcaaagatttgctattgcctagaagatgctggtcttctttgtgctagtgaggctactaaaatctgcattgaaaggggccagagaaaaggttggctgaaggggggcagtgacaccactgatcagcaaagtggtcaaaatggacctatcctgtttgcagaaatttcaatgcttcatatggagttttttcaggaagtgttggatataatcggcaaacgcgtccaacagcaacaaggaattgatgcccttctgaactcagagcgtggatgtgtggaagcaaaaaatatgggctatatttcaccaaagctctatgagctcatgcaagtatttctctctttcagtgaccctgataacgttagatgccttgtttttgtggatcgaaagattagtgctagagtcattgagcggacgatgaagaaaataggccaactctcctgtttcagagtctcttttctaactggagggagttcttcagtggatgcactcacccctaaaatgcaaaaggatacactggattcgttccgctctggaaaggtcaacttactgtttactacagatgttgcagaagagggtatacatattccagactgctcgtgtgtaataagatttgatttgccgagaactacccgcagctatgtccaatcacgtggacgagcccgacagagggactctcagtacatactaatgattgaacagggaaatgtgaaacaagatgatttgatatctgggattatgagaagtaaggcctcgatgactgggattgcttcaaaccgagagcctgaggattcacaccccagtttcttacccactgaagaaataaatgaataccatataagcaaaacaggagccaaaataactactgattctagcatcagtgttctcaaccagtactgtgataagctcccgaaggacaagtactacaccccaaggcccaagtttcagttcactcattacggtgatggttatgagtgtactgtaacactaccatccagtgccatgtttcaacttttggtaggtcaaaaagcaagaaacatgcagaaagcaaagcagcttgtttgccttgatgcatgtaagaggctgcatcagctcggagcacttgatgaccatctttctccatcagttgaagagccgcctccggaaatttcaagcaagtctagtatctcgacacctggtgcaggtttaggtacaaccaaacggaaagaactgcatggtacaaccaaagttctttccatgtctggctcttggggttcagatagaagtgtgactaaacttcaaggctacaagttgaattttgtttgtgatcaagttggtcaaaaatactctgcctttgtccttttaattgatgctagtatagcaaaagaagctgctactttagatattgatctatatttgcatgacaagatggtaaaagcttcagtttccccttgtggacctcttgagttggatgcttggcagatggaacaaacaaaactatttcaagcacttctctttaatagtttgtttggaaaactgttcattggatcaaaagcatcaaaaaccccaagggagttcattctcaagaaagatgatgtgttcctttggaacaaagaaaatatgtatttgcttttacctgtggattctactctggattctcataaaagtgtttgcatcaactggagtgtaattgatgtagtggctacagctgttggattcatgagaagcatttattcagatggcaaatgtaacctaactgataaacttaattatgaaaaaaatggtgaagatcttattcatttggccaacaagtcatgcaagggtaatgatcttaaaaatatggtggttctagcaattcacactggaaagatctatactattgttgttgtatctgatttatgtgccaatagtaaatttgatggtacaactgacaagaaagaagcaaaattccggacatttgcagaatattttgagaagaagtatagtatatttctttgtcatcctttacaaccattgctagtgttgaaacccacccataatcctcacaatcttctttcctcaaagaatagagatgaagacaatgttgtggaaaataaaaatagggcgaacagccttgttcacatgcctccagagttgctgattccccttgatttacctattgatgttttgagagtattctacttgtttccatctctgatgcatcgtcttgagtcactaatgctagccagccaactaagaagtgaaattgcatacagagattctgatatatcaagcttcgtgattttggaagctatgacaacacttagatgctgtgaggacttctctatggagcgattagagttattgggggactctgttcttaagtatgcagtgagtgcccatcttttcatgacatttcttaataagcatgagggacagttatcgtccagaaggcaagaaacaatatgtaatgccacactttataggcttggtattgaacgcaggatacagggttacatacgtgatgctgcatttgatcctcgtcgatggcttgctcctggacagctgtccagacgtccttgtccttgtgaatgcccagtaaattctgaggttgtaactgaggatattcataggattgatgacaagtctataattataggcaaggcgtgtgacaagggacacagatggatatgttcgaaaaccatctctgattgtgttgaggctctaattggggcctattatgtcgaagggggattaaaagcagcttttgctgttctcaaatggttccagattgagactgaaatcgaggaagagttaattatggaagctctgtcgagtgcttcagtgcgaaactatcttccaaaagttgatgtagttgaattgcttgaagcaaaactaggctacacttttcaaatgaaagcgcttggagttccttggtgatgcagtcttggatattttaataactcgccatctgttccttagtcataaagacacagatgagggggagctgacagatttacggtctgcatcagtaaataatgagaattttgcacaagttgcggtaaagcacaatctccatcagtttctacaacattcttcggggttcttacaagaccaaattactgaatatgtgaatagtcttgaaagttcgtccatggacagagccagccttttatccagtggaccatgtagggggccaaaagttttaggtgatattgtagaaagtatagcaggtgctattcttattgacagcaaacttgatttggatttagtttggcgggtttttaaacctcttctttcaccaattgtcacacctgagaatttggagttgccccgattcagagaacttaatgagtggtctgacaagaatgggtactttattggaattaagtgtgaaaatcgaggagacagcacaatggctatccttaacttacaactcaaggatttgcttcttgtgaggcaaggttgtgggaagaataaagtagatgcgaaagcacatgcagcttccttattgcttagggatctagaggaaaaaggacttataattccaaggaatgcaagcagagtggaacaacttgaaaagaattctggtactgtaaaacattgcaacaacgtgcttgatgttatggacacacaaaacgtagcaccacctaggcaaaaggaagtagctgtgttaagtaccaccactcctggctctgttcttgataagccattggttgtgaaggttaagttgagcaaaggaggacctcgtatatcattgtacgagtcgtgtaaaaagcttcagtggccaatgccgacctttgaattcgtgaaggtcgaaccaagcgtgtgctcctcttcctgtggttcgtcacaaaaggttgcgccccaaggattcgcatttgcttcgacaataacgttgcatataccgaacggcgatgtcatcagcctcacaggagatgggcgtgcggataagaagagctcacaggattctgctgcgttgctcatgctctatgagctgcagcggcaacgtagattccaagttcaagaagtatgaggaatcacctcgtggttccatcaccaaagatgcaatgttaccgccaccggcgattattgcttgggcatcttggagtaatgtcaccgccaaatcagtctttagtcgtcagccgcacgggggtgtaagaaaataatgtacttcattctgattctaaattataagacaccccgaattatgtaatctaattatcataatgtcctataatttgaaatggagcggtgttggttactctcgttcccgtctgatggattcagacatttcatctgtacacattaggttctggtgcatgttaaaagagcctggaagggcactgcttacgtccgccgtggtcgtgatgtgtgtacacgtgcagtaataagattttaacaggaaattgctatcttg

SEQ ID NO: 31026 - DNA, 5616 bp, Zea Mays
gcttgctctcgcccctgccttctcctctcctctgggtgttcccggcggtttcttcgccgctcaagccgcctccactctccctgccgcgctagcaactacgtttcggacttccccgctcgactttcgacctcccctgccgccaacaccgcccaaccgccgtcctccaccaccctcggccggcggcgccccgccttgccggaggcggagcagacgacgcgtggcagccgattccgcgatggatgcatccactgccggcgatgcattgttgcattggcaggagacacgaatactttgaagaggccatgcaaaacatcgcctccagaaggcgaaacagacaagtataaacggcagaagagggaatgccaggatttctctcccagaaggtaccagcttgatgtctatgaggttgctacgaggcacaacacaattgcgatgcttgacacgggagctgggaagacaatgattgctgtcatgctcatcaagcattttgggaagatcaacaaagcaaacaatgatcgaaagctcatcatattccttgcaccaactgttcaactcgtcacacagcaatgcgaggttattaagagctacactgattttgaggtggagcattatcatggtgcaaagggtgttgatcaatggaaggctcatagctggcaacagcaactcttaaagtatcaggttatggtcatgacaccacaggtgttgctagacgctttacgccaagctttcttgatcttggacatggttagtctcatgatatttgatgaatgccatcacgcaactggtaaccacccatatactaggataatgaaggagttctatcatggatcagagcataagccaaatgtgttcggtatgacagcctctcctatcataagaaaaggggtctcctctgatttggattgcaaaaatcagctatctgagctggaaaatattttagattccaagatacactctgtggtggatagagaagagatagaactttgtgttccttctgcaaaagaagtgaatagatactatgagccaagaactgtttcttttgacgatttaagtgaagaactggaaattttgtgttccaagtatgatgggctgatcatacaattgcataacagatcgaccaatcagtacaaagatgctgatgaaataacaaaagaatcacggaaacgtctctcaaattctttagcaaagatttgctattgcctagaagatgctggtcttctttgtgctagtgaggctactaaaatctgcattgaaaggggccagagaaaaggttggctgaaggggggcagtgacaccactgatcagcaaagtggtcaaaatggacctatcctgtttgcagaaatttcaatgcttcatatggagttttttcaggaagtgttggatataatcggcaaacgcgtccaacagcaacaaggaattgatgcccttctgaactcagagcgtggatgtgtggaagcaaaaaatatgggctatatttcaccaaagctctatgagctcatgcaagtatttctctctttcagtgaccctgataacgttagatgccttgtttttgtggatcgaaagattagtgctagagtcattgagcggacgatgaagaaaataggccaactctcctgtttcagagtctcttttctaactggagggagttcttcagtggatgcactcacccctaaaatgcaaaaggatacactggattcgttccgctctggaaaggtcaacttactgtttactacagatgttgcagaagagggtatacatattccagactgctcgtgtgtaataagatttgatttgccgagaactacccgcagctatgtccaatcacgtggacgagcccgacagagggactctcagtacatactaatgattgaacagggaaatgtgaaacaagatgatttgatatctgggattatgagaagtaaggcctcgatgactgggattgcttcaaaccgagagcctgaggattcacaccccagtttcttacccactgaagaaataaatgaataccatataagcaaaacaggagccaaaataactactgattctagcatcagtgttctcaaccagtactgtgataagctcccgaaggacaagtactacaccccaaggcccaagtttcagttcactcattacggtgatggttatgagtgtactgtaacactaccatccagtgccatgtttcaacttttggtaggtcaaaaagcaagaaacatgcagaaagcaaagcagcttgtttgccttgatgcatgtaagaggctgcatcagctcggagcacttgatgaccatctttctccatcagttgaagagccgcctccggaaatttcaagcaagtctagtatctcgacacctggtgcaggtttaggtacaaccaaacggaaagaactgcatggtacaaccaaagttctttccatgtctggctcttggggttcagatagaagtgtgactaaacttcaaggctacaagttgaattttgtttgtgatcaagttggtcaaaaatactctgcctttgtccttttaattgatgctagtatagcaaaagaagctgctactttagatattgatctatatttgcatgacaagatggtaaaagcttcagtttccccttgtggacctcttgagttggatgcttggcagatggaacaaacaaaactatttcaagcacttctctttaatagtttgtttggaaaactgttcattggatcaaaagcatcaaaaaccccaagggagttcattctcaagaaagatgatgtgttcctttggaacaaagaaaatatgtatttgcttttacctgtggattctactctggattctcataaaagtgtttgcatcaactggagtgtaattgatgtagtggctacagctgttggattcatgagaagcatttattcagatggcaaatgtaacctaactgataaacttaattatgaaaaaaatggtgaagatcttattcatttggccaacaagtcatgcaagggtaatgatcttaaaaatatggtggttctagcaattcacactggaaagatctatactattgttgttgtatctgatttatgtgccaatagtaaatttgatggtacaactgacaagaaagaagcaaaattccggacatttgcagaatattttgagaagaagtatagtatatttctttgtcatcctttacaaccattgctagtgttgaaacccacccataatcctcacaatcttctttcctcaaagaatagagatgaagacaatgttgtggaaaataaaaatagggcgaacagccttgttcacatgcctccagagttgctgattccccttgatttacctattgatgttttgagagtattctacttgtttccatctctgatgcatcgtcttgagtcactaatgctagccagccaactaagaagtgaaattgcatacagagattctgatatatcaagcttcgtgattttggaagctatgacaacacttagatgctgtgaggacttctctatggagcgattagagttattgggggactctgttcttaagtatgcagtgagtgcccatcttttcatgacatttcttaataagcatgagggacagttatcgtccagaaggcaagaaacaatatgtaatgccacactttataggcttggtattgaacgcaggatacagggttacatacgtgatgctgcatttgatcctcgtcgatggcttgctcctggacagctgtccagacgtccttgtccttgtgaatgcccagtaaattctgaggttgtaactgaggatattcataggattgatgacaagtctataattataggcaaggcgtgtgacaagggacacagatggatatgttcgaaaaccatctctgattgtgttgaggctctaattggggcctattatgtcgaagggggattaaaagcagcttttgctgttctcaaatggttccagattgagactgaaatcgaggaagagttaattatggaagctctgtcgagtgcttcagtgcgaaactatcttccaaaagttgatgtagttgaattgcttgaagcaaaactaggctacacttttcaaatgaaaggtttgttaatagaggctctcacccactcatcacagcaagaatctggagcaacatactgctaccaacgcttggagttccttggtgatgcagtcttggatattttaataactcgccatctgttccttagtcataaagacacagatgagggggagctgacagatttacggtctgcatcagtaaataatgagaattttgcacaagttgcggtaaagcacaatctccatcagtttctacaacattcttcggggttcttacaagaccaaattactgaatatgtgaatagtcttgaaagttcgtccatggacagagccagccttttatccagtggaccatgtagggggccaaaagttttaggtgatattgtagaaagtatagcaggtgctattcttattgacagcaaacttgatttggatttagtttggcgggtttttaaacctcttctttcaccaattgtcacacctgagaatttggagttgccccgattcagagaacttaatgagtggtctgacaagaatgggtactttattggaattaagtgtgaaaatcgaggagacagcacaatggctatccttaacttacaactcaaggatttgcttcttgtgaggcaaggttgtgggaagaataaagtagatgcgaaagcacatgcagcttccttattgcttagggatctagaggaaaaaggacttataattccaaggaatgcaagcagagtggaacaacttgaaaagaattctggtactgtaaaacattgcaacaacgtgcttgatgttatggacacacaaaacgtagcaccacctaggcaaaaggaagtagctgtgttaagtaccaccactcctggctctgttcttgataagccattggttgtgaaggttaagttgagcaaaggaggacctcgtatatcattgtacgagtcgtgtaaaaagcttcagtggccaatgccgacctttgaattcgtgaaggtcgaaccaagcgtgtgctcctcttcctgtggttcgtcacaaaaggttgcgccccaaggattcgcatttgcttcgacaataacgttgcatataccgaacggcgatgtcatcagcctcacaggagatgggcgtgcggataagaagagctcacaggattctgctgcgttgctcatgctctatgagctgcagcggcaacgtagattccaagttcaagaagtatgaggaatcacctcgtggttccatcaccaaagatgcaatgttaccgccaccggcgattattgcttgggcatcttggagtaatgtcaccgccaaatcagtctttagtcgtcagccgcacgggggtgtaagaaaataatgtacttcattctgattctaaattataagacaccccgaattatgtaatctaattatcataatgtcctataatttgaaatggagcggtgttggttactctcgttcccgtctgatggattcagacatttcatctgtacacattaggttctggtgcatgttaaaagagcctggaagggcactgcttacgtccgccgtggtcgtgatgtgtgtacacgtgcagtaataagattttaacaggaaattgctatcttg

SEQ ID NO: 31027 - DNA, 5626 bp, Zea Mays
gcttgctctcgcccctgccttctcctctcctctgggtgttcccggcggtttcttcgccgctcaagccgcctccactctccctgccgcgctagcaactacgtttcggacttccccgctcgactttcgacctcccctgccgccaacaccgcccaaccgccgtcctccaccaccctcggccggcggcgccccgccttgccggaggcggagcagacgacgcgtggcagccgattccgcgatggatgcatccactgccggcgatggagacacgaatactttgaagaggccatgcaaaacatcgcctccagaaggcgaaacagacaagtataaacggcagaagagggaatgccaggatttctctcccagaaggtaccagcttgatgtctatgaggttgctacgaggcacaacacaattgcgatgcttgacacgggagctgggaagacaatgattgctgtcatgctcatcaagcattttgggaagatcaacaaagcaaacaatgatcgaaagctcatcatattccttgcaccaactgttcaactcgtcacacagcaatgcgaggttattaagagctacactgattttgaggtggagcattatcatggtgcaaagggtgttgatcaatggaaggctcatagctggcaacagcaactcttaaagtatcaggttatggtcatgacaccacaggtgttgctagacgctttacgccaagctttcttgatcttggacatggttagtctcatgatatttgatgaatgccatcacgcaactggtaaccacccatatactaggataatgaagtttctgttattttgcccgtttgaacaggagttctatcatggatcagagcataagccaaatgtgttcggtatgacagcctctcctatcataagaaaaggggtctcctctgatttggattgcaaaaatcagctatctgagctggaaaatattttagattccaagatacactctgtggtggatagagaagagatagaactttgtgttccttctgcaaaagaagtgaatagatactatgagccaagaactgtttcttttgacgatttaagtgaagaactggaaattttgtgttccaagtatgatgggctgatcatacaattgcataacagatcgaccaatcagtacaaagatgctgatgaaataacaaaagaatcacggaaacgtctctcaaattctttagcaaagatttgctattgcctagaagatgctggtcttctttgtgctagtgaggctactaaaatctgcattgaaaggggccagagaaaaggttggctgaaggggggcagtgacaccactgatcagcaaagtggtcaaaatggacctatcctgtttgcagaaatttcaatgcttcatatggagttttttcaggaagtgttggatataatcggcaaacgcgtccaacagcaacaaggaattgatgcccttctgaactcagagcgtggatgtgtggaagcaaaaaatatgggctatatttcaccaaagctctatgagctcatgcaagtatttctctctttcagtgaccctgataacgttagatgccttgtttttgtggatcgaaagattagtgctagagtcattgagcggacgatgaagaaaataggccaactctcctgtttcagagtctcttttctaactggagggagttcttcagtggatgcactcacccctaaaatgcaaaaggatacactggattcgttccgctctggaaaggtcaacttactgtttactacagatgttgcagaagagggtatacatattccagactgctcgtgtgtaataagatttgatttgccgagaactacccgcagctatgtccaatcacgtggacgagcccgacagagggactctcagtacatactaatgattgaacagggaaatgtgaaacaagatgatttgatatctgggattatgagaagtaaggcctcgatgactgggattgcttcaaaccgagagcctgaggattcacaccccagtttcttacccactgaagaaataaatgaataccatataagcaaaacaggagccaaaataactactgattctagcatcagtgttctcaaccagtactgtgataagctcccgaaggacaagtactacaccccaaggcccaagtttcagttcactcattacggtgatggttatgagtgtactgtaacactaccatccagtgccatgtttcaacttttggtaggtcaaaaagcaagaaacatgcagaaagcaaagcagcttgtttgccttgatgcatgtaagaggctgcatcagctcggagcacttgatgaccatctttctccatcagttgaagagccgcctccggaaatttcaagcaagtctagtatctcgacacctggtgcaggtttaggtacaaccaaacggaaagaactgcatggtacaaccaaagttctttccatgtctggctcttggggttcagatagaagtgtgactaaacttcaaggctacaagttgaattttgtttgtgatcaagttggtcaaaaatactctgcctttgtccttttaattgatgctagtatagcaaaagaagctgctactttagatattgatctatatttgcatgacaagatggtaaaagcttcagtttccccttgtggacctcttgagttggatgcttggcagatggaacaaacaaaactatttcaagcacttctctttaatagtttgtttggaaaactgttcattggatcaaaagcatcaaaaaccccaagggagttcattctcaagaaagatgatgtgttcctttggaacaaagaaaatatgtatttgcttttacctgtggattctactctggattctcataaaagtgtttgcatcaactggagtgtaattgatgtagtggctacagctgttggattcatgagaagcatttattcagatggcaaatgtaacctaactgataaacttaattatgaaaaaaatggtgaagatcttattcatttggccaacaagtcatgcaagggtaatgatcttaaaaatatggtggttctagcaattcacactggaaagatctatactattgttgttgtatctgatttatgtgccaatagtaaatttgatggtacaactgacaagaaagaagcaaaattccggacatttgcagaatattttgagaagaagtatagtatatttctttgtcatcctttacaaccattgctagtgttgaaacccacccataatcctcacaatcttctttcctcaaagaatagagatgaagacaatgttgtggaaaataaaaatagggcgaacagccttgttcacatgcctccagagttgctgattccccttgatttacctattgatgttttgagagtattctacttgtttccatctctgatgcatcgtcttgagtcactaatgctagccagccaactaagaagtgaaattgcatacagagattctgatatatcaagcttcgtgattttggaagctatgacaacacttagatgctgtgaggacttctctatggagcgattagagttattgggggactctgttcttaagtatgcagtgagtgcccatcttttcatgacatttcttaataagcatgagggacagttatcgtccagaaggcaagaaacaatatgtaatgccacactttataggcttggtattgaacgcaggatacagggttacatacgtgatgctgcatttgatcctcgtcgatggcttgctcctggacagctgtccagacgtccttgtccttgtgaatgcccagtaaattctgaggttgtaactgaggatattcataggattgatgacaagtctataattataggcaaggcgtgtgacaagggacacagatggatatgttcgaaaaccatctctgattgtgttgaggctctaattggggcctattatgtcgaagggggattaaaagcagcttttgctgttctcaaatggttccagattgagactgaaatcgaggaagagttaattatggaagctctgtcgagtgcttcagtgcgaaactatcttccaaaagttgatgtagttgaattgcttgaagcaaaactaggctacacttttcaaatgaaaggtttgttaatagaggctctcacccactcatcacagcaagaatctggagcaacatactgctaccaacgcttggagttccttggtgatgcagtcttggatattttaataactcgccatctgttccttagtcataaagacacagatgagggggagctgacagatttacggtctgcatcagtaaataatgagaattttgcacaagttgcggtaaagcacaatctccatcagtttctacaacattcttcggggttcttacaagaccaaattactgaatatgtgaatagtcttgaaagttcgtccatggacagagccagccttttatccagtggaccatgtagggggccaaaagttttaggtgatattgtagaaagtatagcaggtgctattcttattgacagcaaacttgatttggatttagtttggcgggtttttaaacctcttctttcaccaattgtcacacctgagaatttggagttgccccgattcagagaacttaatgagtggtctgacaagaatgggtactttattggaattaagtgtgaaaatcgaggagacagcacaatggctatccttaacttacaactcaaggatttgcttcttgtgaggcaaggttgtgggaagaataaagtagatgcgaaagcacatgcagcttccttattgcttagggatctagaggaaaaaggacttataattccaaggaatgcaagcagagtggaacaacttgaaaagaattctggtactgtaaaacattgcaacaacgtgcttgatgttatggacacacaaaacgtagcaccacctaggcaaaaggaagtagctgtgttaagtaccaccactcctggctctgttcttgataagccattggttgtgaaggttaagttgagcaaaggaggacctcgtatatcattgtacgagtcgtgtaaaaagcttcagtggccaatgccgacctttgaattcgtgaaggtcgaaccaagcgtgtgctcctcttcctgtggttcgtcacaaaaggttgcgccccaaggattcgcatttgcttcgacaataacgttgcatataccgaacggcgatgtcatcagcctcacaggagatgggcgtgcggataagaagagctcacaggattctgctgcgttgctcatgctctatgagctgcagcggcaacgtagattccaagttcaagaagtatgaggaatcacctcgtggttccatcaccaaagatgcaatgttaccgccaccggcgattattgcttgggcatcttggagtaatgtcaccgccaaatcagtctttagtcgtcagccgcacgggggtgtaagaaaataatgtacttcattctgattctaaattataagacaccccgaattatgtaatctaattatcataatgtcctataatttgaaatggagcggtgttggttactctcgttcccgtctgatggattcagacatttcatctgtacacattaggttctggtgcatgttaaaagagcctggaagggcactgcttacgtccgccgtggtcgtgatgtgtgtacacgtgcagtaataagattttaacaggaaattgctatcttg

SEQ ID NO: 31028 - DNA, 5522 bp, Zea Mays
gcttgctctcgcccctgccttctcctctcctctgggtgttcccggcggtttcttcgccgctcaagccgcctccactctccctgccgcgctagcaactacgtttcggacttccccgctcgactttcgacctcccctgccgccaacaccgcccaaccgccgtcctccaccaccctcggccggcggcgccccgccttgccggaggcggagcagacgacgcgtggcagccgattccgcgatggatgcatccactgccggcgatggagacacgaatactttgaagaggccatgcaaaacatcgcctccagaaggcgaaacagacaagtataaacggcagaagagggaatgccaggatttctctcccagaaggtaccagcttgatgtctatgaggttgctacgaggcacaacacaattgcgatgcttgacacgggagctgggaagacaatgattgctgtcatgctcatcaagcattttgggaagatcaacaaagcaaacaatgatcgaaagctcatcatattccttgcaccaactgttcaactcgtcacacagcaatgcgaggttattaagagctacactgattttgaggtggagcattatcatggtgcaaagggtgttgatcaatggaaggctcatagctggcaacagcaactcttaaagttatggtcatgacaccacaggtgttgctagacgctttacgccaagctttcttgatcttggacatggttagtctcatgatatttgatgaatgccatcacgcaactggtaaccacccatatactaggataatgaaggagttctatcatggatcagagcataagccaaatgtgttcggtatgacagcctctcctatcataagaaaaggggtctcctctgatttggattgcaaaaatcagctatctgagctggaaaatattttagattccaagatacactctgtggtggatagagaagagatagaactttgtgttccttctgcaaaagaagtgaatagatactatgagccaagaactgtttcttttgacgatttaagtgaagaactggaaattttgtgttccaagtatgatgggctgatcatacaattgcataacagatcgaccaatcagtacaaagatgctgatgaaataacaaaagaatcacggaaacgtctctcaaattctttagcaaagatttgctattgcctagaagatgctggtcttctttgtgctagtgaggctactaaaatctgcattgaaaggggccagagaaaaggttggctgaaggggggcagtgacaccactgatcagcaaagtggtcaaaatggacctatcctgtttgcagaaatttcaatgcttcatatggagttttttcaggaagtgttggatataatcggcaaacgcgtccaacagcaacaaggaattgatgcccttctgaactcagagcgtggatgtgtggaagcaaaaaatatgggctatatttcaccaaagctctatgagctcatgcaagtatttctctctttcagtgaccctgataacgttagatgccttgtttttgtggatcgaaagattagtgctagagtcattgagcggacgatgaagaaaataggccaactctcctgtttcagagtctcttttctaactggagggagttcttcagtggatgcactcacccctaaaatgcaaaaggatacactggattcgttccgctctggaaaggtcaacttactgtttactacagatgttgcagaagagggtatacatattccagactgctcgtgtgtaataagatttgatttgccgagaactacccgcagctatgtccaatcacgtggacgagcccgacagagggactctcagtacatactaatgattgaacagggaaatgtgaaacaagatgatttgatatctgggattatgagaagtaaggcctcgatgactgggattgcttcaaaccgagagcctgaggattcacaccccagtttcttacccactgaagaaataaatgaataccatataagcaaaacaggagccaaaataactactgattctagcatcagtgttctcaaccagtactgtgataagctcccgaaggacaagtactacaccccaaggcccaagtttcagttcactcattacggtgatggttatgagtgtactgtaacactaccatccagtgccatgtttcaacttttggtaggtcaaaaagcaagaaacatgcagaaagcaaagcagcttgtttgccttgatgcatgtaagaggctgcatcagctcggagcacttgatgaccatctttctccatcagttgaagagccgcctccggaaatttcaagcaagtctagtatctcgacacctggtgcaggtttaggtacaaccaaacggaaagaactgcatggtacaaccaaagttctttccatgtctggctcttggggttcagatagaagtgtgactaaacttcaaggctacaagttgaattttgtttgtgatcaagttggtcaaaaatactctgcctttgtccttttaattgatgctagtatagcaaaagaagctgctactttagatattgatctatatttgcatgacaagatggtaaaagcttcagtttccccttgtggacctcttgagttggatgcttggcagatggaacaaacaaaactatttcaagcacttctctttaatagtttgtttggaaaactgttcattggatcaaaagcatcaaaaaccccaagggagttcattctcaagaaagatgatgtgttcctttggaacaaagaaaatatgtatttgcttttacctgtggattctactctggattctcataaaagtgtttgcatcaactggagtgtaattgatgtagtggctacagctgttggattcatgagaagcatttattcagatggcaaatgtaacctaactgataaacttaattatgaaaaaaatggtgaagatcttattcatttggccaacaagtcatgcaagggtaatgatcttaaaaatatggtggttctagcaattcacactggaaagatctatactattgttgttgtatctgatttatgtgccaatagtaaatttgatggtacaactgacaagaaagaagcaaaattccggacatttgcagaatattttgagaagaagtatagtatatttctttgtcatcctttacaaccattgctagtgttgaaacccacccataatcctcacaatcttctttcctcaaagaatagagatgaagacaatgttgtggaaaataaaaatagggcgaacagccttgttcacatgcctccagagttgctgattccccttgatttacctattgatgttttgagagtattctacttgtttccatctctgatgcatcgtcttgagtcactaatgctagccagccaactaagaagtgaaattgcatacagagattctgatatatcaagcttcgtgattttggaagctatgacaacacttagatgctgtgaggacttctctatggagcgattagagttattgggggactctgttcttaagtatgcagtgagtgcccatcttttcatgacatttcttaataagcatgagggacagttatcgtccagaaggcaagaaacaatatgtaatgccacactttataggcttggtattgaacgcaggatacagggttacatacgtgatgctgcatttgatcctcgtcgatggcttgctcctggacagctgtccagacgtccttgtccttgtgaatgcccagtaaattctgaggttgtaactgaggatattcataggattgatgacaagtctataattataggcaaggcgtgtgacaagggacacagatggatatgttcgaaaaccatctctgattgtgttgaggctctaattggggcctattatgtcgaagggggattaaaagcagcttttgctgttctcaaatggttccagattgagactgaaatcgaggaagagttaattatggaagctctgtcgagtgcttcagtgcgaaactatcttccaaaagttgatgtagttgaattgcttgaagcaaaactaggctacacttttcaaatgaaaggtttgttaatagaggctctcacccactcatcacagcaagaatctggagcaacatactgctaccaacgcttggagttccttggtgatgcagtcttggatattttaataactcgccatctgttccttagtcataaagacacagatgagggggagctgacagatttacggtctgcatcagtaaataatgagaattttgcacaagttgcggtaaagcacaatctccatcagtttctacaacattcttcggggttcttacaagaccaaattactgaatatgtgaatagtcttgaaagttcgtccatggacagagccagccttttatccagtggaccatgtagggggccaaaatttggcgggtttttaaacctcttctttcaccaattgtcacacctgagaatttggagttgccccgattcagagaacttaatgagtggtctgacaagaatgggtactttattggaattaagtgtgaaaatcgaggagacagcacaatggctatccttaacttacaactcaaggatttgcttcttgtgaggcaaggttgtgggaagaataaagtagatgcgaaagcacatgcagcttccttattgcttagggatctagaggaaaaaggacttataattccaaggaatgcaagcagagtggaacaacttgaaaagaattctggtactgtaaaacattgcaacaacgtgcttgatgttatggacacacaaaacgtagcaccacctaggcaaaaggaagtagctgtgttaagtaccaccactcctggctctgttcttgataagccattggttgtgaaggttaagttgagcaaaggaggacctcgtatatcattgtacgagtcgtgtaaaaagcttcagtggccaatgccgacctttgaattcgtgaaggtcgaaccaagcgtgtgctcctcttcctgtggttcgtcacaaaaggttgcgccccaaggattcgcatttgcttcgacaataacgttgcatataccgaacggcgatgtcatcagcctcacaggagatgggcgtgcggataagaagagctcacaggattctgctgcgttgctcatgctctatgagctgcagcggcaacgtagattccaagttcaagaagtatgaggaatcacctcgtggttccatcaccaaagatgcaatgttaccgccaccggcgattattgcttgggcatcttggagtaatgtcaccgccaaatcagtctttagtcgtcagccgcacgggggtgtaagaaaataatgtacttcattctgattctaaattataagacaccccgaattatgtaatctaattatcataatgtcctataatttgaaatggagcggtgttggttactctcgttcccgtctgatggattcagacatttcatctgtacacattaggttctggtgcatgttaaaagagcctggaagggcactgcttacgtccgccgtggtcgtgatgtgtgtacacgtgcagtaataagattttaacaggaaattgctatcttg

SEQ ID NO: 31029 - DNA, 5623 bp, Zea Mays
gcttgctctcgcccctgccttctcctctcctctgggtgttcccggcggtttcttcgccgctcaagccgcctccactctccctgccgcgctagcaactacgtttcggacttccccgctcgactttcgacctcccctgccgccaacaccgcccaaccgccgtcctccaccaccctcggccggcggcgccccgccttgccggaggcggagcagacgacgcgtggcagccgattccgcgatggatgcatccactgccggcgatggagacacgaatactttgaagaggccatgcaaaacatcgcctccagaaggcgaaacagacaagtataaacggcagaagagggaatgccaggatttctctcccagaaggtaccagcttgatgtctatgaggttgctacgaggcacaacacaattgcgatgcttgacacgggagctgggaagacaatgattgctgtcatgctcatcaagcattttgggaagatcaacaaagcaaacaatgatcgaaagctcatcatattccttgcaccaactgttcaactcgtcacacagcaatgcgaggttattaagagctacactgattttgaggtggagcattatcatggtgcaaagggtgttgatcaatggaaggctcatagctggcaacagcaactcttaaagtatcaggttatggtcatgacaccacaggtgttgctagacgctttacgccaagctttcttgatcttggacatggttagtctcatgatatttgatgaatgccatcacgcaactggtaaccacccatatactaggataatgaaggagttctatcatggatcagagcataagccaaatgtgttcggtatgacagcctctcctatcataagaaaaggggtctcctctgatttggattgcaaaaatcagctatctgagctggaaaatattttagattccaagatacactctgtggtggatagagaagagatagaactttgtgttccttctgcaaaagaagtgaatagatactatgagccaagaactgtttcttttgacgatttaagtgaagaactggaaattttgtgttccaagtatgatgggctgatcatacaattgcataacagatcgaccaatcagtacaaagatgctgatgaaataacaaaagaatcacggaaacgtctctcaaattctttagcaaagatttgctattgcctagaagatgctggtcttctttgtgctagtgaggctactaaaatctgcattgaaaggggccagagaaaaggttggctgaaggggggcagtgacaccactgatcagcaaagtggtcaaaatggacctatcctgtttgcagaaatttcaatgcttcatatggagttttttcaggaagtgttggatataatcggcaaacgcgtccaacagcaacaaggaattgatgcccttctgaactcagagcgtggatgtgtggaagcaaaaaatatgggctatatttcaccaaagctctatgagctcatgcaagtatttctctctttcagtgaccctgataacgttagatgccttgtttttgtggatcgaaagattagtgctagagtcattgagcggacgatgaagaaaataggccaactctcctgtttcagagtctcttttctaactggagggagttcttcagtggatgcactcacccctaaaatgcaaaaggatacactggattcgttccgctctggaaaggtcaacttactgtttactacagatgttgcagaagagggtatacatattccagactgctcgtgtgtaataagatttgatttgccgagaactacccgcagctatgtccaatcacgtggacgagcccgacagagggactctcagtacatactaatgattgaacagggaaatgtgaaacaagatgatttgatatctgggattatgagaagtaaggcctcgatgactgggattgcttcaaaccgagagcctgaggattcacaccccagtttcttacccactgaagaaataaatgaataccatataagcaaaacaggagccaaaataactactgattctagcatcagtgttctcaaccagtactgtgataagctcccgaaggacaagtactacaccccaaggcccaagtttcagttcactcattacggtgatggttatgagtgtactgtaacactaccatccagtgccatgtttcaacttttggtaggtcaaaaagcaagaaacatgcagaaagcaaagcagcttgtttgccttgatgcatgtaagaggctgcatcagctcggagcacttgatgaccatctttctccatcagttgaagagccgcctccggaaatttcaagcaagtctagtatctcgacacctggtgcaggtttaggtacaaccaaacggaaagaactgcatggtacaaccaaagttctttccatgtctggctcttggggttcagatagaagtgtgactaaacttcaaggctacaagttgaattttgtttgtgatcaagttggtcaaaaatactctgcctttgtccttttaattgatgctagtatagcaaaagaagctgctactttagatattgatctatatttgcatgacaagatggtaaaagcttcagtttccccttgtggacctcttgagttggatgcttggcagatggaacaaacaaaactatttcaagcacttctctttaatagtttgtttggaaaactgttcattggatcaaaagcatcaaaaaccccaagggagttcattctcaagaaagatgatgtgttcctttggaacaaagaaaatatgtatttgcttttacctgtggattctactctggattctcataaaagtgtttgcatcaactggagtgtaattgatgtagtggctacagctgttggattcatgagaagcatttattcagatggcaaatgtaacctaactgataaacttaattatgaaaaaaatggtgaagatcttattcatttggccaacaagtcatgcaagggtaatgatcttaaaaatatggtggttctagcaattcacactggaaagatctatactattgttgttgtatctgatttatgtgccaatagtaaatttgatggtacaactgacaagaaagaagcaaaattccggacatttgcagaatattttgagaagaagtatagtatatttctttgtcatcctttacaaccattgctagtgttgaaacccacccataatcctcacaatcttctttcctcaaagaatagagatgaagacaatgttgtggaaaataaaaatagggcgaacagccttgttcacatgcctccagagttgctgattccccttgatttacctattgatgttttgagagtattctacttgtttccatctctgatgcatcgtcttgagtcactaatgctagccagccaactaagaagtgaaattgcatacagagattctgatatatcaagcttcgtgattttggaagctatgacaacacttagatgctgtgaggacttctctatggagcgattagagttattgggggactctgttcttaagtatgcagtgagtgcccatcttttcatgacatttcttaataagcatgagggacagttatcgtccagaaggcaagaaacaatatgtaatgccacactttataggcttggtattgaacgcaggatacagggttacatacgtgatgctgcatttgatcctcgtcgatggcttgctcctggacagctgtccagacgtccttgtccttgtgaatgcccagtaaattctgaggttgtaactgaggatattcataggattgatgacaagtctataattataggcaaggcgtgtgacaagggacacagatggatatgttcgaaaaccatctctgattgtgttgaggctctaattggggcctattatgtcgaagggggattaaaagcagcttttgctgttctcaaatggttccagattgagactgaaatcgaggaagagttaattatggaagctctgtcgagtgcttcagtgcgaaactatcttccaaaagttgatgtagttgaattgcttgaagcaaaactaggctacacttttcaaatgaaaggtttgttaatagaggctctcacccactcatcacagcaagaatctggagcaacatactgctaccaacgcttggagttccttggtgatgcagtcttggatattttaataactcgccatctgttccttagtcataaagacacagatgagggggagctgacagatttacggtctgcatcagtaaataatgagaattttgcacaagttgcggtaaagcacaatctccatcagtttctacaacattcttcggggttcttacaagaccaaattactgaatatgtgaatagtcttgaaagttcgtccatggacagagccagccttttatccagtggaccatgtagggggccaaaagttttaggtgatattgtagaaagtatagcaggtgctattcttattgacagcaaacttgatttggatttagtttggcgggtttttaaacctcttctttcaccaattgtcacacctgagaatttggagttgccccgattcagagaacttaatgagtggtctgacaagaatgggtactttattggaattaagtgtgaaaatcgaggagacagcacaatggctatccttaacttacaactcaaggatttgcttcttgtgaggcaaggttgtgggaagaataaagtagatgcgaaagcacatgcagcttccttattgcttagggatctagagcatgtattcttgttgtgttagcaggaaaaaggacttataattccaaggaatgcaagcagagtggaacaacttgaaaagaattctggtactgtaaaacattgcaacaacgtgcttgatgttatggacacacaaaacgtagcaccacctaggcaaaaggaagtagctgtgttaagtaccaccactcctggctctgttcttgataagccattggttgtgaaggttaagttgagcaaaggaggacctcgtatatcattgtacgagtcgtgtaaaaagcttcagtggccaatgccgacctttgaattcgtgaaggtcgaaccaagcgtgtgctcctcttcctgtggttcgtcacaaaaggttgcgccccaaggattcgcatttgcttcgacaataacgttgcatataccgaacggcgatgtcatcagcctcacaggagatgggcgtgcggataagaagagctcacaggattctgctgcgttgctcatgctctatgagctgcagcggcaacgtagattccaagttcaagaagtatgaggaatcacctcgtggttccatcaccaaagatgcaatgttaccgccaccggcgattattgcttgggcatcttggagtaatgtcaccgccaaatcagtctttagtcgtcagccgcacgggggtgtaagaaaataatgtacttcattctgattctaaattataagacaccccgaattatgtaatctaattatcataatgtcctataatttgaaatggagcggtgttggttactctcgttcccgtctgatggattcagacatttcatctgtacacattaggttctggtgcatgttaaaagagcctggaagggcactgcttacgtccgccgtggtcgtgatgtgtgtacacgtgcagtaataagattttaacaggaaattgctatcttg

SEQ ID NO: 31030 - DNA, 5418 bp, Zea Mays
gcttgctctcgcccctgccttctcctctcctctgggtgttcccggcggtttcttcgccgctcaagccgcctccactctccctgccgcgctagcaactacgtttcggacttccccgctcgactttcgacctcccctgccgccaacaccgcccaaccgccgtcctccaccaccctcggccggcggcgccccgccttgccggaggcggagcagacgacgcgtggcagccgattccgcgatggatgcatccactgccggcgatggagacacgaatactttgaagaggccatgcaaaacatcgcctccagaaggcgaaacagacaagtataaacggcagaagagggaatgccaggatttctctcccagaaggtaccagcttgatgtctatgaggttgctacgaggcacaacacaattgcgatgcttgacacgggagctgggaagacaatgattgctgtcatgctcatcaagcattttgggaagatcaacaaagcaaacaatgatcgaaagctcatcatattccttgcaccaactgttcaactcgtcacacagcaatgcgaggttattaagagctacactgattttgaggtggagcattatcatggtgcaaagggtgttgatcaatggaaggctcatagctggcaacagcaactcttaaagtatcaggttatggtcatgacaccacaggtgttgctagacgctttacgccaagctttcttgatcttggacatggttagtctcatgatatttgatgaatgccatcacgcaactggtaaccacccatatactaggataatgaaggagttctatcatggatcagagcataagccaaatgtgttcggtatgacagcctctcctatcataagaaaaggggtctcctctgatttggattgcaaaaatcagctatctgagctggaaaatattttagattccaagatacactctgtggtggatagagaagagatagaactttgtgttccttctgcaaaagaagtgaatagatactatgagccaagaactgtttcttttgacgatttaagtgaagaactggaaattttgtgttccaagtatgatgggctgatcatacaattgcataacagatcgaccaatcagtacaaagatgctgatgaaataacaaaagaatcacggaaacgtctctcaaattctttagcaaagatttgctattgcctagaagatgctggtcttctttgtgctagtgaggaattgatgcccttctgaactcagagcgtggatgtgtggaagcaaaaaatatgggctatatttcaccaaagctctatgagctcatgcaagtatttctctctttcagtgaccctgataacgttagatgccttgtttttgtggatcgaaagattagtgctagagtcattgagcggacgatgaagaaaataggccaactctcctgtttcagagtctcttttctaactggagggagttcttcagtggatgcactcacccctaaaatgcaaaaggatacactggattcgttccgctctggaaaggtcaacttactgtttactacagatgttgcagaagagggtatacatattccagactgctcgtgtgtaataagatttgatttgccgagaactacccgcagctatgtccaatcacgtggacgagcccgacagagggactctcagtacatactaatgattgaacagggaaatgtgaaacaagatgatttgatatctgggattatgagaagtaaggcctcgatgactgggattgcttcaaaccgagagcctgaggattcacaccccagtttcttacccactgaagaaataaatgaataccatataagcaaaacaggagccaaaataactactgattctagcatcagtgttctcaaccagtactgtgataagctcccgaaggacaagtactacaccccaaggcccaagtttcagttcactcattacggtgatggttatgagtgtactgtaacactaccatccagtgccatgtttcaacttttggtaggtcaaaaagcaagaaacatgcagaaagcaaagcagcttgtttgccttgatgcatgtaagaggctgcatcagctcggagcacttgatgaccatctttctccatcagttgaagagccgcctccggaaatttcaagcaagtctagtatctcgacacctggtgcaggtttaggtacaaccaaacggaaagaactgcatggtacaaccaaagttctttccatgtctggctcttggggttcagatagaagtgtgactaaacttcaaggctacaagttgaattttgtttgtgatcaagttggtcaaaaatactctgcctttgtccttttaattgatgctagtatagcaaaagaagctgctactttagatattgatctatatttgcatgacaagatggtaaaagcttcagtttccccttgtggacctcttgagttggatgcttggcagatggaacaaacaaaactatttcaagcacttctctttaatagtttgtttggaaaactgttcattggatcaaaagcatcaaaaaccccaagggagttcattctcaagaaagatgatgtgttcctttggaacaaagaaaatatgtatttgcttttacctgtggattctactctggattctcataaaagtgtttgcatcaactggagtgtaattgatgtagtggctacagctgttggattcatgagaagcatttattcagatggcaaatgtaacctaactgataaacttaattatgaaaaaaatggtgaagatcttattcatttggccaacaagtcatgcaagggtaatgatcttaaaaatatggtggttctagcaattcacactggaaagatctatactattgttgttgtatctgatttatgtgccaatagtaaatttgatggtacaactgacaagaaagaagcaaaattccggacatttgcagaatattttgagaagaagtatagtatatttctttgtcatcctttacaaccattgctagtgttgaaacccacccataatcctcacaatcttctttcctcaaagaatagagatgaagacaatgttgtggaaaataaaaatagggcgaacagccttgttcacatgcctccagagttgctgattccccttgatttacctattgatgttttgagagtattctacttgtttccatctctgatgcatcgtcttgagtcactaatgctagccagccaactaagaagtgaaattgcatacagagattctgatatatcaagcttcgtgattttggaagctatgacaacacttagatgctgtgaggacttctctatggagcgattagagttattgggggactctgttcttaagtatgcagtgagtgcccatcttttcatgacatttcttaataagcatgagggacagttatcgtccagaaggcaagaaacaatatgtaatgccacactttataggcttggtattgaacgcaggatacagggttacatacgtgatgctgcatttgatcctcgtcgatggcttgctcctggacagctgtccagacgtccttgtccttgtgaatgcccagtaaattctgaggttgtaactgaggatattcataggattgatgacaagtctataattataggcaaggcgtgtgacaagggacacagatggatatgttcgaaaaccatctctgattgtgttgaggctctaattggggcctattatgtcgaagggggattaaaagcagcttttgctgttctcaaatggttccagattgagactgaaatcgaggaagagttaattatggaagctctgtcgagtgcttcagtgcgaaactatcttccaaaagttgatgtagttgaattgcttgaagcaaaactaggctacacttttcaaatgaaaggtttgttaatagaggctctcacccactcatcacagcaagaatctggagcaacatactgctaccaacgcttggagttccttggtgatgcagtcttggatattttaataactcgccatctgttccttagtcataaagacacagatgagggggagctgacagatttacggtctgcatcagtaaataatgagaattttgcacaagttgcggtaaagcacaatctccatcagtttctacaacattcttcggggttcttacaagaccaaattactgaatatgtgaatagtcttgaaagttcgtccatggacagagccagccttttatccagtggaccatgtagggggccaaaagttttaggtgatattgtagaaagtatagcaggtgctattcttattgacagcaaacttgatttggatttagtttggcgggtttttaaacctcttctttcaccaattgtcacacctgagaatttggagttgccccgattcagagaacttaatgagtggtctgacaagaatgggtactttattggaattaagtgtgaaaatcgaggagacagcacaatggctatccttaacttacaactcaaggatttgcttcttgtgaggcaaggttgtgggaagaataaagtagatgcgaaagcacatgcagcttccttattgcttagggatctagaggaaaaaggacttataattccaaggaatgcaagcagagtggaacaacttgaaaagaattctggtactgtaaaacattgcaacaacgtgcttgatgttatggacacacaaaacgtagcaccacctaggcaaaaggaagtagctgtgttaagtaccaccactcctggctctgttcttgataagccattggttgtgaaggttaagttgagcaaaggaggacctcgtatatcattgtacgagtcgtgtaaaaagcttcagtggccaatgccgacctttgaattcgtgaaggtcgaaccaagcgtgtgctcctcttcctgtggttcgtcacaaaaggttgcgccccaaggattcgcatttgcttcgacaataacgttgcatataccgaacggcgatgtcatcagcctcacaggagatgggcgtgcggataagaagagctcacaggattctgctgcgttgctcatgctctatgagctgcagcggcaacgtagattccaagttcaagaagtatgaggaatcacctcgtggttccatcaccaaagatgcaatgttaccgccaccggcgattattgcttgggcatcttggagtaatgtcaccgccaaatcagtctttagtcgtcagccgcacgggggtgtaagaaaataatgtacttcattctgattctaaattataagacaccccgaattatgtaatctaattatcataatgtcctataatttgaaatggagcggtgttggttactctcgttcccgtctgatggattcagacatttcatctgtacacattaggttctggtgcatgttaaaagagcctggaagggcactgcttacgtccgccgtggtcgtgatgtgtgtacacgtgcagtaataagattttaacaggaaattgctatcttg

SEQ ID NO: 31031 - DNA, 1941 bp, Zea Mays
caaatttgtcacgaatctgatggtatatgtattccctgttaatccaaatttctcacgaatcagatggtatccgtattccctgttgttccctctccgaattcgaccccgccgctaaaccccgcaccggttgccgaggcgtctcccgctccagctccgactctcacgcgactagggttctgtgcgtccacttccccgtcggcgcaatggaggtcaagaagtgaagccaggagccacggtttcttgcaaagttggtgatggcttggttatccacctttcacaggctgcactgggggaatcaaagaaagcgagtgagaatgccattttgtctgttaatattgatgataagaaactagtgcttggaaccttatcagttgagaagcatcctcagatctcttgtgatcttgtatttgataaggattttgagctaccacacaattcaaaaacacgtagcgttttcttccgtggctacaagtcccctgttcctctgtttgagtctaattctggtgaagatagttccgatgaagagctaaaaaccgatcaaattccattgcagaataatgaaattaaaatttctgcggcaaaggttcctgcgaaggatgatgatgatgatgttttcattattctagcgatgatgatgatgatttatagcagtgatgatgatgatgatgatttcactactagtgatagtgataatgaaatgtctgaggaagatgactccagtgatgaagatgaaatgtctgaggaagatgactccagtgatgaagatgaaatgtcaggtggtgctgatcctagtgatgattccagtgatgaatctggttcagaacatacttctgccccaaagaagactgatgtagtagttggcaagaagagagcaatcaaagctgaggcaccttatggtaagaaggctaagtctgaacaatcttctcagaaaacaggtgagctactacttttatgttcttataaagcccaactaaaaacaggtgagctactacttttatgtagactatcttcagtagacgaccatatctcactctctatttcaaacttcactctgcaaacagtgcaatctacagtataaaacaatattttacacggcctgctggagatggccttaaagcccaactaatggatgtgtaacgttaacatgtgaattgaactcttttttgtccttacaaagaccactctttttatgttcttataaagcccaaactctaagggatgtgtaaggttaacatgtgaatgtttaactatattttcgtttacctaaggtgacaaggcttcaacttctcatcctgcaaagcagtccatcaagactcctgcagacaaatctaggaagacccccacagctgacaagaaatcccccaaatctgggagccatggctgcaagtaacgcaacaaatctttcagcagtgcgtcagcactttagtcccatcagaagccaaaaaagcatgaagcctagaggagcatgtgctgtaccttataggttgatctacttgaattatcaaaatcagtggtcttatttttgaacttgaaaatatcaagtttggaacttgcctagtagttatgcgattagtggtcttactatttttaaacttaggaaatctcaagtttggaacatacctggtatgtcttgttaataacatggcaaatagctaacaatgggaaacgtcaaaggttggcccagtattggtcgtggttgaatgatgctaatgtttgaattgagtatgtgacccgtaagggagaatctttgctatctggtagtggcctaacgaagaccagagcatataaggctgcccgcagtggaggactgggtgctggactctatcccatatagcgtaaagaaacacctacagcgggtgactgggtgctagactctaagcgtgatcgagctgcaaatatagagttcggacgcacatgcgctaaacgaggcatgcaagcaag

SEQ ID NO: 31032 - DNA, 1759 bp, Zea Mays
cggtttctcaaccactgctcccctctggtcaagaagtgaagccaggagccacggtttcttgcaaagttggtgatggcttggttatccacctttcacaggctgcactgggggaatcaaagaaagcgagtgagaatgccattttgtctgttaatattgatgataagaaactagtgcttggaaccttatcagttgagaagcatcctcagatctcttgtgatcttgtatttgataaggattttgagctaccacacaattcaaaaacacgtagcgttttcttccgtggctacaagtcccctgttcctctgtttgagtctaattctggtgaagatagttccgatgaagagctaaaaaccgatcaaattccattgcagaataatgaaattaaaatttctgcggcaaaggttcctgcgaaggatgatgatgatgatgttttcattattctagcgatgatgatgatgatttatagcagtgatgatgatgatgatgatttcactactagtgatagtgataatgaaatgtctgaggaagatgactccagtgatgaagatgaaatgtctgaggaagatgactccagtgatgaagatgaaatgtcaggtggtgctgatcctagtgatgattccagtgatgaatctggttcagaacatacttctgccccaaagaagactgatgtagtagttggcaagaagagagcaatcaaagctgaggcaccttatggtaagaaggctaagtctgaacaatcttctcagaaaacaggtgagctactacttttatgttcttataaagcccaactaaaaacaggtgagctactacttttatgtagactatcttcagtagacgaccatatctcactctctatttcaaacttcactctgcaaacagtgcaatctacagtataaaacaatattttacacggcctgctggagatggccttaaagcccaactaatggatgtgtaacgttaacatgtgaattgaactcttttttgtccttacaaagaccactctttttatgttcttataaagcccaaactctaagggatgtgtaaggttaacatgtgaatgtttaactatattttcgtttacctaaggtgacaaggcttcaacttctcatcctgcaaagcagtccatcaagactcctgcagacaaatctaggaagacccccacagctgacaagaaatcccccaaatctgggagccatggctgcaagtaacgcaacaaatctttcagcagtgcgtcagcactttagtcccatcagaagccaaaaaagcatgaagcctagaggagcatgtgctgtaccttataggttgatctacttgaattatcaaaatcagtggtcttatttttgaacttgaaaatatcaagtttggaacttgcctagtagttatgcgattagtggtcttactatttttaaacttaggaaatctcaagtttggaacatacctggtatgtcttgttaataacatggcaaatagctaacaatgggaaacgtcaaaggttggcccagtattggtcgtggttgaatgatgctaatgtttgaattgagtatgtgacccgtaagggagaatctttgctatctggtagtggcctaacgaagaccagagcatataaggctgcccgcagtggaggactgggtgctggactctatcccatatagcgtaaagaaacacctacagcgggtgactgggtgctagactctaagcgtgatcgagctgcaaatatagagttcggacgcacatgcgctaaacgaggcatgcaagcaag

SEQ ID NO: 31033 - DNA, 1719 bp, Zea Mays
ctccggtggtgctgctggaggtttgtcccgctagggcaaagaggcgcgtgagaggtcggagcctgcaccgccgccgccatgctccgcctccaaaaacacctctcccttcgcctgcaagaacatctccttcccctgcaccgctccgcctccctcatacagctctccctccagcgctctctcctctccaccggctccgcgacatattcctctccgggtcacttcgccgccgatgactacctcgtctccacatgtggcctcacccgggagcaagccgcgaatgccgccaagtgcatctcccactggaagtcgtcctccaacgccgacgccgtgctgtccttcctaaccggcccggcgctcggcctctccaatgctgagatcgcgctgctcgtggccaaagacccgcgcgtcctcagctgcagcgtcgacaacaccctgcgggcccgcttggcccgcttccgcagtcatggcttctccgccgcgcagatcagcgaattcgtccgcgtggccccctgcttctttcgcaaattcaacatcgacgtgaagctcggcttctggatgcccttcctcggctcgcccgacaggttcctccgcctcgtcaagcgtaacttctacctcctcagctccgacctcgacaaggtggtgaagcccaacatccagctgctccaggagtgcggtctatctatccaggagattgggagcctgtgcgtggctaacccgaggctgctcaccagcaagccggacagaatcagggccgtcctcgtgcgtgccggtgagatgggcgtgccccgcaagacgcttttgttcaggcacgctgtgaccgcggtggcgggcctctgtccggagacctttgcatctaagctcaagatgatggccaatattctcgggtgctcagaggctgaggttgccagaatggtgcaaaagaacccgttggtgctgaggcgctccatggagacgattcagcgcgcctgtgagttcctgatcaatgtggtcggtgtcggtaccaacttcattctggacaagcccacaatcctgatgtacagtctggaacgccggctggtgccccggcattacgtgatgaaggtgctccaggacaaaggattgatgcgaaaagatcatagcttctacactttggccgcgattagtgctagcgtgttctgctccagcaaactggctatatgggcagcagctgcagttgtatcttgcatgtcattcttaacacattcagataccctgatgtgtactctgcgaggctgcagctccgtacttggctcatagcttcagaattgcagaaattcagcataacaagtttaagaactcatgaatgaccaaagcacgatgttgtcaatttcatataccttgtttaggattctggcgatgaattttatcgtgtttcaactcatgctactggcacgcagaatgatatggttcggttcagaaattctgccatggttatgtttttatggtgatcatcaacgaactatggatctgttagcattttcactaaccagcaacgtcctctaaattctatttccgtcctatacaacacgctctaaaagattctatcctccgtatctttttcattgcagcaacgtcctttaaattcagtcctctatatctacagtataccggattttataatacacattgtttttacatgtcgcttatagaaaaattaattatgtatgttgcgattattttatatacaaattactcatcagt

SEQ ID NO: 31034 - DNA, 1245 bp, Zea Mays
ctccggtggtgctgctggaggtttgtcccgctagggcaaagaggcgcgtgagaggtcggagcctgcaccgccgccgccatgctccgcctccaaaaacacctctcccttcgcctgcaagaacatctccttcccctgcaccgctccgcctccctcatacagctctccctccagcgctctctcctctccaccggctccgcgacatattcctctccgggtcacttcgccgccgatgactacctcgtctccacatgtggcctcacccgggagcaagccgcgaatgccgccaagtgcatctcccactggaagtcgtcctccaacgccgacgccgtgctgtccttcctaaccggcccggcgctcggcctctccaatgctgagatcgcgctgctcgtggccaaagacccgcgcgtcctcagctgcagcgtcgacaacaccctgcgggcccgcttggcccgcttccgcagtcatggcttctccgccgcgcagatcagcgaattcgtccgcgtggccccctgcttctttcgcaaattcaacatcgacgtgaagctcggcttctggatgcccttcctcggctcgcccgacaggttcctccgcctcgtcaagcgtaacttctacctcctcagctccgacctcgacaaggtggtgaagcccaacatccagctgctccaggagtgcggtctatctatccaggagattgggagcctgtgcgtggctaacccgaggctgctcaccagcaagccggacagaatcagggccgtcctcgtgcgtgccggtgagatgggcgtgccccgcaagacgcttttgttcaggcacgctgtgaccgcggtggcgggcctctgtccggagacctttgcatctaagctcaagatgatggccaatattctcgggtgctcagaggctgaggttgccagaatggtgcaaaagaacccgttggtgctgaggcgctccatggagacgattcagcgcgcctgtgagttcctgatcaatgtggtcggtgtcggtaccaacttcattctggacaagcccacaatcctgatgtacagtctggaacgccggctggtgccccggcattacgtgatgaaggtgctccaggacaaaggattgatgcgaaaagatcatagcttctacactttggccgcgattagtgctagcgtgttctgctccaggttgctgctggtgccgatgacggacgtctcatcttttaaatttggagtacataatcatttcgcgttcgttgctggagacagc

SEQ ID NO: 31035 - DNA, 1138 bp, Zea Mays
gtcacatggaacctaacagctcattttgtaaatttttcggagataatgtccaagaacatggcacagtcaaggaaagaggctgcatttgctctttcagcattgatggagataccacaacagtataaagcaaccgtggaattaggaaatttaggtcgtcgctcttccaagtctcccaacagagttcctctacctccgccttccgcaagtcatgatgcttattcctattcatctaaaagctttagcaaaccaactacctaccctcagagttcttcatcctcatcagcctatcctcaatatggaactccacatacagccaccccggccgcaccttcgtccacttatgacaaccaggtctgtcctatctgtcttgtgaaccccaaagacatggcgtttggctgtggacaccagacctgctgtgactgcggacagagtctcgagtcgtgtccaatctgtcgcactcccatcaccacaagaataaagctatactagcaagtggtggctttggatcattgccaatgggtggtatactggagccaccctgcctcacactggaggatcgcgacggcatgtcccagtaaccgtcggaacacccgctccgtagatcgattggagctaaggattgcagggccaagcttggatcgattggagctgaggattgcagcgttggtctatcggacagggttgccccagtattcatatccacgagtaatgatccaaatcgcagcttgcaaaaaacaatctctatataaacgagaagaaagagagaggagaacacaaaggtagtggtgtggtggagcagtcaattgcgtgtcgggccatgacacgcaacttcccttggtgccttcgttacttgtcaaaccagcaacactagttgtacatatcagaatttcgtgcttatctggacttctgatgccaggcttagaggattctttatttgtgcgcgtacttttagtttcgtccgagatatatgttgatttgttctttgcttgcaattgtgtaaaaaattcaatccgcaaaattttgttttggtgaatcagaaaaaaaaagtatttggtagaaatagaaaaacgaaatcttaaatttacaataaagagaagaatggatgttatgctcaccttactggcttactccaacggag

SEQ ID NO: 31036 - DNA, 1867 bp, Zea Mays
gggtttgttattttcactcaaaccccagcatctcctcccagccggcagcacctaacccgtcacgagcgcaccgccgcacgttccggattccccaccgccgccgggatcccgaccggatccctaattccaaggggtaaacgatgaggccgcacgcggtggggacgggcggcggtggcgtggggaggcggaaggcgggggccgccgctgctgccgcaagccgggagtggatggtggtgccggcgtcgggtccggctcgggtggaggaagccgggaagcacgcggtgatggcgcgtacagggcttcccgcgcgcgatctcagggtactcgacccgttactctcgtacccgtccacgatcctgggccgcgagcgcgccatcgtcgtcaacctggagcgcgtcaaagccctgatcacagccacagaggtgctgcttccaaacaccaaggatcccgcctttgcgcgcttcgtccgcgacctccagacccgtgtcctcgcatcttcgtctgaccagctgagttcactgacatggaaggtgaatcatctaatgttgcttcaccatttcccctaccaagtgcatccaaaggacatgaaatggagatgactaagaagactactgctgttgtgcctgagatgactagtagcagcagtatgcccaatttagctattgcaaaagatggaaacaccaacgttttgcctttcgaatttcgagctcttgaagtgtgccttgagtcagcctgcagatctttggaagatgaaacttctactctggagcaagaggcatatccagcattagatgagctgacatcaaagatcagcacattaaaccttgaacgagttaggcaaatcaagagtcgtctggttgcgatatctggtcgagtacagaaggtgagggatgagctagagcatttactggatgatgaaatggatatggctgaaatgtacttgacagagaagcttactcaacaagaaattagtgaggcttcatctagagctgaggttgatgatccatctcaaacagaagaggatagggatgaagattatagaagtgagccagatggaagcaatgatagctttattggttataagcctaatattgaagaactagagatgcttctagaagcttattttgtgcaaattgatggcacacttaacaagctatcacatggagtacgttgatgacacagaagattatatcaatataatgttggacgacaagcagaatcagctgttgcagatgggagttatgctctcaactgctactgttgtcatcactgctggagtggctgtagttggcctttttggtatgaatattggcatatcactttacgcagacccaacaactgaggaggaaactcgagcagcaaacagaaaattttgggaaactacttttgggaccgttgctggctgcgtgattttgtacatcatagccatgggttggggaaagagaagtggattactgcaatgaggtggaaactcatgcaatgaggtggaaacatgagtgttctgcacccaatgaaaactggtttgacaaaaatctccaagatgagatgttgcattggcatgccgctcaaatacagtacgtcctattccactatgccgggaaagaaacatcttgtgtacgctagtagtaatgtgtgtgaaataaaactattgtacaatttgttgcccctcacctgtcatggcaactcagtaattctgtacctgtttaccacggtagctgcggtttttgctcttgcagttgtaatcatttctgtaactgttgtaactgtatccaccgaactgtaatatgtaaaggaagtatatgagaaagctgcactcttgtctgcatggagatcttgtcattaagctgcaatatttggttccctaact

SEQ ID NO: 31037 - DNA, 1627 bp, Zea Mays
gggtttgttattttcactcaaaccccagcatctcctcccagccggcagcacctaacccgtcacgagcgcaccgccgcacgttccggattccccaccgccgccgggatcccgaccggatccctaattccaaggggtaaacgatgaggccgcacgcggtggggacgggcggcggtggcgtggggaggcggaaggcgggggccgccgctgctgccgcaagccgggagtggatggtggtgccggcgtcgggtccggctcgggtggaggaagccgggaagcacgcggtgatggcgcgtacagggcttcccgcgcgcgatctcagggtactcgacccgttactctcgtacccgtccacgatcctgggccgcgagcgcgccatcgtcgtcaacctggagcgcgtcaaagccctgatcacagccacagaggtgctgcttccaaacaccaaggatcccgcctttgcgcgcttcgtccgcgacctccagacccgtgtcctcgcatcttcgtctgaccagacttctactctggagcaagaggcatatccagcattagatgagctgacatcaaagatcagcacattaaaccttgaacgagttaggcaaatcaagagtcgtctggttgcgatatctggtcgagtacagaaggtgagggatgagctagagcatttactggatgatgaaatggatatggctgaaatgtacttgacagagaagcttactcaacaagaaattagtgaggcttcatctagagctgaggttgatgatccatctcaaacagaagaggatagggatgaagattatagaagtgagccagatggaagcaatgatagctttattggttataagcctaatattgaagaactagagatgcttctagaagcttattttgtgcaaattgatggcacacttaacaagctatcacatcttagggagtacgttgatgacacagaagattatatcaatataatgttggacgacaagcagaatcagctgttgcagatgggagttatgctctcaactgctactgttgtcatcactgctggagtggctgtagttggcctttttggtatgaatattggcatatcactttacgcagacccaacaactgaggaggaaactcgagcagcaaacagaaaattttgggaaactacttttgggaccgttgctggctgcgtgattttgtacatcatagccatgggttggggaaagagaagtggattactgcaatgaggtggaaactcatgcaatgaggtggaaacatgagtgttctgcacccaatgaaaactggtttgacaaaaatctccaagatgagatgttgcattggcatgccgctcaaatacagtacgtcctattccactatgccgggaaagaaacatcttgtgtacgctagtagtaatgtgtgtgaaataaaactattgtacaatttgttgcccctcacctgtcatggcaactcagtaattctgtacctgtttaccacggtagctgcggtttttgctcttgcagttgtaatcatttctgtaactgttgtaactgtatccaccgaactgtaatatgtaaaggaagtatatgagaaagctgcactcttgtctgcatggagatcttgtcattaagctgcaatatttggttccctaact

SEQ ID NO: 31038 - DNA, 1872 bp, Zea Mays
gggtttgttattttcactcaaaccccagcatctcctcccagccggcagcacctaacccgtcacgagcgcaccgccgcacgttccggattccccaccgccgccgggatcccgaccggatccctaattccaaggggtaaacgatgaggccgcacgcggtggggacgggcggcggtggcgtggggaggcggaaggcgggggccgccgctgctgccgcaagccgggagtggatggtggtgccggcgtcgggtccggctcgggtggaggaagccgggaagcacgcggtgatggcgcgtacagggcttcccgcgcgcgatctcagggtactcgacccgttactctcgtacccgtccacgatcctgggccgcgagcgcgccatcgtcgtcaacctggagcgcgtcaaagccctgatcacagccacagaggtgctgcttccaaacaccaaggatcccgcctttgcgcgcttcgtccgcgacctccagacccgtgtcctcgcatcttcgtctgaccagctgagttcactgacatggaaggtgaatcatctaatgttgcttcaccatttcccctaccaagtgcatccaaaggacatgaaatggagatgactaagaagactactgctgttgtgcctgagatgactagtagcagcagtatgcccaatttagctattgcaaaagatggaaacaccaacgttttgcctttcgaatttcgagctcttgaagtgtgccttgagtcagcctgcagatctttggaagatgaaacttctactctggagcaagaggcatatccagcattagatgagctgacatcaaagatcagcacattaaaccttgaacgagttaggcaaatcaagagtcgtctggttgcgatatctggtcgagtacagaaggtgagggatgagctagagcatttactggatgatgaaatggatatggctgaaatgtacttgacagagaagcttactcaacaagaaattagtgaggcttcatctagagctgaggttgatgatccatctcaaacagaagaggatagggatgaagattatagaagtgagccagatggaagcaatgatagctttattggttataagcctaatattgaagaactagagatgcttctagaagcttattttgtgcaaattgatggcacacttaacaagctatcacatcttagggagtacgttgatgacacagaagattatatcaatataatgttggacgacaagcagaatcagctgttgcagatgggagttatgctctcaactgctactgttgtcatcactgctggagtggctgtagttggcctttttggtatgaatattggcatatcactttacgcagacccaacaactgaggaggaaactcgagcagcaaacagaaaattttgggaaactacttttgggaccgttgctggctgcgtgattttgtacatcatagccatgggttggggaaagagaagtggattactgcaatgaggtggaaactcatgcaatgaggtggaaacatgagtgttctgcacccaatgaaaactggtttgacaaaaatctccaagatgagatgttgcattggcatgccgctcaaatacagtacgtcctattccactatgccgggaaagaaacatcttgtgtacgctagtagtaatgtgtgtgaaataaaactattgtacaatttgttgcccctcacctgtcatggcaactcagtaattctgtacctgtttaccacggtagctgcggtttttgctcttgcagttgtaatcatttctgtaactgttgtaactgtatccaccgaactgtaatatgtaaaggaagtatatgagaaagctgcactcttgtctgcatggagatcttgtcattaagctgcaatatttggttccctaact

SEQ ID NO: 31039 - DNA, 1871 bp, Zea Mays
gggtttgttattttcactcaaaccccagcatctcctcccagccggcagcacctaacccgtcacgagcgcaccgccgcacgttccggattccccaccgccgccgggatcccgaccggatccctaattccaaggggtaaacgatgaggccgcacgcggtggggacgggcggcggtggcgtggggaggcggaaggcgggggccgccgctgctgccgcaagccgggagtggatggtggtgccggcgtcgggtccggctcgggtggaggaagccgggaagcacgcggtgatggcgcgtacagggcttcccgcgcgcgatctcagggtactcgacccgttactctcgtacccgtccacgatcctgggccgcgagcgcgccatcgtcgtcaacctggagcgcgtcaaagccctgatcacagccacagaggtgctgcttccaaacaccaaggatcccgcctttgcgcgcttcgtccgcgacctccagacccgtgtcctcgcatcttcgtctgaccaggcagctgagttcactgacatggaaggtgaatcatctaatgttgcttcaccatttcccctaccaagtgcatccaaaggacatgaaatggagatgactaagaagactactgctgttgtgcctgagatgactagtagcagcagtatgcccaatttagctattgcaaaagatggaaacaccaacgttttgcctttcgaatttcgagctcttgaagtgtgccttgagtcagcctgcagatctttggaagatgaaacttctactctggagcaagaggcatatccagcattagatgagctgacatcaaagatcagcacattaaaccttgaacgagttaggcaaatcaagagtcgtctggttgcgatatctggtcgagtacagaaggtgagggatgagctagagcatttactggatgatgaaatggatatggctgaaatgtacttgacagagaagcttactcaacaagaaattagtgaggcttcatctagagctgaggttgatgatccatctcaaacagaagaggatagggatgaagattatagaagtgagccagatggaagcaatgatagctttattggttataagcctaatattgaagaactagagatgcttctagaagcttattttgtgcaaattgatggcacacttaacaagctatcacatggagtacgttgatgacacagaagattatatcaatataatgttggacgacaagcagaatcagctgttgcagatgggagttatgctctcaactgctactgttgtcatcactgctggagtggctgtagttggcctttttggtatgaatattggcatatcactttacgcagacccaacaactgaggaggaaactcgagcagcaaacagaaaattttgggaaactacttttgggaccgttgctggctgcgtgattttgtacatcatagccatgggttggggaaagagaagtggattactgcaatgaggtggaaactcatgcaatgaggtggaaacatgagtgttctgcacccaatgaaaactggtttgacaaaaatctccaagatgagatgttgcattggcatgccgctcaaatacagtacgtcctattccactatgccgggaaagaaacatcttgtgtacgctagtagtaatgtgtgtgaaataaaactattgtacaatttgttgcccctcacctgtcatggcaactcagtaattctgtacctgtttaccacggtagctgcggtttttgctcttgcagttgtaatcatttctgtaactgttgtaactgtatccaccgaactgtaatatgtaaaggaagtatatgagaaagctgcactcttgtctgcatggagatcttgtcattaagctgcaatatttggttccctaact

SEQ ID NO: 31040 - DNA, 1547 bp, Zea Mays
gccgcacacggcacatctcagcgcctcgcctccaccagtccacctccacaacgtcaccttcacctcctcgccgccagacgcgcccgccgccaccccgtgagccggcaacctcccaccatctagcctctgcgcccgcccggccaccgggcactggccacgtccggccgacggccgcctgaggcagtgaggcctgaccacgccctcccttctccactttgtgtctgtgcccggtcttggattcgtggttgtctccgccactgatctcctcctagcacggcagcaccccagagccctagcgcaagcctggtgctccagatctccaccctgaccatgtcggggcggagacaggcctggcagtttgcggccgcgctggtcttcttccacggctccgagtacgtcctcgctgccgctttccacggccgccagaacgtcaccgctacttcacttcttattagcaagcagtatgtattggcaatgggttttgcaatgctggaacacctgacagaaattcttattctcccggaagtaaaggagttctggtttgtcagtaatattggccttctaatggttattatcggtgaaattatccgtaaacttgctgtagtgacagctggacgtgccttcacacacgttataagaacttattatgaagatcagcatcaattgatcacgcatggactgtataggtttatgcgccaccctgggtattctggctttcttatatgggcagtaggaacccaggttatgctgtgtaatccattatcaacagttgcattcacattggtcttgtggcgattcttttcaaaacggataccgtatgaagaatttttcttgaagcagttctttggctctgaatacgatgaatatgcacagagagtacactctggaataccatttattaaatgaaaaaagaggatgtaaagggaatgcaggtagagctaatggcccaagctaaaagaatgaatcatgattatcattcgaggcaattcctttatcatatttcatctgctgtattctccaagtgacattttcactgatgtatgctcgataactccaataaaggcataaagcgagagatgctacagctttgttgaatgcaaacaggtttgctcgtgttgaattattgtaaggccgcgcatagcagagcgtgcatatgttgaattattgttgaatgcaaacattgttttgtaccgtagactatattgtttacagagtagagtttgaaatagattagagtttgaaatagagtaaagtttgaaatagagtagagtttgaaatagtgagtaagataggagatgagatagagaggctgctggagatagcctatcgtattacaagtgcagaaacttgctccagcttgcttgggacaaaagaatctgatgccatttttgttgttattccagaacagcacaactcaactatcagggtttttttatctggttataagctgttgttttgtactgagatttcattgttcacttgaagaaacccttgctgggagagcagaatgcatggtgctgtttaagtgatcccgtgttatatttact

SEQ ID NO: 31041 - DNA, 991 bp, Zea Mays
gttacaacgctttaccacctcagtagcgcttaaaaggcgcttaagcgcctttttaataacactgctactttgtgaaaggaaaaatagttttgagatccaccagtaagatttccaataaactatttcttgaaaaatgtggcatgaccacacttcaataaacatatcttgtagtctgtgtactgtggttactagtgaaacagctcatttttgttcttcctttttaaatacagcacacatctggagataggatattcatattgtgttcgtatcaaatgcacatgacccatcacccatctggagtgcacatattaaatctggacccttcgttcaacaattcagcaatcaatgactgaaagaggatgtaaagggaatgcaggtagagctaatggcccaagctaaaagaatgaatcatgattatcattcgaggcaattcctttatcatatttcatctgctgtattctccaagtgacattttcactgatgtatgctcgataactccaataaaggcataaagcgagagatgctacagctttgttgaatgcaaacaggtttgctcgtgttgaattattgtaaggccgcgcatagcagagcgtgcatatgttgaattattgttgaatgcaaacattgttttgtaccgtagactatattgtttacagagtagagtttgaaatagattagagtttgaaatagagtaaagtttgaaatagagtagagtttgaaatagtgagtaagataggagatgagatagagaggctgctggagatagcctatcgtattacaagtgcagaaacttgctccagcttgcttgggacaaaagaatctgatgccatttttgttgttattccagaacagcacaactcaactatcagggtttttttatctggttataagctgttgttttgtactgagatttcattgttcacttgaagaaacccttgctgggagagcagaatgcatggtgctgtttaagtgatcccgtgttatatttact

SEQ ID NO: 31042 - DNA, 660 bp, Zea Mays
cagacatgggataaaacgaactcagaggatgtaaagggaatgcaggtagagctaatggcccaagctaaaagaatgaatcatgattatcattcgaggcaattcctttatcatatttcatctgctgtattctccaagtgacattttcactgatgtatgctcgataactccaataaaggcataaagcgagagatgctacagctttgttgaatgcaaacaggtttgctcgtgttgaattattgtaaggccgcgcatagcagagcgtgcatatgttgaattattgttgaatgcaaacattgttttgtaccgtagactatattgtttacagagtagagtttgaaatagattagagtttgaaatagagtaaagtttgaaatagagtagagtttgaaatagtgagtaagataggagatgagatagagaggctgctggagatagcctatcgtattacaagtgcagaaacttgctccagcttgcttgggacaaaagaatctgatgccatttttgttgttattccagaacagcacaactcaactatcagggtttttttatctggttataagctgttgttttgtactgagatttcattgttcacttgaagaaacccttgctgggagagcagaatgcatggtgctgtttaagtgatcccgtgttatatttact

SEQ ID NO: 31043 - DNA, 2230 bp, Zea Mays
gaaaaaggtgcagtaaccgatgcgaaccggcgggcgatctggacggtgcattgctatcggggccaggccaaccggcacgtttccgaagcctcacggacgggacgggtcacgggtgcaccattcttgacgcccacccaaatccatggcgagctcgccgcgatctccgccggcgcctacgccggaattcgagatctctcggcagtcccgcctctttgcggcgctgctactgggctatctgcccaatgaccgcgcgctgtggcctgtggctgtgggagcagaggagctggcaaagaagagaggacagtacgctgctttcaaagtttttgttgcacatatggtatctagtttatggccaccaatgcctgactagatagatcctctcccaaaaatagagaccccgaatcctgaatttgctaaagtgcaaacagaaggccccactacaacgtaaatgcagaacatgttcacaatgggttcctgcacaggtcagagtaacccgagaggagcaccctttaagccttgggaagaccagtgcttggaatcagttttttgagtactcggagattatggagcagattgaccgcgatgtaaagcgcgcccaccctgacatgcatttcttctgtagcgactcgtcttttgcaaagtccaatcaggaatctttgaaaaatgcactgttaatctttgccaagctgaatgctggaataggatatgtacaaggatgaatgaaattctggcaccgctctttgtatttcggagtgatccggatgataaaaatgcttttggtcattactatcttttgttgcataatgctgcctggaatccttgttgaaatttgcggaagcgggttcattgttttgtttcgtcgagctggttagtgggtttagagacaacttctgccagaaactagacaacagtgctgttggagttcgagctacactagctgactagccaagttatcacagcttgtagcaaagcatgatggaggtctccaacaacatttggaaataactacagaagttaatccccagttctatgcgttcagatggataccgttaccgctgacccaggaattcaacttcgcagataccattcacattttgggacacagtattaagtgatcgtgatagcctccaggataccttgctcagaattacctgccaacgaacatcagccataacctctactccgccaacaaattgcagtgcaccgatctcttttgcgcccgaagcgctgctgtgtttgttcagccgggtgtggctgagtcccagcagcattgcaaaaggaatacagaactgaacccttgcggcgacggtttatttatcatgaccattaacctgacgccctgcatgttgtagcctgtacatgttcacctgacaacgatttattgcatcccagttaatcaaggtgaataataaattgtatcctgccatgtttacgctacacctgggacacatacaacagaacagaacagaacagttggcggcaatcacacaacacagtgtagatctcaccattgttggtttgctgctgccattcttctgcactgtacggtttcttttactactgctgaagtatcactacagggatagaactgagaacccatgtatggtgcgcgttagtgtccccccccagaattccataccccagaacagtgctgtgttttggtggagggaggaagggggcagcttcggtgacgccgaaaggctacaccgctacgactggccctttgcccctcgttcccagagctgctcagcttcagcttcacagctccagaagtgccggcgcgcgtgccgcttcctccgcattgggcgatgcccagctggctggcagttggagctgcggacggacgcggccgccggcgcagccgcgctggtgcagggtgttgagatcctcaagccggaaggccggaaccggaagttgtccggaaccggtctcggtgcaagtgacaggcgagctgctgcaccgcagcaccgtcgtcgtcgatacgcgcgcatgaatgctcggcgttgtgttgcccggcgtggcgtcagaaacggatcggcgatggagatggagttgcagttgctcggagggtgcaatgcaagcacaaacaaagcacagcacaagacgaagcaagcaacacatgacacatgcatagtggcatacgggtgcgaccgctagtttgtcttgtcctactcactgccctgccagagagagagtgagtgatgactgatgagggggctgaagaccggcc

SEQ ID NO: 31044 - DNA, 2167 bp, Zea Mays
gaaaaaggtgcagtaaccgatgcgaaccggcgggcgatctggacggtgcattgctatcggggccaggccaaccggcacgtttccgaagcctcacggacgggacgggtcacgggtgcaccattcttgacgcccacccaaatccatggcgagctcgccgcgatctccgccggcgcctacgccggaattcgagatctctcggcagtcccgcctctttgcggcgctgctactgggctatctgcccaatgaccgcgcgctgtggcctgtggctgtgggagcagaggagctggcaaagaagagaggacagtacgctgctttcaaagtttttgttgcacatatggtatctagtttatggccaccaatgcctgactagatagatcctctcccaaaaatagagaccccgaatcctgaatttgctaaagtgcaaacagaaggccccactacaacgtaaatgcagaacatgttcacaatgggttcctgcacaggtcagagtaacccgagaggagcaccctttaagccttgggaagaccagtgcttggaatcagttttttgagtactcggagattatggagcagattgaccgcgatgtaaagcgcgcccaccctgacatgcatttcttctgtagcgactcgtcttttgcaaagtccaatcaggaatctttgaaaaatgcactgttaatctttgccaagctgaatgctggaataggatatgtacaaggatgaatgaaattctggcaccgctctttgtatttcggagtgatccggatgataaaaatgctcgggttcattgttttgtttcgtcgagctggttagtgggtttagagacaacttctgccagaaactagacaacagtgctgttggagttcgagctacactagctgactagccaagttatcacagcttgtagcaaagcatgatggaggtctccaacaacatttggaaataactacagaagttaatccccagttctatgcgttcagatggataccgttaccgctgacccaggaattcaacttcgcagataccattcacattttgggacacagtattaagtgatcgtgatagcctccaggataccttgctcagaattacctgccaacgaacatcagccataacctctactccgccaacaaattgcagtgcaccgatctcttttgcgcccgaagcgctgctgtgtttgttcagccgggtgtggctgagtcccagcagcattgcaaaaggaatacagaactgaacccttgcggcgacggtttatttatcatgaccattaacctgacgccctgcatgttgtagcctgtacatgttcacctgacaacgatttattgcatcccagttaatcaaggtgaataataaattgtatcctgccatgtttacgctacacctgggacacatacaacagaacagaacagaacagttggcggcaatcacacaacacagtgtagatctcaccattgttggtttgctgctgccattcttctgcactgtacggtttcttttactactgctgaagtatcactacagggatagaactgagaacccatgtatggtgcgcgttagtgtccccccccagaattccataccccagaacagtgctgtgttttggtggagggaggaagggggcagcttcggtgacgccgaaaggctacaccgctacgactggccctttgcccctcgttcccagagctgctcagcttcagcttcacagctccagaagtgccggcgcgcgtgccgcttcctccgcattgggcgatgcccagctggctggcagttggagctgcggacggacgcggccgccggcgcagccgcgctggtgcagggtgttgagatcctcaagccggaaggccggaaccggaagttgtccggaaccggtctcggtgcaagtgacaggcgagctgctgcaccgcagcaccgtcgtcgtcgatacgcgcgcatgaatgctcggcgttgtgttgcccggcgtggcgtcagaaacggatcggcgatggagatggagttgcagttgctcggagggtgcaatgcaagcacaaacaaagcacagcacaagacgaagcaagcaacacatgacacatgcatagtggcatacgggtgcgaccgctagtttgtcttgtcctactcactgccctgccagagagagagtgagtgatgactgatgagggggctgaagaccggcc

SEQ ID NO: 31045 - DNA, 2230 bp, Zea Mays
gggcgatctggacggtgcattgctatcggggccaggccaaccggcacgtttccgaagcctcacggacgggacgggtcacgggtgcaccattcttgacgcccacccaaatccatggcgagctcgccgcgatctccgccggcgcctacgccggaattcgagatctctcggcagtcccgcctctttgcggcgttgtccaagaaggtgatataggtctcgatgaactgaggatgctggcggctcagggagtccagacgcggcgggcgtccaggcgaccgtgtggaagctgctactgggctatctgcccaatgaccgcgcgctgtggcctgtggctgtgggagcagaggagctggcaaagaagagaggacagtacgctgctttcaaagtttttgttgcacatatggtatctagtttatggccaccaatgcctgactagatagatcctctcccaaaaatagagaccccgaatcctgaatttgctaaagtgcaaacagaaggccccactacaacgtaaatgcagaacatgttcacaatgggttcctgcacaggtcagagtaacccgagaggagcaccctttaagccttgggaagaccagtgcttggaatcagttttttgagtactcggagattatggagcagattgaccgcgatgtaaagcgcgcccaccctgacatgcatttcttctgtagcgactcgtcttttgcaaagtccaatcaggaatctttgaaaaatgcactgttaatctttgccaagctgaatgctggaataggatatgtacaaggatgaatgaaattctggcaccgctctttgtatttcggagtgatccggatgataaaaatgctcgggttcattgttttgtttcgtcgagctggttagtgggtttagagacaacttctgccagaaactagacaacagtgctgttggagttcgagctacactagctgactagccaagttatcacagcttgtagcaaagcatgatggaggtctccaacaacatttggaaataactacagaagttaatccccagttctatgcgttcagatggataccgttaccgctgacccaggaattcaacttcgcagataccattcacattttgggacacagtattaagtgatcgtgatagcctccaggataccttgctcagaattacctgccaacgaacatcagccataacctctactccgccaacaaattgcagtgcaccgatctcttttgcgcccgaagcgctgctgtgtttgttcagccgggtgtggctgagtcccagcagcattgcaaaaggaatacagaactgaacccttgcggcgacggtttatttatcatgaccattaacctgacgccctgcatgttgtagcctgtacatgttcacctgacaacgatttattgcatcccagttaatcaaggtgaataataaattgtatcctgccatgtttacgctacacctgggacacatacaacagaacagaacagaacagttggcggcaatcacacaacacagtgtagatctcaccattgttggtttgctgctgccattcttctgcactgtacggtttcttttactactgctgaagtatcactacagggatagaactgagaacccatgtatggtgcgcgttagtgtccccccccagaattccataccccagaacagtgctgtgttttggtggagggaggaagggggcagcttcggtgacgccgaaaggctacaccgctacgactggccctttgcccctcgttcccagagctgctcagcttcagcttcacagctccagaagtgccggcgcgcgtgccgcttcctccgcattgggcgatgcccagctggctggcagttggagctgcggacggacgcggccgccggcgcagccgcgctggtgcagggtgttgagatcctcaagccggaaggccggaaccggaagttgtccggaaccggtctcggtgcaagtgacaggcgagctgctgcaccgcagcaccgtcgtcgtcgatacgcgcgcatgaatgctcggcgttgtgttgcccggcgtggcgtcagaaacggatcggcgatggagatggagttgcagttgctcggagggtgcaatgcaagcacaaacaaagcacagcacaagacgaagcaagcaacacatgacacatgcatagtggcatacgggtgcgaccgctagtttgtcttgtcctactcactgccctgccagagagagagtgagtgatgactgatgagggggctgaagaccggcc

SEQ ID NO: 31046 - DNA, 2103 bp, Zea Mays
tgcattgctatcggggccaggccaaccggcacgtttccgaagcctcacggacgggacgggtcacgggtgcaccattcttgacgcccacccaaatccatggcgagctcgccgcgatctccgccggcgcctacgccggaattcgagatctctcggcagtcccgcctctttgcggcgctgctactgggctatctgcccaatgaccgcgcgctgtggcctgtggctgtgggagcagaggagctggcaaagaagagaggacagtacgctgctttcaaagtttatggccaccaatgcctgactagatagatcctctcccaaaaatagagaccccgaatcctgaatttgctaaagtgcaaacagaaggccccactacaacgtaaatgcagaacatgttcacaatgggttcctgcacaggtcagagtaacccgagaggagcaccctttaagccttgggaagaccagtgcttggaatcagttttttgagtactcggagattatggagcagattgaccgcgatgtaaagcgcgcccaccctgacatgcatttcttctgtagcgactcgtcttttgcaaagtccaatcaggaatctttgaaaaatgcactgttaatctttgccaagctgaatgctggaataggatatgtacaaggatgaatgaaattctggcaccgctctttgtatttcggagtgatccggatgataaaaatgctgtatggacgggttcattgttttgtttcgtcgagctggttagtgggtttagagacaacttctgccagaaactagacaacagtgctgttggagttcgagctacactagctgactagccaagttatcacagcttgtagcaaagcatgatggaggtctccaacaacatttggaaataactacagaagttaatccccagttctatgcgttcagatggataccgttaccgctgacccaggaattcaacttcgcagataccattcacattttgggacacagtattaagtgatcgtgatagcctccaggataccttgctcagaattacctgccaacgaacatcagccataacctctactccgccaacaaattgcagtgcaccgatctcttttgcgcccgaagcgctgctgtgtttgttcagccgggtgtggctgagtcccagcagcattgcaaaaggaatacagaactgaacccttgcggcgacggtttatttatcatgaccattaacctgacgccctgcatgttgtagcctgtacatgttcacctgacaacgatttattgcatcccagttaatcaaggtgaataataaattgtatcctgccatgtttacgctacacctgggacacatacaacagaacagaacagaacagttggcggcaatcacacaacacagtgtagatctcaccattgttggtttgctgctgccattcttctgcactgtacggtttcttttactactgctgaagtatcactacagggatagaactgagaacccatgtatggtgcgcgttagtgtccccccccagaattccataccccagaacagtgctgtgttttggtggagggaggaagggggcagcttcggtgacgccgaaaggctacaccgctacgactggccctttgcccctcgttcccagagctgctcagcttcagcttcacagctccagaagtgccggcgcgcgtgccgcttcctccgcattgggcgatgcccagctggctggcagttggagctgcggacggacgcggccgccggcgcagccgcgctggtgcagggtgttgagatcctcaagccggaaggccggaaccggaagttgtccggaaccggtctcggtgcaagtgacaggcgagctgctgcaccgcagcaccgtcgtcgtcgatacgcgcgcatgaatgctcggcgttgtgttgcccggcgtggcgtcagaaacggatcggcgatggagatggagttgcagttgctcggagggtgcaatgcaagcacaaacaaagcacagcacaagacgaagcaagcaacacatgacacatgcatagtggcatacgggtgcgaccgctagtttgtcttgtcctactcactgccctgccagagagagagtgagtgatgactgatgagggggctgaagaccggcc

SEQ ID NO: 31047 - DNA, 2188 bp, Zea Mays
atcggggccaggccaaccggcacgtttccgaagcctcacggacgggacgggtcacgggtgcaccattcttgacgcccacccaaatccatggcgagctcgccgcgatctccgccggcgcctacgccggaattcgagatctctcggcagtcccgcctctttgcggcgttgtccaagaaggtgatataggtctcgatgaactgaggatgctggcggctcagggagtccagacgcggcgggcgtccaggcgaccgtgtggaagctgctactgggctatctgcccaatgaccgcgcgctgtggcctgtggctgtgggagcagaggagctggcaaagaagagaggacagtacgctgctttcaaagtttatggccaccaatgcctgactagatagatcctctcccaaaaatagagaccccgaatcctgaatttgctaaagtgcaaacagaaggccccactacaacgtaaatgcagaacatgttcacaatgggttcctgcacaggtcagagtaacccgagaggagcaccctttaagccttgggaagaccagtgcttggaatcagttttttgagtactcggagattatggagcagattgaccgcgatgtaaagcgcgcccaccctgacatgcatttcttctgtagcgactcgtcttttgcaaagtccaatcaggaatctttgaaaaatgcactgttaatctttgccaagctgaatgctggaataggatatgtacaaggatgaatgaaattctggcaccgctctttgtatttcggagtgatccggatgataaaaatgctgtatggacgggttcattgttttgtttcgtcgagctggttagtgggtttagagacaacttctgccagaaactagacaacagtgctgttggagttcgagctacactagctgactagccaagttatcacagcttgtagcaaagcatgatggaggtctccaacaacatttggaaataactacagaagttaatccccagttctatgcgttcagatggataccgttaccgctgacccaggaattcaacttcgcagataccattcacattttgggacacagtattaagtgatcgtgatagcctccaggataccttgctcagaattacctgccaacgaacatcagccataacctctactccgccaacaaattgcagtgcaccgatctcttttgcgcccgaagcgctgctgtgtttgttcagccgggtgtggctgagtcccagcagcattgcaaaaggaatacagaactgaacccttgcggcgacggtttatttatcatgaccattaacctgacgccctgcatgttgtagcctgtacatgttcacctgacaacgatttattgcatcccagttaatcaaggtgaataataaattgtatcctgccatgtttacgctacacctgggacacatacaacagaacagaacagaacagttggcggcaatcacacaacacagtgtagatctcaccattgttggtttgctgctgccattcttctgcactgtacggtttcttttactactgctgaagtatcactacagggatagaactgagaacccatgtatggtgcgcgttagtgtccccccccagaattccataccccagaacagtgctgtgttttggtggagggaggaagggggcagcttcggtgacgccgaaaggctacaccgctacgactggccctttgcccctcgttcccagagctgctcagcttcagcttcacagctccagaagtgccggcgcgcgtgccgcttcctccgcattgggcgatgcccagctggctggcagttggagctgcggacggacgcggccgccggcgcagccgcgctggtgcagggtgttgagatcctcaagccggaaggccggaaccggaagttgtccggaaccggtctcggtgcaagtgacaggcgagctgctgcaccgcagcaccgtcgtcgtcgatacgcgcgcatgaatgctcggcgttgtgttgcccggcgtggcgtcagaaacggatcggcgatggagatggagttgcagttgctcggagggtgcaatgcaagcacaaacaaagcacagcacaagacgaagcaagcaacacatgacacatgcatagtggcatacgggtgcgaccgctagtttgtcttgtcctactcactgccctgccagagagagagtgagtgatgactgatgagggggctgaagaccggcc

SEQ ID NO: 31048 - DNA, 2045 bp, Zea Mays
atcggggccaggccaaccggcacgtttccgaagcctcacggacgggacgggtcacgggtgcaccattcttgacgcccacccaaatccatggcgagctcgccgcgatctccgccggcgcctacgccggaattcgagatctctcggcagtcccgcctctttgcggcgctgctactgggctatctgcccaatgaccgcgcgctgtggcctgtggctgtgggagcagaggagctggcaaagaagagaggacagtacgctgctttcaaaggcgagttccttagaaacccttactcggagattatggagcagattgaccgcgatgtaaagcgcgcccaccctgacatgcatttcttctgtagcgactcgtcttttgcaaagtccaatcaggaatctttgaaaaatgcactgttaatctttgccaagctgaatgctggaataggatatgtacaaggatgaatgaaattctggcaccgctctttgtatttcggagtgatccggatgataaaaatgctgtatggagtaagagattgtttttaccaagttcttagtgccctacatatagtactgctgatagccgaagctttcctgttcagtttggtcattactatcttttgttgcataatgctgcctggaatccttgttgaaatttgcggaagcgggttcattgttttgtttcgtcgagctggttagtgggtttagagacaacttctgccagaaactagacaacagtgctgttggagttcgagctacactagctgactagccaagttatcacagcttgtagcaaagcatgatggaggtctccaacaacatttggaaataactacagaagttaatccccagttctatgcgttcagatggataccgttaccgctgacccaggaattcaacttcgcagataccattcacattttgggacacagtattaagtgatcgtgatagcctccaggataccttgctcagaattacctgccaacgaacatcagccataacctctactccgccaacaaattgcagtgcaccgatctcttttgcgcccgaagcgctgctgtgtttgttcagccgggtgtggctgagtcccagcagcattgcaaaaggaatacagaactgaacccttgcggcgacggtttatttatcatgaccattaacctgacgccctgcatgttgtagcctgtacatgttcacctgacaacgatttattgcatcccagttaatcaaggtgaataataaattgtatcctgccatgtttacgctacacctgggacacatacaacagaacagaacagaacagttggcggcaatcacacaacacagtgtagatctcaccattgttggtttgctgctgccattcttctgcactgtacggtttcttttactactgctgaagtatcactacagggatagaactgagaacccatgtatggtgcgcgttagtgtccccccccagaattccataccccagaacagtgctgtgttttggtggagggaggaagggggcagcttcggtgacgccgaaaggctacaccgctacgactggccctttgcccctcgttcccagagctgctcagcttcagcttcacagctccagaagtgccggcgcgcgtgccgcttcctccgcattgggcgatgcccagctggctggcagttggagctgcggacggacgcggccgccggcgcagccgcgctggtgcagggtgttgagatcctcaagccggaaggccggaaccggaagttgtccggaaccggtctcggtgcaagtgacaggcgagctgctgcaccgcagcaccgtcgtcgtcgatacgcgcgcatgaatgctcggcgttgtgttgcccggcgtggcgtcagaaacggatcggcgatggagatggagttgcagttgctcggagggtgcaatgcaagcacaaacaaagcacagcacaagacgaagcaagcaacacatgacacatgcatagtggcatacgggtgcgaccgctagtttgtcttgtcctactcactgccctgccagagagagagtgagtgatgactgatgagggggctgaagaccggcc

SEQ ID NO: 31049 - DNA, 2181 bp, Zea Mays
atcggggccaggccaaccggcacgtttccgaagcctcacggacgggacgggtcacgggtgcaccattcttgacgcccacccaaatccatggcgagctcgccgcgatctccgccggcgcctacgccggaattcgagatctctcggcagtcccgcctctttgcggcgttgtccaagaaggtgatataggtctcgatgaactgaggatgctggcggctcagggagtccagacgcggcgggcgtccaggcgaccgtgtggaagctgctactgggctatctgcccaatgaccgcgcgctgtggcctgtggctgtgggagcagaggagctggcaaagaagagaggacagtacgctgctttcaaagtttatggccaccaatgcctgactagatagatcctctcccaaaaatagagaccccgaatcctgaatttgctaaagtgcaaacagaaggccccactacaacgtaaatgcagaacatgttcacaatgggttcctgcacaggtcagagtaacccgagaggagcaccctttaagccttgggaagaccagtgcttggaatcagttttttgagtactcggagattatggagcagattgaccgcgatgtaaagcgcgcccaccctgacatgcatttcttctgtagcgactcgtcttttgcaaagtccaatcaggaatctttgaaaaatgcactgttaatctttgccaagctgaatgctggaataggatatgtacaaggatgaatgaaattctggcaccgctctttgtatttcggagtgatccggatgataaaaatgctcgggttcattgttttgtttcgtcgagctggttagtgggtttagagacaacttctgccagaaactagacaacagtgctgttggagttcgagctacactagctgactagccaagttatcacagcttgtagcaaagcatgatggaggtctccaacaacatttggaaataactacagaagttaatccccagttctatgcgttcagatggataccgttaccgctgacccaggaattcaacttcgcagataccattcacattttgggacacagtattaagtgatcgtgatagcctccaggataccttgctcagaattacctgccaacgaacatcagccataacctctactccgccaacaaattgcagtgcaccgatctcttttgcgcccgaagcgctgctgtgtttgttcagccgggtgtggctgagtcccagcagcattgcaaaaggaatacagaactgaacccttgcggcgacggtttatttatcatgaccattaacctgacgccctgcatgttgtagcctgtacatgttcacctgacaacgatttattgcatcccagttaatcaaggtgaataataaattgtatcctgccatgtttacgctacacctgggacacatacaacagaacagaacagaacagttggcggcaatcacacaacacagtgtagatctcaccattgttggtttgctgctgccattcttctgcactgtacggtttcttttactactgctgaagtatcactacagggatagaactgagaacccatgtatggtgcgcgttagtgtccccccccagaattccataccccagaacagtgctgtgttttggtggagggaggaagggggcagcttcggtgacgccgaaaggctacaccgctacgactggccctttgcccctcgttcccagagctgctcagcttcagcttcacagctccagaagtgccggcgcgcgtgccgcttcctccgcattgggcgatgcccagctggctggcagttggagctgcggacggacgcggccgccggcgcagccgcgctggtgcagggtgttgagatcctcaagccggaaggccggaaccggaagttgtccggaaccggtctcggtgcaagtgacaggcgagctgctgcaccgcagcaccgtcgtcgtcgatacgcgcgcatgaatgctcggcgttgtgttgcccggcgtggcgtcagaaacggatcggcgatggagatggagttgcagttgctcggagggtgcaatgcaagcacaaacaaagcacagcacaagacgaagcaagcaacacatgacacatgcatagtggcatacgggtgcgaccgctagtttgtcttgtcctactcactgccctgccagagagagagtgagtgatgactgatgagggggctgaagaccggcc

SEQ ID NO: 31050 - DNA, 2485 bp, Zea Mays
ccaaaacggcccagctgaaacgaggaccgtaataggcagccgctggtgtgcgtgatgtgatccgggcctgaaagcagtcgcagagctgtcgtgttcctttgctctccccgtccatgcttttgcaaaattgctccagtcaagggctagtccagtgccccctgaacccgcatccggagctcagaaacccccgccaccggagcccggacggagacgatgccggagacccatccgccgccgccgaggccggtgatgctcgccgacctcaactttgaaccagcggagagcgacggcgaggaccgcccaccgacccccgcacccaaccccgccgccgccgccgccgccgctgcggctccggcggtcgccgctgactcgtccacgaagagtggcaatgaagagggtggtttgacaaaaactgtgatcactacaaaggataccgacactgttgaatgtgaagatgttgatcaacattgtcaaggggcttctgctccacgtgaggaaaaagttagcaacctgaaagctgctttggttcatgtggcccgaaaaatgcctaagaatgctcatgcacattttatgttgggtttgatgtatcaaagacttggtcaggcacagaaggcaatagcatcatatgaaaagtcaactgaaatactgctacaagatgaagaagaagtgcggagacctgatttactctcatcagtgaggatacaccacgcacagtgcattttgcaagcaagcatgggggatagttttgatgaagagcttgaaactggtgagttagatgacattctttcgaagttgaagagttcagttgagttagatcacaggcaagcagctgtttggaatatcctaggtttagttcttcttcggggtggtcagatacagagtgctatctcagttctatcttctctcacggctgttgctccagactacttggactcccttgcaaatcttggcgttgcatacattcaaagtgggaagctagagctgtctgcaaagtgctttcaagaacttcttctaaaagatcaaaaccaccccgctgctctggtgaactatgcagttcttcttctgtgtagatatggatctttgtctgcaggggcagggggcaatgtcagcacaggtccttacgtgcatcagaaagaagccttagttgttgcaaaagagtgcttgcttgcagcagtgaaggctgatcctagagctgcatcagtttgggttaatcttgcaaatgcatattacatggatggtgagcataagaactcaaagaggtgcttggagcagttctaaaagaaggagacccttccgcagttgacgccccaattgcatgggctggattggcaatggctcacagggcacaacatgaaattgcagccatctatgatactgaaaacatcaatcttaatgatgcagaagagcgagctcaatatacactaaaacaggcaatccaagaggacccagatgatgctgttcaatggcatcaacttggcctgtacaatatttgcatgacccggttcagcaggtctgtaaattttcttaaagcagccttagcccgttccccagattgcagttatgcttggtcaaatcttggtattgcgttgcaactatcagacgatccatcctctgaaactgtatataagcgggcactggtactatcatcaactcagcagctgcacgcaatcttctctaatcttggaattctttatcggcaacataggaactatgaatttgcaaggaagatgttattaaggtcgttggaactgtgtcctggatttgcaccagctagcaacaacctgggtcttgtatttgtcgctgagggccgttgggaggatgctaaaagctggtttgagaaagctctgcaatctgatcccctgcttgatgcggccaaatcgaacttgttaaaagtcctcacattgtctacgaaacagtagaacaagagaagacctaactcctaaggaaattgccactgaagcctcagagttcagacacggaagcgcggtcaccaaatctctgttctgaagtgtctcaactgccagctcaaaattgatgcttggtgcctctagtctactgctcattgctcacagagtcacaggtgtaggaagtttcagaagtgcggcttcgaagactgcatttgattttgactgagttgctgcctatatgacaatcaaagctgcacaggctccgaagtggctgtgatgtgttcttaaagagtcgcatcagcgcaggaagagcccagattttgaagttcatgtgtagctaaatttcgatataagcttgaacggcttcccttagctgatgtatataaataaatatactccaacttgaggtgtactccaagttgagcatgtgcaagttataggttcagtgttccagagcaacttatggttctgtgcggtgaaactaacagcatctaaacctcaaatttggcagcaatttcactttggagtcaaaagggcgtcctacgagtgtataaaaatggagacgttaactgattaac

SEQ ID NO: 31051 - DNA, 2502 bp, Zea Mays
ccgggcctgaaagcagtcgcagagctgtcgtgttcctttgctctccccgtccatgcttttgcaaaattgctccagtcaagggctagtccagtgccccctgaacccgcatccggagctcagaaacccccgccaccggagcccggacggagacgatgccggagacccatccgccgccgccgaggccggtgatgctcgccgacctcaactttgaaccagcggagagcgacggcgaggaccgcccaccgacccccgcacccaaccccgccgccgccgccgccgccgctgcggctccggcggtcgccgctgactcgtccacgaagagtggcaatgaagagggtggtttgacaaaaactgtgatcactacaaaggataccgacactgttgaatgtgaagatgttgatcaacattgtcaaggggcttctgctccacgtgaggaaaaagttagcaacctgaaagctgctttggttcatgtggcccgaaaaatgcctaagaatgctcatgcacattttatgttgggtttgatgtatcaaagacttggtcaggcacagaaggcaatagcatcatatgaaaagtcaactgaaatactgctacaagatgaagaagaagtgcggagacctgatttactctcatcagtgaggatacaccacgcacagtgcattttgcaagcaagcatgggggatagttttgatgaagagcttgaaactggtgagttagatgacattctttcgaagttgaagagttcagttgagttagatcacaggcaagcagctgtttggaatatcctaggtttagttcttcttcggggtggtcagatacagagtgctatctcagttctatcttctctcacggctgttgctccagactacttggactcccttgcaaatcttggcgttgcatacattcaaagtgggaagctagagctgtctgcaaagtgctttcaagaacttcttctaaaagatcaaaaccaccccgctgctctggtgaactatgcagttcttcttctgtgtagatatggatctttgtctgcaggggcagggggcaatgtcagcacaggtccttacgtgcatcagaaagaagccttagttgttgcaaaagagtgcttgcttgcagcagtgaaggctgatcctagagctgcatcagtttgggttaatcttgcaaatgcatattacatggatggtgagcataagaactcaaagaggtgcttggagcagttcaccgtatcagagatgctgtaaggtcacaatgttctgatgatcaacttctttgggctgcaaatgaaatggcaacagttctaaaagaaggagacccttccgcagttgacgccccaattgcatgggctggattggcaatggctcacagggcacaacatgaaattgcagccatctatgatactgaaaacatcaatcttaatgatgcagaagagcgagctcaatatacactaaaacaggcaatccaagaggacccagatgatgctgttcaatggcatcaacttggcctgtacaatatttgcatgacccggttcagcaggtctgtaaattttcttaaagcagccttagcccgttccccagattgcagttatgcttggtcaaatcttggtattgcgttgcaactatcagacgatccatcctctgaaactgtatataagcgggcactggtactatcatcaactcagcagctgcacgcaatcttctctaatcttggaattctttatcggcaacataggaactatgaatttgcaaggaagatgttattaaggtcgttggaactgtgtcctggatttgcaccagctagcaacaacctgggtcttgtatttgtcgctgagggccgttgggaggatgctaaaagctggtttgagaaagctctgcaatctgatcccctgcttgatgcggccaaatcgaacttgttaaaagtcctcacattgtctacgaaacagtagaacaagagaagacctaactcctaaggaaattgccactgaagcctcagagttcagacacggaagcgcggtcaccaaatctctgttctgaagtgtctcaactgccagctcaaaattgatgcttggtgcctctagtctactgctcattgctcacagagtcacaggtgtaggaagtttcagaagtgcggcttcgaagactgcatttgattttgactgagttgctgcctatatgacaatcaaagctgcacaggctccgaagtggctgtgatgtgttcttaaagagtcgcatcagcgcaggaagagcccagattttgaagttcatgtgtagctaaatttcgatataagcttgaacggcttcccttagctgatgtatataaataaatatactccaacttgaggtgtactccaagttgagcatgtgcaagttataggttcagtgttccagagcaacttatggttctgtgcggtgaaactaacagcatctaaacctcaaatttggcagcaatttcactttggagtcaaaagggcgtcctacgagtgtataaaaatggagacgttaactgattaac

SEQ ID NO: 31052 - DNA, 2442 bp, Zea Mays
cgcagagctgtcgtgttcctttgctctccccgtccatgcttttgcaaaattgctccagtcaagggctagtccagtgccccctgaacccgcatccggagctcagaaacccccgccaccggagcccggacggagacgatgccggagacccatccgccgccgccgaggccggtgatgctcgccgacctcaactttgaaccagcggagagcgacggcgaggaccgcccaccgacccccgcacccaaccccgccgccgccgccgccgccgctgcggctccggcggtcgccgctgactcgtccacgaagagtggcaatgaagagggtggtttgacaaaaactgtgatcactacaaaggataccgacactgttgaatgtgaagatgttgatcaacattgtcaaggggcttctgctccacgtgaggaaaaagttagcaacctgaaagctgctttggttcatgtggcccgaaaaatgcctaagaatgctcatgcacattttatgttgggtttgatgtatcaaagacttggtcaggcacagaaggcaatagcatcatatgaaaagtcaactgaaatactgctacaagatgaagaagaagtgcggagacctgatttactctcatcagtgaggatacaccacgcacagtgcattttgcaagcaagcatgggggatagttttgatgaagagcttgaaactggtgagttagatgacattctttcgaagttgaagagttcagttgagttagatcacaggcaagcagctgtttggaatatcctaggtttagttcttcttcggggtggtcagatacagagtgctatctcagttctatcttctctcacggctgttgctccagactacttggactcccttgcaaatcttggcgttgcatacattcaaagtgggaagctagagctgtctgcaaagtgctttcaagaacttcttctaaaagatcaaaaccaccccgctgctctggtgaactatgcagttcttcttctgtgtagatatggatctttgtctgcaggggcagggggcaatgtcagcacaggtccttacgtgcatcagaaagaagccttagttgttgcaaaagagtgcttgcttgcagcagtgaaggctgatcctagagctgcatcagtttgggttaatcttgcaaatgcatattacatggatggtgagcataagaactcaaagaggtgcttggagcaggcagcaaaattggaacccaatcatatgcctgctcgttctaaaagaaggagacccttccgcagttgacgccccaattgcatgggctggattggcaatggctcacagggcacaacatgaaattgcagccatctatgatactgaaaacatcaatcttaatgatgcagaagagcgagctcaatatacactaaaacaggcaatccaagaggacccagatgatgctgttcaatggcatcaacttggcctgtacaatatttgcatgacccggttcagcaggtctgtaaattttcttaaagcagccttagcccgttccccagattgcagttatgcttggtcaaatcttggtattgcgttgcaactatcagacgatccatcctctgaaactgtatataagcgggcactggtactatcatcaactcagcagctgcacgcaatcttctctaatcttggaattctttatcggcaacataggaactatgaatttgcaaggaagatgttattaaggtcgttggaactgtgtcctggatttgcaccagctagcaacaacctgggtcttgtatttgtcgctgagggccgttgggaggatgctaaaagctggtttgagaaagctctgcaatctgatcccctgcttgatgcggccaaatcgaacttgttaaaagtcctcacattgtctacgaaacagtagaacaagagaagacctaactcctaaggaaattgccactgaagcctcagagttcagacacggaagcgcggtcaccaaatctctgttctgaagtgtctcaactgccagctcaaaattgatgcttggtgcctctagtctactgctcattgctcacagagtcacaggtgtaggaagtttcagaagtgcggcttcgaagactgcatttgattttgactgagttgctgcctatatgacaatcaaagctgcacaggctccgaagtggctgtgatgtgttcttaaagagtcgcatcagcgcaggaagagcccagattttgaagttcatgtgtagctaaatttcgatataagcttgaacggcttcccttagctgatgtatataaataaatatactccaacttgaggtgtactccaagttgagcatgtgcaagttataggttcagtgttccagagcaacttatggttctgtgcggtgaaactaacagcatctaaacctcaaatttggcagcaatttcactttggagtcaaaagggcgtcctacgagtgtataaaaatggagacgttaactgattaac

SEQ ID NO: 31053 - DNA, 1044 bp, Zea Mays
catgcttttgcaaaattgctccagtcaagggctagtccagtgccccctgaacccgcatccggagctcagaaacccccgccaccggagcccggacggagacgatgccggagacccatccgccgccgccgaggccggtgatgctcgccgacctcaactttgaaccagcggagagcgacggcgaggaccgcccaccgacccccgcacccaaccccgccgccgccgccgccgccgctgcggctccggcggtcgccgctgactcgtccacgaagagtggcaatgaagagggtggtttgacaaaaactgtgatcactacaaaggataccgacactgttgaatgtgaagatgttgatcaacattgtcaaggggcttctgctccacgtgaggaaaaagttagcaacctgaaagctgctttggttcatgtggcccgaaaaatgcctaagaatgctcatgcacattttatgttgggtttgatgtatcaaagacttggtcaggcacagaaggcaatagcatcatatgaaaagtcaactgaaatactgctacaagatgaagaagaagtgcggagacctgatttactctcatcagtgaggatacaccacgcacagtgcattttgcaagcaagcatgggggatagttttgatgaagagcttgaaactggtgagttagatgacattctttcgaagttgaagagttcagttgagttagatcacaggcaagcagctgtttggaatatcctaggtttagttcttcttcggggtggtcagatacagagtgctatctcagttctatcttctctcacggctgttgctccagactacttggactcccttgcaaatcttggcgttgcatacattcaaagtgggaagctagagctgtctgcaaagtgctttcaagaacttcttctaaaagatcaaaaccaccccgctgctctggtgaactatgcagttcttcttctgtgtagatatggatctttgtctgcagaatataggcacccaaattcaagttgagagaagacttgaacctgggtggctgggtgcatgagcacac

SEQ ID NO: 31054 - DNA, 2935 bp, Zea Mays
tgcttttgcaaaattgctccagtcaagggctagtccagtgccccctgaacccgcatccggagctcagaaacccccgccaccggagcccggacggagacgatgccggagacccatccgccgccgccgaggccggtgatgctcgccgacctcaactttgaaccagcggagagcgacggcgaggaccgcccaccgacccccgcacccaaccccgccgccgccgccgccgccgctgcggctccggcggtcgccgctgactcgtccacgaagagtggcaatgaagagggtggtttgacaaaaactgtgatcactacaaaggataccgacactgttgaatgtgaagatgttgatcaacattgtcaaggggcttctgctccacgtgaggaaaaagttagcaacctgaaagctgctttggttcatgtggcccgaaaaatgcctaagaatgctcatgcacattttatgttgggtttgatgtatcaaagacttggtcaggcacagaaggcaatagcatcatatgaaaagtcaactgaaatactgctacaagatgaagaagaagtgcggagacctgatttactctcatcagtgaggatacaccacgcacagtgcattttgcaagcaagcatgggggatagttttgatgaagagcttgaaactggtgagttagatgacattctttcgaagttgaagagttcagttgagttagatcacaggcaagcagctgtttggaatatcctaggtttagttcttcttcggggtggtcagatacagagtgctatctcagttctatcttctctcacggctgttgctccagactacttggactcccttgcaaatcttggcgttgcatacattcaaagtgggaagctagagctgtctgcaaagtgctttcaagaacttcttctaaaagatcaaaaccaccccgctgctctggtgaactatgcagttcttcttctgtgtagatatggatctttgtctgcaggtacatgaatgcttgcctgccataatcttctagtacttgccattttcctgtcatatcataaaggcatgtttttccctatgctattttgctctagccaaagtagtgacactagacaattagataatacacaccttattgttggatgcgttacatcaatcgatttgtttgtttatgtccactaataataagtccagaaagtattcttttccctccaaaaatgtgaccaacctaggagaacgagaaactaagcgtttttttcgttgagaagaatataggcacccaaattcaagttgagagaagacttgaacctgggtggctgggtgcatgagcacacctcccacctaatcagttgagcacccaaattcaagtaattgtatgagcacctaaattcaagtaattgcttttggcttctgcctcatgccttgttacaaattcaggggcagggggcaatgtcagcacaggtccttacgtgcatcagaaagaagccttagttgttgcaaaagagtgcttgcttgcagcagtgaaggctgatcctagagctgcatcagtttgggttaatcttgcaaatgcatattacatggatggtgagcataagaactcaaagaggtgcttggagcaggcagcaaaattggaacccaatcatatgcctgctcggtatgctattgcagttcaccgtatcagagatgctgtaaggtcacaatgttctgatgatcaacttctttgggctgcaaatgaaatggcaacagttctaaaagaaggagacccttccgcagttgacgccccaattgcatgggctggattggcaatggctcacagggcacaacatgaaattgcagccatctatgatactgaaaacatcaatcttaatgatgcagaagagcgagctcaatatacactaaaacaggcaatccaagaggacccagatgatgctgttcaatggcatcaacttggcctgtacaatatttgcatgacccggttcagcaggtctgtaaattttcttaaagcagccttagcccgttccccagattgcagttatgcttggtcaaatcttggtattgcgttgcaactatcagacgatccatcctctgaaactgtatataagcgggcactggtactatcatcaactcagcagctgcacgcaatcttctctaatcttggaattctttatcggcaacataggaactatgaatttgcaaggaagatgttattaaggtcgttggaactgtgtcctggatttgcaccagctagcaacaacctgggtcttgtatttgtcgctgagggccgttgggaggatgctaaaagctggtttgagaaagctctgcaatctgatcccctgcttgatgcggccaaatcgaacttgttaaaagtcctcacattgtctacgaaacagtagaacaagagaagacctaactcctaaggaaattgccactgaagcctcagagttcagacacggaagcgcggtcaccaaatctctgttctgaagtgtctcaactgccagctcaaaattgatgcttggtgcctctagtctactgctcattgctcacagagtcacaggtgtaggaagtttcagaagtgcggcttcgaagactgcatttgattttgactgagttgctgcctatatgacaatcaaagctgcacaggctccgaagtggctgtgatgtgttcttaaagagtcgcatcagcgcaggaagagcccagattttgaagttcatgtgtagctaaatttcgatataagcttgaacggcttcccttagctgatgtatataaataaatatactccaacttgaggtgtactccaagttgagcatgtgcaagttataggttcagtgttccagagcaacttatggttctgtgcggtgaaactaacagcatctaaacctcaaatttggcagcaatttcactttggagtcaaaagggcgtcctacgagtgtataaaaatggagacgttaactgattaac

SEQ ID NO: 31055 - DNA, 1936 bp, Zea Mays
caaaaagttaccttgtttctagttttattttctttcagtgcattttgcaagcaagcatgggggatagttttgatgaagagcttgaaactggtgagttagatgacattctttcgaagttgaagagttcagttgagttagatcacaggcaagcagctgtttggaatatcctaggtttagttcttcttcggggtggtcagatacagagtgctatctcagttctatcttctctcacggctgttgctccagactacttggactcccttgcaaatcttggcgttgcatacattcaaagtgggaagctagagctgtctgcaaagtgctttcaagaacttcttctaaaagatcaaaaccaccccgctgctctggtgaactatgcagttcttcttctgtgtagatatggatctttgtctgcaggggcagggggcaatgtcagcacaggtccttacgtgcatcagaaagaagccttagttgttgcaaaagagtgcttgcttgcagcagtgaaggctgatcctagagctgcatcagtttgggttaatcttgcaaatgcatattacatggatggtgagcataagaactcaaagaggtgcttggagcaggcagcaaaattggaacccaatcatatgcctgctcggtatgctattgcagttcaccgtatcagagatgctgtaaggtcacaatgttctgatgatcaacttctttgggctgcaaatgaaatggcaacagttctaaaagaaggagacccttccgcagttgacgccccaattgcatgggctggattggcaatggctcacagggcacaacatgaaattgcagccatctatgatactgaaaacatcaatcttaatgatgcagaagagcgagctcaatatacactaaaacaggcaatccaagaggacccagatgatgctgttcaatggcatcaacttggcctgtacaatatttgcatgacccggttcagcaggtctgtaaattttcttaaagcagccttagcccgttccccagattgcagttatgcttggtcaaatcttggtattgcgttgcaactatcagacgatccatcctctgaaactgtatataagcgggcactggtactatcatcaactcagcagctgcacgcaatcttctctaatcttggaattctttatcggcaacataggaactatgaatttgcaaggaagatgttattaaggtcgttggaactgtgtcctggatttgcaccagctagcaacaacctgggtcttgtatttgtcgctgagggccgttgggaggatgctaaaagctggtttgagaaagctctgcaatctgatcccctgcttgatgcggccaaatcgaacttgttaaaagtcctcacattgtctacgaaacagtagaacaagagaagacctaactcctaaggaaattgccactgaagcctcagagttcagacacggaagcgcggtcaccaaatctctgttctgaagtgtctcaactgccagctcaaaattgatgcttggtgcctctagtctactgctcattgctcacagagtcacaggtgtaggaagtttcagaagtgcggcttcgaagactgcatttgattttgactgagttgctgcctatatgacaatcaaagctgcacaggctccgaagtggctgtgatgtgttcttaaagagtcgcatcagcgcaggaagagcccagattttgaagttcatgtgtagctaaatttcgatataagcttgaacggcttcccttagctgatgtatataaataaatatactccaacttgaggtgtactccaagttgagcatgtgcaagttataggttcagtgttccagagcaacttatggttctgtgcggtgaaactaacagcatctaaacctcaaatttggcagcaatttcactttggagtcaaaagggcgtcctacgagtgtataaaaatggagacgttaactgattaac

SEQ ID NO: 31056 - DNA, 5557 bp, Zea Mays
tcttacattaaagaatgaatcaaatctccccaagtaggattcgaacctacgaccagtcagttaacagccgaccgctctaccactgagctactgaggaacaaggggagattcgacctcctagagttcaactcccgctctcaacccgtgaacaatatgagtccgaagcttctttcgtaactcccggaatttcttcgtagtggctccgttccatgcctcatttcatagggaagcccaaagtggctctatttcattctatttcacttcttagcacttcctatcatttaatatccattcctttggtcttattgacataagagatgtcatttatagtctatctctttctatatatggaaagtcaagaaattctcatcgaaacatcgagaaattgtgcatatagaaaactctaaagaaagaaaaaaaggagacccatgccatgattttcaaatcttttctacttaagtagtctaaagtagtctaagtttctcgatgaggataattaattcggtcgttgtggtcggactctattatggatttctgaccacattctccataggtccctcttagatcttctttctccaatcttgggttagggaagaaggagatattcgcgactactggcggtttcattatggggcagctcatgatcttcatatcgatctattatccacctctgcatctattctttcttagctaaacgggtggaagatccatccaatttggttatatcatggactcgaaaaacggatctgaatgtgactgaaatgcacgatcttcacaggtatcacttttcacgatacctaaacctaaaaggtggaatagcgattttcgaaccatttcctataagagaatggtttccattactttgagaaatggattctatatcaaactatagctattgcattaaagaagaaaagaaactaatagaagtcgaagacgcggaatggtagtgaatagagaaaaagattcttctgattttcttgttcctgaaaatattcgatccatctcctagacgccgtagagaattgagaattttcatgtctttcaattctcgtactcgtaattggaaagttacggaaggagatccatcattttgcaatgaaaacaacataaaaaactctggacaatttcgaaatcagaccaagcgtcttaatacatatgcaaaaaaattcattattggcccaccattgattacaagatttagcttttatgaatcgctattggtttgatacgaataatggcagtcgtttcagtatgttaaggatacagatgtatccacaattcatttagagttacttaatagcctatttcttatactatatctctatcccgtgaaattctcgagcccaaagatggatgcatatgctgtgtttcattttgctaaatgatatcaattaaatggtatatcaattctataaattggatatagcaataaataaatcagcaaaattcttttattttagatagaagaaatgtttcttctatctaaaataaaagaatgtacccttctatccaaatccaatttgcatcgataaaataaatccaaattccagattccagcagtagatgaataattgcaaatttttgtgtgtacgagattagaataacttaaaaataactgacataattttttatttttcctgatcagaaaaatacatgaaaaagaaaggaggtagaaaaatttgttgatttatggttaaagaagaaaaacaagaaaacaggggttctgttgaatttcaagtattcagtttcaccaataagatacggagacttgcttcacatttagaattacacaaaaaagatttttcatcggaaagaggtctacgaagacttttgggaaaacgtcaacgtttgctggcttatttggcaaagaaaaatagagtacgttataagaaattaataagtcagttggatattcgggagaaagagagagaattgatatatgatctatttgaagctgctacaggagttgttgaatatcaagaacttattacacagaatcccatttttttagaacgagttgaaggagtcggttttattagcggagaagaagctgtaaattggggcttatcgggaccaatgttacgagcttctggaatacaatgggatcttcgtaaaattgatccttatgagtcttacaatcaattcgattggaaagtccaatggcaaaaagaaggagattcgttagctcgctatttagtacgagtcggtgaaatgagggaatccataaaaattattcaacaggctgtagagaaaattcctggaggaccttatgagaatttagaagcccgacgctttaagaaagcaaagaatcccgaatggaatgattttgaatatcgatttcttggtaaaaaaccttcgcccaattttgaattatcaaagcaagagctttatgtaagagtagaagctccaaaagaaagagaaatatccgcatcgatacaacaacgtattggtcctgaatatgctggccccctgggactgcttcaagctatagcagatggaactaaactacttttaaaagaggatatcctcccatcccgaggagatattcctttatttagcattggtccctctatagcagtcatatccattttattaagttttttagttatccctttaggatatcgttttgttttagctgatcttagtattggtgtttttttatggattgcgatttcaagtattgctcctattggtcttctcatggcaggatatagctcaaataataaatattctttttcaggcggtctacgagcggctgctcaatctattagttatgaaataccattaactttttgtgtactagcaatatctctacgtgtgattcgttaaaataggatctttttcctctaaaatacattgaatgcttatcttcctttgcttattctgtattcgcgttggtaagttaaactcgatagctatatgagtgaaacaaaacagcttattaatttgtagtaaaagtaaaaaatctcatttcctacgtacaagaaaaaagttcaagtaaacataagcagtgtaaactctttaccccaaggttgagattgtttgattagtcatcatatcttgaagcgggcaagaataaaggattcgcgatatggaattccattactagaatattttgagttattactataatttaaacttataaccataaggcaatccatcaaaagttagtgagggattaggaacactaaagtacatacaggattagtaatgagagaatctaaatcattagacatttttcctcataaaaggaatcataataaggacttgaaattggtggaaatgatcaagcagtactttcttcagattccggtctagagtatgttcccattcacttgttaaggaaatggctatcaagaacgaattaaccctttattctttttttttaagtatacccctcccggggaaagaagagtaggacaaaagatatggaatacaatacaaaaaaggatctttatttattctttccttcctttatccctattcatacagaattcctcatgaactaatgccaaattctttccatttattaattgctataacgagtgatttattccaatattaagttattaccgaacaaagcaaaattatattatataaaggatgagatcaattcggaagcgcttttttgttattctagcagacgtaattgctttggtctaattttgggctttccaatcaattttatcttatctaattctatctatgcccagaggatgataccgaaacgaaacaatcctttccttttttctgatcatagaggagccgtatgaagctaaggtttcatgtacggttttggaatagcggtgggaactgtgatgttatcatcgactatgattatctaatagttcaagtacagttgatatagttgaagcacagtccaaatatggtttttttggatggaatctttggcgtcagcctataggttttctagtttttctaatttcttctttggcagaatgtgaaagattaccctttgatttaccagaagcagaagaagaattagtagcaggttatcaaaccgaatattctggtattaaatatggtttattttatcttgtttcttacctaaatttattagtttcctctttatttgtaactgttctatacttaggcgggtggaatttctctattccctatatatccttttttggatttttccaaatgaataaaataattggaattttggaaatggtaataggtatctttattacattaactaaagcttatttatttctcttcatttctatcacaataagatggactttacccaggatgagaatggatcagttattaaatcttggatggaaatttcttttacctatttctctgggcaatctcttattaacaacttcttcccaactagtttcactataaataagaatacaataacagtaagaatattttcaacacaaaagttctctcaaacaagagaaagaaacatacctttttcatatatagatttagaatatgttccctatgctaactgggttcattagttatggtcaacaaacaatacgcgccgcaagatacattggtcaaagtttcataattaccttatcccacacaaatcgtttacctataacgattcactacccttatgaaaaatcaattacatcggagcgtttccgggggcgaatacactttgaatttgataaatgcattgcttgtgaagtatgtgttcgcgtatgcccgatagatctaccccttgtggattggagatttgaaaaggatattaaaagaaaacaattgcttaattatagtattgatttcggagtttgtatattttgcggtaactgtgttgaatactgtcccacaaattgtttatcaatgactgaagaatatgaactttctacttatgatcgtcatgaattgaattacaatcaaattgctttgagtcggttaccaatctccataatgggagattacacaattcaaacaattaggaattcgcctcaaagtaaaatagacgaagaaaaatcttggaattcaagaacgattacagattactaggtattaggatttttttattagaaaaatccatttttactaactctaacgaaaaaagaataactactgcttaacaacttatatgtatatacaaaaaaatatcctaatacctttttccttccttgaatcttttagttttagtcagttcatgaaaaattttatactagaaatttcttcttatccataatggatttacctggaccaatacatgagattcttgtgctatttgggggatttggtcttctactaggaggtctaggagtagtattacttaccaacccaatttattctgccttttcgctgggattagttcttgtttgtatatccttattctattttttattaaattcctactttgtagctgtcgcacaacttcttatttatgtgggagccataaatgtcttgatcatatttgctgtaatgtttgtaaacggctcagagtggtctaaagataagaattattggactattggagatgggtttactttactcctttgtataactattcctttttcactaatgactactatcccagatacgtcgtggt

SEQ ID NO: 31057 - DNA, 2426 bp, Zea Mays
cttcaggttatggatcaaaacggcagtataaagaagcatctgcacagcgggaggcagtgaaccaactatgcagtcattttgaagcctatagagatgtgcccaagataacagaattgagagagaaattcaagaacatcaagaaaatcctcaaatctcatgtattttcagatttttcaagcttaggaactgggaaggaaacagaagattccatgctattgcagcagctatctgatgcttgtttggtggttgatgcattggaaccatctgtaagggaagaactagtgaagaacttttgcagcaaggaactcacctcatataggcagatctttgaaggagcagaacttgccaagttagacaagaccgaaagaagatatgcatggattaaacgtcgactaaggtcaaatgaagacacctggaaaatatttccaccttcctggcatgtcgactatctgctgtgtatccagttctgtaagattacaagggcccagcttgttgatatccttaataatctcaaagaaaaaccagatgttgcaactttgttattggcgttccagagaaccattgaatttgaggaagaattggcagagaaattcagtggtggaactacaaatgctagaaataaagagacaacaagtgatgatgaagatgagggtgggggacacaataaaattgtttcggacatacgaaagaaatatgagaagaaattggctgcacccagtgatgaggacaaagataagcagaaagatttgtcagttcctggtgctgggttcaactttcatgggatcatatcttcttgttttgaaccatatatgactgtatacattgaacttgaggagaaatctttagtggatcaattagaaaaacttgtccaggaagaaagatgggaaatcgaggaaggaagtcagacgaacattctatcaagcagcatgcaggttttcttggtgattagaaaaagcttaaagaggtgcagcgcattaacaaagaaccaaacattgttcaacttatttcaggtatttcaaagaatactcaaggcctatgcggctaagttatatgccagattaccaaaaggtggaactggtattgttgcagctgccactggcactgatggacagatcaggacctcagacagggacgagagaatgatatgctacattgtcaacactgctgaatattgtcatcagacatcaggtgagctagctgagaatgttgctaagatgattaaccctcagtttgctgacaaggtggacatgtctgaagttcaggatgaattctcagccgtgatcacaaaagcactaatgactcttgttcacggacttgaaaccaaatttgatgctgaaatggttgcaatgactcgcgttccatgggctacccttgaaagcgttggtgatcaatcagaatatgtgaatggtatcagctctattctgtcaagcagtattcctgtgcttggtaccctgctttcacctacctacttccagtatttcctggacaaacttgcagcatctcttgggcctcggttttatctcaacatatacaagtgcaaacatatatcagaaactggtgcacagcagatgcttttggacacccaagcagtaaagactattctcctagacatcccagctcttggaaaacagagtacaggtgcagctagctactcgaaatttgtcagccgagaaatgggtaaagccgaagctctacttaaggtcattttgtcgccagttgattctgtcgctaacacataccgtgccctccttcccgaaggcacgcctcttgagtttcagcggatacttgacctcaagggcttgaagaaagcagaccaacaagctatcctggaggacttcaacaaacacgcccctgcaccagcccccgccatcaaacaccctgccgttgctccgacggtggcgacaccagttgccacagcatctgtccagattgtgccctcggtggcaactccagctgtttcgattacaccaagcatggcctccttgaagggagcactggcgaaccaagaggacgtcctcgcccgagctgccgcccttgggcgcggagcagccaccacgggcttcaagaggttccttgcattgacagaggccgccaaagatcgcaaggatgggccgttccgcaagctcttcaacgcctaaaatgtcgctcaccgttgtgttcatagttcgtgcccctcgtgcagtgaacatagatataggaaatcctttccacatcgtgtacacaccattaccgttaaccgacagtctataacaaccattttgacagattatcctatcccatcctgcggagaacgattagctcagttgtagcatagagattttgagacagtttgagctattagataagtttttccccctggttttgtgcatgcaaacccaagattctatactcgtgattgaataatcgtttctctccttttttttttc

SEQ ID NO: 31058 - DNA, 2360 bp, Zea Mays
tcaggttatggatcaaaacggcagtataaagaagcatctgcacagcgggaggcagtgaaccaactatgcagtcattttgaagcctatagagatgtgcccaagataacagaattgagagagaaattcaagaacatcaagaaaatcctcaaatctcatgtattttcagatttttcaagcttaggaactgggaaggaaacagaagattccatgctattgcagcagctatctgatgcttgtttggtggttgatgcattggaaccatctgtaagggaagaactagtgaagaacttttgcagcaaggaactcacctcatataggcagatctttgaaggagcagaacttgccaagttagacaagaccgaaagaagatatgcatggattaaacgtcgactaaggtcaaatgaagacacctggaaaatatttccaccttcctggcatgtcgactatctgctgtgtatccagttctgtaagattacaaggcgttccagagaaccattgaatttgaggaagaattggcagagaaattcagtggtggaactacaaatgctagaaataaagagacaacaagtgatgatgaagatgagggtgggggacacaataaaattgtttcggacatacgaaagaaatatgagaagaaattggctgcacccagtgatgaggacaaagataagcagaaagatttgtcagttcctggtgctgggttcaactttcatgggatcatatcttcttgttttgaaccatatatgactgtatacattgaacttgaggagaaatctttagtggatcaattagaaaaacttgtccaggaagaaagatgggaaatcgaggaaggaagtcagacgaacattctatcaagcagcatgcaggttttcttggtgattagaaaaagcttaaagaggtgcagcgcattaacaaagaaccaaacattgttcaacttatttcaggtatttcaaagaatactcaaggcctatgcggctaagttatatgccagattaccaaaaggtggaactggtattgttgcagctgccactggcactgatggacagatcaggacctcagacagggacgagagaatgatatgctacattgtcaacactgctgaatattgtcatcagacatcaggtgagctagctgagaatgttgctaagatgattaaccctcagtttgctgacaaggtggacatgtctgaagttcaggatgaattctcagccgtgatcacaaaagcactaatgactcttgttcacggacttgaaaccaaatttgatgctgaaatggttgcaatgactcgcgttccatgggctacccttgaaagcgttggtgatcaatcagaatatgtgaatggtatcagctctattctgtcaagcagtattcctgtgcttggtaccctgctttcacctacctacttccagtatttcctggacaaacttgcagcatctcttgggcctcggttttatctcaacatatacaagtgcaaacatatatcagaaactggtgcacagcagatgcttttggacacccaagcagtaaagactattctcctagacatcccagctcttggaaaacagagtacaggtgcagctagctactcgaaatttgtcagccgagaaatgggtaaagccgaagctctacttaaggtcattttgtcgccagttgattctgtcgctaacacataccgtgccctccttcccgaaggcacgcctcttgagtttcagcggatacttgacctcaagggcttgaagaaagcagaccaacaagctatcctggaggacttcaacaaacacgcccctgcaccagcccccgccatcaaacaccctgccgttgctccgacggtggcgacaccagttgccacagcatctgtccagattgtgccctcggtggcaactccagctgtttcgattacaccaagcatggcctccttgaagggagcactggcgaaccaagaggacgtcctcgcccgagctgccgcccttgggcgcggagcagccaccacgggcttcaagaggttccttgcattgacagaggccgccaaagatcgcaaggatgggccgttccgcaagctcttcaacgcctaaaatgtcgctcaccgttgtgttcatagttcgtgcccctcgtgcagtgaacatagatataggaaatcctttccacatcgtgtacacaccattaccgttaaccgacagtctataacaaccattttgacagattatcctatcccatcctgcggagaacgattagctcagttgtagcatagagattttgagacagtttgagctattagataagtttttccccctggttttgtgcatgcaaacccaagattctatactcgtgattgaataatcgtttctctccttttttttttc

SEQ ID NO: 31059 - DNA, 2451 bp, Zea Mays
tcaggttatggatcaaaacggcagtataaagaagcatctgcacagcgggaggcagtgaaccaactatgcagtcattttgaagcctatagagatgtgcccaagataacagaattgagagagaaattcaagaacatcaagaaaatcctcaaatctcatgtattttcagatttttcaagcttaggaactgggaaggaaacagaagattccatgctattgcagcagctatctgatgcttgtttggtggttgatgcattggaaccatctgtaagggaagaactagtgaagaacttttgcagcaaggaactcacctcatataggcagatctttgaaggagcagaacttgccaagttagacaagaccgaaagaagatatgcatggattaaacgtcgactaaggtcaaatgaagacacctggaaaatatttccaccttcctggcatgtcgactatctgctgtgtatccagttctgtaagattacaagtttgccggtgaaaattcttcttttcagggcccagcttgttgatatccttaataatctcaaagaaaaaccagatgttgcaactttgttattggcgttccagagaaccattgaatttgaggaagaattggcagagaaattcagtggtggaactacaaatgctagaaataaagagacaacaagtgatgatgaagatgagggtgggggacacaataaaattgtttcggacatacgaaagaaatatgagaagaaattggctgcacccagtgatgaggacaaagataagcagaaagatttgtcagttcctggtgctgggttcaactttcatgggatcatatcttcttgttttgaaccatatatgactgtatacattgaacttgaggagaaatctttagtggatcaattagaaaaacttgtccaggaagaaagatgggaaatcgaggaaggaagtcagacgaacattctatcaagcagcatgcaggttttcttggtgattagaaaaagcttaaagaggtgcagcgcattaacaaagaaccaaacattgttcaacttatttcaggtatttcaaagaatactcaaggcctatgcggctaagttatatgccagattaccaaaaggtggaactggtattgttgcagctgccactggcactgatggacagatcaggacctcagacagggacgagagaatgatatgctacattgtcaacactgctgaatattgtcatcagacatcaggtgagctagctgagaatgttgctaagatgattaaccctcagtttgctgacaaggtggacatgtctgaagttcaggatgaattctcagccgtgatcacaaaagcactaatgactcttgttcacggacttgaaaccaaatttgatgctgaaatggttgcaatgactcgcgttccatgggctacccttgaaagcgttggtgatcaatcagaatatgtgaatggtatcagctctattctgtcaagcagtattcctgtgcttggtaccctgctttcacctacctacttccagtatttcctggacaaacttgcagcatctcttgggcctcggttttatctcaacatatacaagtgcaaacatatatcagaaactggtgcacagcagatgcttttggacacccaagcagtaaagactattctcctagacatcccagctcttggaaaacagagtacaggtgcagctagctactcgaaatttgtcagccgagaaatgggtaaagccgaagctctacttaaggtcattttgtcgccagttgattctgtcgctaacacataccgtgccctccttcccgaaggcacgcctcttgagtttcagcggatacttgacctcaagggcttgaagaaagcagaccaacaagctatcctggaggacttcaacaaacacgcccctgcaccagcccccgccatcaaacaccctgccgttgctccgacggtggcgacaccagttgccacagcatctgtccagattgtgccctcggtggcaactccagctgtttcgattacaccaagcatggcctccttgaagggagcactggcgaaccaagaggacgtcctcgcccgagctgccgcccttgggcgcggagcagccaccacgggcttcaagaggttccttgcattgacagaggccgccaaagatcgcaaggatgggccgttccgcaagctcttcaacgcctaaaatgtcgctcaccgttgtgttcatagttcgtgcccctcgtgcagtgaacatagatataggaaatcctttccacatcgtgtacacaccattaccgttaaccgacagtctataacaaccattttgacagattatcctatcccatcctgcggagaacgattagctcagttgtagcatagagattttgagacagtttgagctattagataagtttttccccctggttttgtgcatgcaaacccaagattctatactcgtgattgaataatcgtttctctccttttttttttc

SEQ ID NO: 31060 - DNA, 1984 bp, Zea Mays
tgggtggggcaggggttcgagggttttcgcgacctgtgtgagaatgttttcttaatacaatgcctagggttgcctcccgccccgcacgcggcaggcgttccagagaaccattgaatttgaggaagaattggcagagaaattcagtggtggaactacaaatgctagaaataaagagacaacaagtgatgatgaagatgagggtgggggacacaataaaattgtttcggacatacgaaagaaatatgagaagaaattggctgcacccagtgatgaggttggacaagacaaagataagcagaaagatttgtcagttcctggtgctgggttcaactttcatgggatcatatcttcttgttttgaaccatatatgactgtatacattgaacttgaggagaaatctttagtggatcaattagaaaaacttgtccaggaagaaagatgggaaatcgaggaaggaagtcagacgaacattctatcaagcagcatgcaggttttcttggtgattagaaaaagcttaaagaggtgcagcgcattaacaaagaaccaaacattgttcaacttatttcaggtatttcaaagaatactcaaggcctatgcggctaagttatatgccagattaccaaaaggtggaactggtattgttgcagctgccactggcactgatggacagatcaggacctcagacagggacgagagaatgatatgctacattgtcaacactgctgaatattgtcatcagacatcaggtgagctagctgagaatgttgctaagatgattaaccctcagtttgctgacaaggtggacatgtctgaagttcaggatgaattctcagccgtgatcacaaaagcactaatgactcttgttcacggacttgaaaccaaatttgatgctgaaatggttgcaatgactcgcgttccatgggctacccttgaaagcgttggtgatcaatcagaatatgtgaatggtatcagctctattctgtcaagcagtattcctgtgcttggtaccctgctttcacctacctacttccagtatttcctggacaaacttgcagcatctcttgggcctcggttttatctcaacatatacaagtgcaaacatatatcagaaactggtgcacagcagatgcttttggacacccaagcagtaaagactattctcctagacatcccagctcttggaaaacagagtacaggtgcagctagctactcgaaatttgtcagccgagaaatgggtaaagccgaagctctacttaaggtcattttgtcgccagttgattctgtcgctaacacataccgtgccctccttcccgaaggcacgcctcttgagtttcagcggatacttgacctcaagggcttgaagaaagcagaccaacaagctatcctggaggacttcaacaaacacgcccctgcaccagcccccgccatcaaacaccctgccgttgctccgacggtggcgacaccagttgccacagcatctgtccagattgtgccctcggtggcaactccagctgtttcgattacaccaagcatggcctccttgaagggagcactggcgaaccaagaggacgtcctcgcccgagctgccgcccttgggcgcggagcagccaccacgggcttcaagaggttccttgcattgacagaggccgccaaagatcgcaaggatgggccgttccgcaagctcttcaacgcctaaaatgtcgctcaccgttgtgttcatagttcgtgcccctcgtgcagtgaacatagatataggaaatcctttccacatcgtgtacacaccattaccgttaaccgacagtctataacaaccattttgacagattatcctatcccatcctgcggagaacgattagctcagttgtagcatagagattttgagacagtttgagctattagataagtttttccccctggttttgtgcatgcaaacccaagattctatactcgtgattgaataatcgtttctctccttttttttttc

SEQ ID NO: 31061 - DNA, 1613 bp, Zea Mays
gccgcgtcgacgagactgcacatgaaaaccgggggcagcgccgcgccgaaccgggcgcgccgcacaaggttcgatccgccggctccggtggcgcacccagatcagatccccctttcgctggtttctttccccttggccaagcccaaaccgtctttaaatacacccgtcgtcgtccgcatcccccgcctgccttaaccattcctcccaacaccacctcgcctgcgatcttcgtagcctccgtcgcgtcgagcatcgatcatgtcggcctactgcggaaagtacaaggatgagctcatcaagaatgctgcctacattggcacccccggcaagggtatccttgctgctgatgagtccactggcaccattggcaagcgcctttccagcatcaatgtcgagaacgttgaggagaaccgccgtgccctccgtgagctcctattctgctgccctggtgctctccagtacatcagcggtgtgatcctcttcgaggagaccctgtaccagaagaccaaggatggcaagccttttgttgatgtcctcaaggagggaggcgtcctccctggcatcaaggttgacaagggcaccattgaggttgttggcactgataaggagaccaccacccaaggccatgacgaccttggcaagcgttgcgccaagtactacgaggcaggtgcccgctttgccaagtggcgcgctgttctcaagattggccctaatgagccatcacagcttgccatcgacctgaacgctcagggtctggctcgctatgccatcatctgccaggagaatggtctggtgccaattgttgagcctgagatccttgttgatggccctcatgacattgatcgctgcgcttacgtcactgagaccgtccttgctgcctgctacaaggcgctcaacgagcaccatgtcctcctggagggtaccctcctgaagaccgtccctgctgctgtgcctgctgttgtcttcctctctggtggacagagcgaggaggaggccacccgcaacctcaatgccatgaacaagctcagcaccaagaagccgtggtccctgtctttctccttcggccgtgccctccaggcgagcaccctcaaggcctgggctggcaaggtggagaacctggagaaggctagagctgccttcctcgccaggtgcaaggccaactctgaggctaccctcggcacctacaagggtgatgctgccgccgacaccgagagcctccacgtcaaggactacaagtactgagttgcttctctttgcgtgcccgttttggaactcctgcctacgagctaggttgcggagtgtggtttgctcgttagagcttattttcggacatccaaaaaacatgcttcctatgtgggatgatggttatctttatatttgtatgttaattagtctctttgctgttaaatttcgtgtaagttggtcctgccgatggagaatcgagcagctccctttttttgttctatcaactatgctgtaattctggctatgtatcggcaaaaacaattctatatgctgagttggagtcggcaaaaattcatatatgctgagttggagacagcaacttgtttggatcatattttgctgagacactcgtgagagattggcatagc

SEQ ID NO: 31062 - DNA, 1437 bp, Zea Mays
tgctgatctgcttgtgatgcctttagatgagctcatcaagaatgctgcctacattggcacccccggcaagggtatccttgctgctgatgagtccactggcaccattggcaagcgcctttccagcatcaatgtcgagaacgttgaggagaaccgccgtgccctccgtgagctcctattctgctgccctggtgctctccagtacatcagcggtgtgatcctcttcgaggagaccctgtaccagaagaccaaggatggcaagccttttgttgatgtcctcaaggagggaggcgtcctccctggcatcaaggttgacaagggcaccattgaggttgttggcactgataaggagaccaccacccaaggccatgacgaccttggcaagcgttgcgccaagtactacgaggcaggtgcccgctttgccaagtggcgcgctgttctcaagattggccctaatgagccatcacagcttgccatcgacctgaacgctcagggtctggctcgctatgccatcatctgccaggagaatggtctggtgccaattgttgagcctgagatccttgttgatggccctcatgacattgatcgctgcgcttacgtcactgagaccgtccttgctgcctgctacaaggcgctcaacgagcaccatgtcctcctggagggtaccctcctgaagcccaacatggtgactccaggctccgactccaagaaggtgacccctgaggtgattgctgagtacaccgtccgtaccctccagaggaccgtccctgctgctgtgcctgctgttgtcttcctctctggtggacagagcgaggaggaggccacccgcaacctcaatgccatgaacaagctcagcaccaagaagccgtggtccctgtctttctccttcggccgtgccctccaggcgagcaccctcaaggcctgggctggcaaggtggagaacctggagaaggctagagctgccttcctcgccaggtgcaaggccaactctgaggctaccctcggcacctacaagggtgatgctgccgccgacaccgagagcctccacgtcaaggactacaagtactgagttgcttctctttgcgtgcccgttttggaactcctgcctacgagctaggttgcggagtgtggtttgctcgttagagcttattttcggacatccaaaaaacatgcttcctatgtgggatgatggttatctttatatttgtatgttaattagtctctttgctgttaaatttcgtgtaagttggtcctgccgatggagaatcgagcagctccctttttttgttctatcaactatgctgtaattctggctatgtatcggcaaaaacaattctatatgctgagttggagtcggcaaaaattcatatatgctgagttggagacagcaacttgtttggatcatattttgctgagacactcgtgagagattggcatagc

SEQ ID NO: 31063 - DNA, 1390 bp, Zea Mays
tttttagatccgtacaggattgtgctgtcgtgtgcccgccaggggcttggtggttgccaaaagatgagctcatcaagaatgctgcctacattggcacccccggcaagggtatccttgctgctgatgagtccactggcaccattggcaagcgcctttccagcatcaatgtcgagaacgttgaggagaaccgccgtgccctccgtgagctcctattctgctgccctggtgctctccagtacatcagcggtgtgatcctcttcgaggagaccctgtaccagaagaccaaggatggcaagccttttgttgatgtcctcaaggagggaggcgtcctccctggcatcaaggttgacaagggcaccattgaggttgttggcactgataaggagaccaccacccaaggccatgacgaccttggcaagcgttgcgccaagtactacgaggcaggtgcccgctttgccaagtggcgcgctgttctcaagattggccctaatgagccatcacagcttgccatcgacctgaacgctcagggtctggctcgctatgccatcatctgccaggagaatggtctggtgccaattgttgagcctgagatccttgttgatggccctcatgacattgatcgctgcgcttacgtcactgagaccgtccttgctgcctgctacaaggcgctcaacgagcaccatgtcctcctggagggtaccctcctgaagaccgtccctgctgctgtgcctgctgttgtcttcctctctggtggacagagcgaggaggaggccacccgcaacctcaatgccatgaacaagctcagcaccaagaagccgtggtccctgtctttctccttcggccgtgccctccaggcgagcaccctcaaggcctgggctggcaaggtggagaacctggagaaggctagagctgccttcctcgccaggtgcaaggccaactctgaggctaccctcggcacctacaagggtgatgctgccgccgacaccgagagcctccacgtcaaggactacaagtactgagttgcttctctttgcgtgcccgttttggaactcctgcctacgagctaggttgcggagtgtggtttgctcgttagagcttattttcggacatccaaaaaacatgcttcctatgtgggatgatggttatctttatatttgtatgttaattagtctctttgctgttaaatttcgtgtaagttggtcctgccgatggagaatcgagcagctccctttttttgttctatcaactatgctgtaattctggctatgtatcggcaaaaacaattctatatgctgagttggagtcggcaaaaattcatatatgctgagttggagacagcaacttgtttggatcatattttgctgagacactcgtgagagattggcatagc

SEQ ID NO: 31064 - DNA, 2194 bp, Zea Mays
cgatacagcaagccccggacactattggtgtcttcttctccgccctgccgttccgcgcggaacatttccaccgctttccacttgcctggcggcctggtccctgtgatttgtggaattttcgcgcgcatgtgttagcatgcagccagcaacggacacggaggtggtagggggagctgtgaagaaagagccagaagagatcgtggtcgaagtagacggcgacggggacgaggaagccgagaaggtggtcaagaggaggcggaggaggaggaagaagacgacggcctgggatccgcacaagaagcgcgcatgcgtggattgcacgaagaggtgcgcccggatccatggccagcctgcttcgccgtccgcattggcgtcgtcttccagcaacgcgcggccggtcccggcagtgccgtccttcttcaaggtcatgttgggctacttctccgaggacatggatataccacccccttttgccaagacaatctgggacctggcaggctccaacgtctttctcgaagacgcgttcgggctccgctggcgcgtgcggctctgcctgcgcgacggcgtgctgtcattcgggcacggatggaagaacttcgtgctggaccatgccgtcagctgcggcgagttcctggtgttcaggcagatcgccaggtcggtcttcaccgtgcagatgttcgccccatcagccgtcgagaggctgcacctctgtgagaggaacaagaggcagagccggaagaggaagcccaggccgcagagacagagaacaagctctcccagtatccagactgtcaaggcgaccaagaacagagtgaagaacagtaataagaagagacagcgtactgatgatcaccaaaacggtgtacgcccgagaggccataagagcaagacggcagctcaggtctgcgtcgacgactctgacgtccccgatcctgcgtctgaaccgaagtgtccagacacgtcggaaagattgccggaggctgaagtcacagaaccgcaagaaatttctgagccccctgcgggacgacatgagcgtgaagctcagaaggtgttagacggagaggcagaggtagcagacgacagcgcaatgcttgaagagactgaaaccatctacaacgctagacttacggagcaccaggttcctgctgccaatgaaacagagcatggcgagtgcttggcaaatttcgatgctagcatacctcttgctatgatggatctgaatgaagtgagcatagacgatatatttctgtcggctgatacgtacgaatttggaagtgacatgtgtaacccagaaccgttttctgttggtctgaacatggaaggcaccactactggccaaaactcgggattcagttgccttgaggagctggataccccacagaaccacctttcttccatgggagatggccattgttctctggttccagaagcaggaccatgtaccgaaaacaacaaagagaaggctgatgcactagaaacgggagcatcgtatttctgtgactcctcgtttcatgatatagacatcaacgcgttgcccgctaaggagccgccgtcgtttggagaggatagcccttctcctcgagctggcgctgaaatgcatcctaatgaatgtggattaagcagctgtagtcaggatagaggcaatagttccctccttatcatcaacaagcaagctgcacataaagaatcagattctttcatgacgacgaagcaggataaaccacaaggtggacaatgtagcatgcaggatggggtaggacgacagcatcctactgaaatcacgtcgagaaatgcaaagcctcgtgaatctcctgaactcacgcggaatcctctgggaactggaactggctctgaatccacccacagcggaacctctgaatctggtggtcttctcgcgctcacagaaaacatcaccaaattctgcatcgctgtgcctgcaccagggcaaacatggcttgagattcccggccgactgccggtcattccaagaacgaagaaacatgggaggaaggttgtgatgctcaaggacccacgcatgagactctggcctgtgctctaccaatgcaccccgaggttcaacggcatcatcactggctgggttgacgtctgcagggagaacagaatcaaggaaggtgacacctgcgagttcgaactcagcgtgttacagaagtcaagcgttctcagtttggcaaag

SEQ ID NO: 31065 - DNA, 2076 bp, Zea Mays
gcctctcccacactccccacttcaccttcgccctcccccgcctgcgagcgcgaggcgcggaggggctagcgcgctagcggcgccatggccctgaccgacgccaccgcgttcccctacggcctgcgggtcctcgtcgtcgacgacgaccccacctggctcaagatcctcgagaagatgctccgcaagtgttcatacgaagtcaccacatgcggtttagccagtgttgctatccaaattctccgggagaggagaaacaagtttgacattgtaatcagtgatgtcaacatgcctgacatggatggtttcaagcttctcgaactcattgggcttgagatggatctacctgttataatgatgtccatagacggagagacaagtagggtgatgaaaggtgtccagcatggtgcatgtgactacctcctcaagcctgttcggatgaaggaactccgaaacatttggcaacatgtgtataggaaaaaaatgcatgaggtgaaagagattgaaggtaatgacagctatgatgatctccaaatgtttagaaatggtgtagagggattcgacgagagggacctatttatgagagctgactctgatactatgaggaagagaaaagacgtgaataaggaccatgcagatcaggactcaagtgatggagctactgttaagaaggctagagttgtctggtctgttgaccttcaccagaaatttgtaaatgctgtcaaccaaattggatttgacatcgggccgaagaaaatactggatcttatgaatgttcctggcctgacaagagagaatgtggccagtcatcttcagaaataccgcctctacttgagtaggttgcaaaagcagaacgaggaaaggataatgggtgctgctaggcaagatttcaatcaaaagggaccatcggatcatcttaacctccgaagttccttccaagagcaaccaggcaacctttccaatggatgtcagcatagttctcagaaggtcgaagctcagaccaacattctcgatcctcatctggacgacacgaagacttcaatgcccttgaaggtgccagataaaaatggaatttcagcaagtgatgctgttgaccctcacaatatcaccactgcttcacctttaagtggggtgttctcttttgaaagaatgccagtgaatcaggacaggaagctatcagaaaccatgatcttggaatgtgagtcctggagtggaagtgtgccaccaaagcagttcatgcagtatccaaagcataaccatgagcgctgcgaccttctaggagactattcttgcttgcctaaaccggacttggagcacccaattgcccctggtcatctgtatgccccaccgccagtaatttcgatgagttacaatgtggagaaagatgtcagagacttctcagatgtaaaaccagatcttcttggctgtatgaagtccttatcaccagcactgacatgtacagttgagtcggtttctgctcaacttagtgacagtgttgtgacctcaactaacagtgaccggaagttttccagcgtggaggggttgtccagcattaaagattgtgactttgatcaggaaaggaacggagctattttgtttacttcagaagaggcaagtatattatgcggcactgattttacttgtctacctgaagacctgtccggctatcaacttcaaggtgtctccttcgggaataaaggattgaacagcatcgatttatatcagtgcaatgatacaatgttaatacctggactgcagaataattggtatgatgatgatgtagagtttagcagtgaaaccgtggagttcccattgctagacggaggcctgtttgcataaatgcctcatctggccctatctttcaaccatgcccttatgtcagcagggatgatgttcattggtatgttcccctatagcgcctcctgtagggctatatttaacctaacttgatcctgtggtggaaggatttaatttgtagtctcgccacttttgataattgtctgtattatagactgtgccatggcacaatgactgcaatatatactcttcacggtgatcaaaattacatatgaagactgt

SEQ ID NO: 31066 - DNA, 2879 bp, Zea Mays
actagtttttcaacctaaattggaccacacaggtactcggtgctccccatggatgttgaatgacatagaagccatgagtggcaggcaagttgtaatgcagggtattattgccagaactgcagacagaaccttgattggagtgtgatgatactgaaaatcagctgcttgcacattggaaacatgatgacatatctgaattacctgaaactgacaggtacccagccatcaacaagccagcaggggtagtgcattggctaaagcatagtccagaggccgacaatgttgattgggttgtaatcttggacgcagatcagattattcgagggcccattattccttgggaactcggagcagagaaagggaagccttttgctgcttattatgggggcattgagtacctatccatctacttgggacttaactttgtttggaatagtggttttctaactagggacattgaagaacaatatgatctcggtggcagcagcggtggcagatccttagctggtcgcctaaacccgaccattgatgtgttggtggcacatgttgtgtcatggctccaactctacgacaatggaagcttgggtggcaatcggacgtcactgggcatgagtcgtgggctgggctgtgataacatcctagcacagcttcacactgcacatccagaattttgtgacaaagttggaggaattctagccatgcatattgatgacttaagggctttagcacctctgtggctctcaaaaactgaagaagtgaggcaagataagtcccattggtcaaccaatattactggcgatatatatggcatgggttggatcagtgagatgtacgggtattcatttggtgctgcagaagtaggtctacggcacaagataaatgatgacataatgatctacccaggttatactcctagacctggcattgagccacttatcttgcactatggtttgccatttaaagttggaaactggtcattcagtaaattagaacaccatgaagatggaataatttatgattgcaaccgcttgttcgatccacctccttttcctagagaggttgagatgatggaatctgacccaaatataaaacgtggcttatttctaagcatagagtgcattaacaccttgaatgaaggactcttgttgcatcatgcatctgctggatgccctaaaccacagtggtcaaaatacctgagttttcttaaaagcaggaggttttcagagcttacaaaaccaaaatactggaagggtgaacaggttgacagcataatgaccatgcaacatgttgcattgtccaaggcaaacaatgaatatccaaaaatacacacccttttctctaccgaatgttcatcatattttgactggcaaactgttggacttatgcacagttttcgtttaagcggacagcctggtaacatcacgcgcttattgagctgtacggatgaggacttaaagaactataaaggacatgatcttgctcccacacattatgttccatctatgagccgacatccattgacaggggactggtaccctgcaataaacaaacctgcagcagttctccattggctcaatcatgtgcagactgatgctgagttccttgttatcctagatgctgatatgatcatgagaggccccatcaccccatgggaatatggtgcaaaacgtggccatcctgtttctactccttatgagtacctcattggttgtgataacatacttgcaaagatacacactcgcaatccctccgcgtgtgataaggttggtggtgtcattatcatgcatatagatgatcttcggcgttttgctctactgtggcttcacaaatcagaggaggttcgtgcagacaaagctcactatgcaaccaacattactggcgatatatataattctggctggattagcgagatgtatggctactcttttgcagcagctgagattaacctgcgacacatcattaggagggacataatgatatatccaggttatgttccactgcccagggcaaaatacagggttttccattatggtttgagatttggagttggtaattggagctttgacaaggcggattggagaaacgctgatgtagtaaatacatgctgggccaagttccctgaaccacctgatcctgctacgatcacgaaacaagatctagatgcacgggagagggattttctcagcattgaatgcgggagagctttgaacaaagccctatacctgcaccataagcgcagaaattgcccccggctagacaccattagcagcacatctaagaaaactgatcaagtttctgcttctaacaaaattgtgagtgttgcacaaaagtcaagaagtataagtagaggaaacatcgaatccatggacgagggaaggttgaagactgtcaagaggactgcagcttctgtacaacctctacatagatcaaggagactggccaggtcttctaggatgtggataattgctgtatgggcattatcaattgtggtgttcctattagtaatctccatgtttttcactgagcaaaggagaaacgcttcgagatctagggtttctagaagtttaaaggctcatgtctgagtattctctttttctaccgacacaatttctgactatagagcagacaatattcacaaactgttactttgtggacgtatataatacataaaaggattttgccaaaaggttatggtcctgggactgtataggctaacatctggtttgagttatcagaagccaaaggactagaacctttgcgaacgtctcctctcttttgtcaaaacttcccgtaaactgctagcatgtttcggtgccactgctgttgtacttgatttaataggttcttttattataacaatactgtgaagttccatatat

SEQ ID NO: 31067 - DNA, 2976 bp, Zea Mays
aaaaaataatataatatgtgatagttggtatagagttgagatatagagtaaacatgactgcagaggattgtggtatagagtaaacatgactgctgacggggatagaatatttctcttagagtagaaatttagagtagtatgagtgcggtgagtctctgacactagggcgcacaaacggacaacgaacccagctcgaaaagttgtccaggagaaaccgaaggtcggcgggatccgctctccgttcgggcgcgagatccgccatcccaccagcaatggcggcggggatcgccggcgcggtggtggcagcgctcctgcttctgtatccggccagggcagcggcagcggcggcggtgggggaggggcggcggttgcacactctgttctcggtggagtgcggcgactacttcgactggcaggcggtggggctcctccacagcctccgcaaggcccggcagcccggcggcgtcacccgcctcgtcagctgcgcggaggaccagctcccgtcctaccgcggcctccgcatcggccacaccctccaggtacccagccatcaacaagccagcaggggtagtgcattggctaaagcatagtccagaggccgacaatgttgattgggttgtaatcttggacgcagatcagattattcgagggcccattattccttgggaactcggagcagagaaagggaagccttttgctgcttattatggatatttgaagggctgtgataacatcctagcacagcttcacactgcacatccagaattttgtgacaaagttggaggaattctagccatgcatattgatgacttaagggctttagcacctctgtggctctcaaaaactgaagaagtgaggcaagataagtcccattggtcaaccaatattactggcgatatatatggcatgggttggatcagtgagatgtacgggtattcatttggtgctgcagaagtaggtctacggcacaagataaatgatgacataatgatctacccaggttatactcctagacctggcattgagccacttatcttgcactatggtttgccatttaaagttggaaactggtcattcagtaaattagaacaccatgaagatggaataatttatgattgcaaccgcttgttcgatccacctccttttcctagagaggttgagatgatggaatctgacccaaatataaaacgtggcttatttctaagcatagagtgcattaacaccttgaatgaaggactcttgttgcatcatgcatctgctggatgccctaaaccacagtggtcaaaatacctgagttttcttaaaagcaggaggttttcagagcttacaaaaccaaaatactggaagggtgaacaggttgacagcataatgaccatgcaacatgttgcattgtccaaggcaaacaatgaatatccaaaaatacacacccttttctctaccgaatgttcatcatattttgactggcaaactgttggacttatgcacagttttcgtttaagcggacagcctggtaacatcacgcgcttattgagctgtacggatgaggacttaaagaactataaaggacatgatcttgctcccacacattatgttccatctatgagccgacatccattgacaggggactggtaccctgcaataaacaaacctgcagcagttctccattggctcaatcatgtgcagactgatgctgagttccttgttatcctagatgctgatatgatcatgagaggccccatcaccccatgggaatatggtgcaaaacgtggccatcctgtttctactccttatgagtacctcattggttgtgataacatacttgcaaagatacacactcgcaatccctccgcgtgtgataaggttggtggtgtcattatcatgcatatagatgatcttcggcgttttgctctactgtggcttcacaaatcagaggaggttcgtgcagacaaagctcactatgcaaccaacattactggcgatatatataattctggctggattagcgagatgtatggctactcttttgcagcagctgagattaacctgcgacacatcattaggagggacataatgatatatccaggttatgttccactgcccagggcaaaatacagggttttccattatggtttgagatttggagttggtaattggagctttgacaaggcggattggagaaacgctgatgtagtaaatacatgctgggccaagttccctgaaccacctgatcctgctacgatcacgaaacaagatctagatgcacgggagagggattttctcagcattgaatgcgggagagctttgaacaaagccctatacctgcaccataagcgcagaaattgcccccggctagacaccattagcagcacatctaagaaaactgatcaagtttctgcttctaacaaaattgtgagtgttgcacaaaagtcaagaagtataagtagaggaaacatcgaatccatggacgagggaaggttgaagactgtcaagaggactgcagcttctgtacaacctctacatagatcaaggagactggccaggtcttctaggatgtggataattgctgtatgggcattatcaattgtggtgttcctattagtaatctccatgtttttcactgagcaaaggagaaacgcttcgagatctagggtttctagaagtttaaaggctcatgtctgagtattctctttttctaccgacacaatttctgactatagagcagacaatattcacaaactgttactttgtggacgtatataatacataaaaggattttgccaaaaggttatggtcctgggactgtataggctaacatctggtttgagttatcagaagccaaaggactagaacctttgcgaacgtctcctctcttttgtcaaaacttcccgtaaactgctagcatgtttcggtgccactgctgttgtacttgatttaataggttcttttattataacaatactgtgaagttccatatat

SEQ ID NO: 31068 - DNA, 2839 bp, Zea Mays
cggacaacgaacccagctcgaaaagttgtccaggagaaaccgaaggtcggcgggatccgctctccgttcgggcgcgagatccgccatcccaccagcaatggcggcggggatcgccggcgcggtggtggcagcgctcctgcttctgtatccggccagggcagcggcagcggcggcggtgggggaggggcggcggttgcacactctgttctcggtggagtgcggcgactacttcgactggcaggcggtggggctcctccacagcctccgcaaggcccggcagcccggcggcgtcacccgcctcgtcagctgcgcggaggaccagctcccgtcctaccgcggcctccgcatcggccacaccctccaggtcccctccttcagccgccacccacgcaccggcgactggtacccagccatcaacaagccagcaggggtagtgcattggctaaagcatagtccagaggccgacaatgttgattgggttgtaatcttggacgcagatcagattattcgagggcccattattccttgggaactcggagcagagaaagggaagccttttgctgcttattatggatatttgaagggctgtgataacatcctagcacagcttcacactgcacatccagaattttgtgacaaagttggaggaattctagccatgcatattgatgacttaagggctttagcacctctgtggctctcaaaaactgaagaagtgaggcaagataagtcccattggtcaaccaatattactggcgatatatatggcatgggttggatcagtgagatgtacgggtattcatttggtgctgcagaagtaggtctacggcacaagataaatgatgacataatgatctacccaggttatactcctagacctggcattgagccacttatcttgcactatggtttgccatttaaagttggaaactggtcattcagtaaattagaacaccatgaagatggaataatttatgattgcaaccgcttgttcgatccacctccttttcctagagaggttgagatgatggaatctgacccaaatataaaacgtggcttatttctaagcatagagtgcattaacaccttgaatgaaggactcttgttgcatcatgcatctgctggatgccctaaaccacagtggtcaaaatacctgagttttcttaaaagcaggaggttttcagagcttacaaaaccaaaatactggaagggtgaacaggttgacagcataatgaccatgcaacatgttgcattgtccaaggcaaacaatgaatatccaaaaatacacacccttttctctaccgaatgttcatcatattttgactggcaaactgttggacttatgcacagttttcgtttaagcggacagcctggtaacatcacgcgcttattgagctgtacggatgaggacttaaagaactataaaggacatgatcttgctcccacacattatgttccatctatgagccgacatccattgacaggggactggtaccctgcaataaacaaacctgcagcagttctccattggctcaatcatgtgcagactgatgctgagttccttgttatcctagatgctgatatgatcatgagaggccccatcaccccatgggaatatggtgcaaaacgtggccatcctgtttctactccttatgagtacctcattggttgtgataacatacttgcaaagatacacactcgcaatccctccgcgtgtgataaggttggtggtgtcattatcatgcatatagatgatcttcggcgttttgctctactgtggcttcacaaatcagaggaggttcgtgcagacaaagctcactatgcaaccaacattactggcgatatatataattctggctggattagcgagatgtatggctactcttttgcagcagctgagattaacctgcgacacatcattaggagggacataatgatatatccaggttatgttccactgcccagggcaaaatacagggttttccattatggtttgagatttggagttggtaattggagctttgacaaggcggattggagaaacgctgatgtagtaaatacatgctgggccaagttccctgaaccacctgatcctgctacgatcacgaaacaagatctagatgcacgggagagggattttctcagcattgaatgcgggagagctttgaacaaagccctatacctgcaccataagcgcagaaattgcccccggctagacaccattagcagcacatctaagaaaactgatcaagtttctgcttctaacaaaattgtgagtgttgcacaaaagtcaagaagtataagtagaggaaacatcgaatccatggacgagggaaggttgaagactgtcaagaggactgcagcttctgtacaacctctacatagatcaaggagactggccaggtcttctaggatgtggataattgctgtatgggcattatcaattgtggtgttcctattagtaatctccatgtttttcactgagcaaaggagaaacgcttcgagatctagggtttctagaagtttaaaggctcatgtctgagtattctctttttctaccgacacaatttctgactatagagcagacaatattcacaaactgttactttgtggacgtatataatacataaaaggattttgccaaaaggttatggtcctgggactgtataggctaacatctggtttgagttatcagaagccaaaggactagaacctttgcgaacgtctcctctcttttgtcaaaacttcccgtaaactgctagcatgtttcggtgccactgctgttgtacttgatttaataggttcttttattataacaatactgtgaagttccatatat

SEQ ID NO: 31069 - DNA, 2625 bp, Zea Mays
cggacaacgaacccagctcgaaaagttgtccaggagaaaccgaaggtcggcgggatccgctctccgttcgggcgcgagatccgccatcccaccagcaatggcggcggggatcgccggcgcggtggtggcagcgctcctgcttctgtatccggccagggcagcggcagcggcggcggtgggggaggggcggcggttgcacactctgttctcggtggagtgcggcgactacttcgactggcaggcggtggggctcctccacagcctccgcaaggcccggcagcccggcggcgtcacccgcctcgtcagctgcgcggaggaccagctcccgtcctaccgcggcctccgcatcggccacaccctccaggtacccagccatcaacaagccagcaggggtagtgcattggctaaagcatagtccagaggccgacaatgttgattgggttgtaatcttggacgcagatcagattattcgagggcccattattccttgggaactcggagcagagaaagggaagccttttgctgcttattatggatatttgaagggctgtgataacatcctagcacagcttcacactgcacatccagaattttgtgacaaagttggaggaattctagccatgcatattgatgacttaagggctttagcacctctgtggctctcaaaaactgaagaagtgaggcaagataagtcccattggtcaaccaatattactggcgatatatatggcatgggttggatcagtgagatgtacgggtattcatttggtgctgcagaagtctacggcacaagataaatgatgacataatgatctacccaggttatactcctagacctggcattgagccacttatcttgcactatggtttgccatttaaagttggaaactggtcattcagtaaattagaacaccatgaagatggaataatttatgattgcaaccgcttgttcgatccacctccttttcctagagaggttgagatgatggaatctgacccaaatataaaacgtggcttatttctaagcatagagtgcattaacaccttgaatgaaggactcttgttgcatcatgcatctgctggatgccctaaaccacagtggtcaaaatacctgagttttcttaaaagcaggaggttttcagagcttacaaaaccaaaatactggaagggtgaacaggttgacagcataatgaccatgcaacatgttgcattgtccaagttttcgtttaagcggacagcctggtaacatcacgcgcttattgagctgtacggatgaggacttaaagaactataaaggacatgatcttgctcccacacattatgttccatctatgagccgacatccattgacaggggactgatgctgatatgatcatgagaggccccatcaccccatgggaatatggtgcaaaacgtggccatcctgtttctactccttatgagtacctcattggttgtgataacatacttgcaaagatacacactcgcaatccctccgcgtgtgataaggttggtggtgtcattatcatgcatatagatgatcttcggcgttttgctctactgtggcttcacaaatcagaggaggttcgtgcagacaaagctcactatgcaaccaacattactggcgatatatataattctggctggattagcgagatgtatggctactcttttgcagcagctgagattaacctgcgacacatcattaggagggacataatgatatatccaggttatgttccactgcccagggcaaaatacagggttttccattatggtttgagatttggagttggtaattggagctttgacaaggcggattggagaaacgctgatgtagtaaatacatgctgggccaagttccctgaaccacctgatcctgctacgatcacgaaacaagatctagatgcacgggagagggattttctcagcattgaatgcgggagagctttgaacaaagccctatacctgcaccataagcgcagaaattgcccccggctagacaccattagcagcacatctaagaaaactgatcaagtttctgcttctaacaaaattgtgagtgttgcacaaaagtcaagaagtataagtagaggaaacatcgaatccatggacgagggaaggttgaagactgtcaagaggactgcagcttctgtacaacctctacatagatcaaggagactggccaggtcttctaggatgtggataattgctgtatgggcattatcaattgtggtgttcctattagtaatctccatgtttttcactgagcaaaggagaaacgcttcgagatctagggtttctagaagtttaaaggctcatgtctgagtattctctttttctaccgacacaatttctgactatagagcagacaatattcacaaactgttactttgtggacgtatataatacataaaaggattttgccaaaaggttatggtcctgggactgtataggctaacatctggtttgagttatcagaagccaaaggactagaacctttgcgaacgtctcctctcttttgtcaaaacttcccgtaaactgctagcatgtttcggtgccactgctgttgtacttgatttaataggttcttttattataacaatactgtgaagttccatatat

SEQ ID NO: 31070 - DNA, 2611 bp, Zea Mays
gaaaagttgtccaggagaaaccgaaggtcggcgggatccgctctccgttcgggcgcgagatccgccatcccaccagcaatggcggcggggatcgccggcgcggtggtggcagcgctcctgcttctgtatccggccagggcagcggcagcggcggcggtgggggaggggcggcggttgcacactctgttctcggtggagtgcggcgactacttcgactggcaggcggtggggctcctccacagcctccgcaaggcccggcagcccggcggcgtcacccgcctcgtcagctgcgcggaggaccagctcccgtcctaccgcggcctccgcatcggccacaccctccagatatttgaagggctgtgataacatcctagcacagcttcacactgcacatccagaattttgtgacaaagttggaggaattctagccatgcatattgatgacttaagggctttagcacctctgtggctctcaaaaactgaagaagtgaggcaagataagtcccattggtcaaccaatattactggcgatatatatggcatgggttggatcagtgagatgtacgggtattcatttggtgctgcagaagtaggtctacggcacaagataaatgatgacataatgatctacccaggttatactcctagacctggcattgagccacttatcttgcactatggtttgccatttaaagttggaaactggtcattcagtaaattagaacaccatgaagatggaataatttatgattgcaaccgcttgttcgatccacctccttttcctagagaggttgagatgatggaatctgacccaaatataaaacgtggcttatttctaagcatagagtgcattaacaccttgaatgaaggactcttgttgcatcatgcatctgctggatgccctaaaccacagtggtcaaaatacctgagttttcttaaaagcaggaggttttcagagcttacaaaaccaaaatactggaagggtgaacaggttgacagcataatgaccatgcaacatgttgcattgtccaaggcaaacaatgaatatccaaaaatacacacccttttctctaccgaatgttcatcatattttgactggcaaactgttggacttatgcacagttttcgtttaagcggacagcctggtaacatcacgcgcttattgagctgtacggatgaggacttaaagaactataaaggacatgatcttgctcccacacattatgttccatctatgagccgacatccattgacaggggactggtaccctgcaataaacaaacctgcagcagttctccattggctcaatcatgtgcagactgatgctgagttccttgttatcctagatgctgatatgatcatgagaggccccatcaccccatgggaatatggtgcaaaacgtggccatcctgtttctactccttatgagtacctcattggttgtgataacatacttgcaaagatacacactcgcaatccctccgcgtgtgataaggttggtggtgtcattatcatgcatatagatgatcttcggcgttttgctctactgtggcttcacaaatcagaggaggttcgtgcagacaaagctcactatgcaaccaacattactggcgatatatataattctggctggattagcgagatgtatggctactcttttgcagcagctgagattaacctgcgacacatcattaggagggacataatgatatatccaggttatgttccactgcccagggcaaaatacagggttttccattatggtttgagatttggagttggtaattggagctttgacaaggcggattggagaaacgctgatgtagtaaatacatgctgggccaagttccctgaaccacctgatcctgctacgatcacgaaacaagatctagatgcacgggagagggattttctcagcattgaatgcgggagagctttgaacaaagccctatacctgcaccataagcgcagaaattgcccccggctagacaccattagcagcacatctaagaaaactgatcaagtttctgcttctaacaaaattgtgagtgttgcacaaaagtcaagaagtataagtagaggaaacatcgaatccatggacgagggaaggttgaagactgtcaagaggactgcagcttctgtacaacctctacatagatcaaggagactggccaggtcttctaggatgtggataattgctgtatgggcattatcaattgtggtgttcctattagtaatctccatgtttttcactgagcaaaggagaaacgcttcgagatctagggtttctagaagtttaaaggctcatgtctgagtattctctttttctaccgacacaatttctgactatagagcagacaatattcacaaactgttactttgtggacgtatataatacataaaaggattttgccaaaaggttatggtcctgggactgtataggctaacatctggtttgagttatcagaagccaaaggactagaacctttgcgaacgtctcctctcttttgtcaaaacttcccgtaaactgctagcatgtttcggtgccactgctgttgtacttgatttaataggttcttttattataacaatactgtgaagttccatatat

SEQ ID NO: 31071 - DNA, 2700 bp, Zea Mays
atggcggcggggatcgccggcgcggtggtggcagcgctcctgcttctgtatccggccagggcagcggcagcggcggcggtgggggaggggcggcggttgcacactctgttctcggtggagtgcggcgactacttcgactggcaggcggtggggctcctccacagcctccgcaaggcccggcagcccggcggcgtcacccgcctcgtcagctgcgcggaggaccagctcccgtcctaccgcggcctccgcatcggccacaccctccaggtacccagccatcaacaagccagcaggggtagtgcattggctaaagcatagtccagaggccgacaatgttgattgggttgtaatcttggacgcagatcagattattcgagggcccattattccttgggaactcggagcagagaaagggaagccttttgctgcttattatggatatttgaagggctgtgataacatcctagcacagcttcacactgcacatccagaattttgtgacaaagttggaggaattctagccatgcatattgatgacttaagggctttagcacctctgtggctctcaaaaactgaagaagtgaggcaagataagtcccattggtcaaccaatattactggcgatatatatggcatgggttggatcagtgagatgtacgggtattcatttggtgctgcagaagtctacggcacaagataaatgatgacataatgatctacccaggttatactcctagacctggcattgagccacttatcttgcactatggtttgccatttaaagttggaaactggtcattcagtaaattagaacaccatgaagatggaataatttatgattgcaaccgcttgttcgatccacctccttttcctagagaggttgagatgatggaatctgacccaaatataaaacgtggcttatttctaagcatagagtgcattaacaccttgaatgaaggactcttgttgcatcatgcatctgctggatgccctaaaccacagtggtcaaaatacctgagttttcttaaaagcaggaggttttcagagcttacaaaaccaaaatactggaagggtgaacaggttgacagcataatgaccatgcaacatgttgcattgtccaaggcaaacaatgaatatccaaaaatacacacccttttctctaccgaatgttcatcatattttgactggcaaactgttggacttatgcacagttttcgtttaagcggacagcctggtaacatcacgcgcttattgagctgtacggatgaggacttaaagaactataaaggacatgatcttgctcccacacattatgttccatctatgagccgacatccattgacaggggactggtaccctgcaataaacaaacctgcagcagttctccattggctcaatcatgtgcagactgatgctgagttccttgttatcctagatgctgatatgatcatgagaggccccatcaccccatgggaatatggtgcaaaacgtggccatcctgtttctactccttatgagtacctcattggttgtgataacatacttgcaaagatacacactcgcaatccctccgcgtgtgataaggttggtggtgtcattatcatgcatatagatgatcttcggcgttttgctctactgtggcttcacaaatcagaggaggttcgtgcagacaaagctcactatgcaaccaacattactggcgatatatataattctggctggattagcgagatgtatggctactcttttgcagcagctgagattaacctgcgacacatcattaggagggacataatgatatatccaggttatgttccactgcccagggcaaaatacagggttttccattatggtttgagatttggagttggtaattggagctttgacaaggcggattggagaaacgctgatgtagtaaatacatgctgggccaagttccctgaaccacctgatcctgctacgatcacgaaacaagatctagatgcacgggagagggattttctcagcattgaatgcgggagagctttgaacaaagccctatacctgcaccataagcgcagaaattgcccccggctagacaccattagcagcacatctaagaaaactgatcaagtttctgcttctaacaaaattgtgagtgttgcacaaaagtcaagaagtataagtagaggaaacatcgaatccatggacgagggaaggttgaagactgtcaagaggactgcagcttctgtacaacctctacatagatcaaggagactggccaggtcttctaggatgtggataattgctgtatgggcattatcaattgtggtgttcctattagtaatctccatgtttttcactgagcaaaggagaaacgcttcgagatctagggtttctagaagtttaaaggctcatgtctgagtattctctttttctaccgacacaatttctgactatagagcagacaatattcacaaactgttactttgtggacgtatataatacataaaaggattttgccaaaaggttatggtcctgggactgtataggctaacatctggtttgagttatcagaagccaaaggactagaacctttgcgaacgtctcctctcttttgtcaaaacttcccgtaaactgctagcatgtttcggtgccactgctgttgtacttgatttaataggttcttttattataacaatactgtgaagttccatatat

SEQ ID NO: 31072 - DNA, 2571 bp, Zea Mays
atggcggcggggatcgccggcgcggtggtggcagcgctcctgcttctgtatccggccagggcagcggcagcggcggcggtgggggaggggcggcggttgcacactctgttctcggtggagtgcggcgactacttcgactggcaggcggtggggctcctccacagcctccgcaaggcccggcagcccggcggcgtcacccgcctcgtcagctgcgcggaggaccagctcccgtcctaccgcggcctccgcatcggccacaccctccaggtcccctccttcagccgccacccacgcaccggcgactgatatttgaagggctgtgataacatcctagcacagcttcacactgcacatccagaattttgtgacaaagttggaggaattctagccatgcatattgatgacttaagggctttagcacctctgtggctctcaaaaactgaagaagtgaggcaagataagtcccattggtcaaccaatattactggcgatatatatggcatgggttggatcagtgagatgtacgggtattcatttggtgctgcagaagtaggtctacggcacaagataaatgatgacataatgatctacccaggttatactcctagacctggcattgagccacttatcttgcactatggtttgccatttaaagttggaaactggtcattcagtaaattagaacaccatgaagatggaataatttatgattgcaaccgcttgttcgatccacctccttttcctagagaggttgagatgatggaatctgacccaaatataaaacgtggcttatttctaagcatagagtgcattaacaccttgaatgaaggactcttgttgcatcatgcatctgctggatgccctaaaccacagtggtcaaaatacctgagttttcttaaaagcaggaggttttcagagcttacaaaaccaaaatactggaagggtgaacaggttgacagcataatgaccatgcaacatgttgcattgtccaaggcaaacaatgaatatccaaaaatacacacccttttctctaccgaatgttcatcatattttgactggcaaactgttggacttatgcacagttttcgtttaagcggacagcctggtaacatcacgcgcttattgagctgtacggatgaggacttaaagaactataaaggacatgatcttgctcccacacattatgttccatctatgagccgacatccattgacaggggactggtaccctgcaataaacaaacctgcagcagttctccattggctcaatcatgtgcagactgatgctgagttccttgttatcctagatgctgatatgatcatgagaggccccatcaccccatgggaatatggtgcaaaacgtggccatcctgtttctactccttatgagtacctcattggttgtgataacatacttgcaaagatacacactcgcaatccctccgcgtgtgataaggttggtggtgtcattatcatgcatatagatgatcttcggcgttttgctctactgtggcttcacaaatcagaggaggttcgtgcagacaaagctcactatgcaaccaacattactggcgatatatataattctggctggattagcgagatgtatggctactcttttgcagcagctgagattaacctgcgacacatcattaggagggacataatgatatatccaggttatgttccactgcccagggcaaaatacagggttttccattatggtttgagatttggagttggtaattggagctttgacaaggcggattggagaaacgctgatgtagtaaatacatgctgggccaagttccctgaaccacctgatcctgctacgatcacgaaacaagatctagatgcacgggagagggattttctcagcattgaatgcgggagagctttgaacaaagccctatacctgcaccataagcgcagaaattgcccccggctagacaccattagcagcacatctaagaaaactgatcaagtttctgcttctaacaaaattgtgagtgttgcacaaaagtcaagaagtataagtagaggaaacatcgaatccatggacgagggaaggttgaagactgtcaagaggactgcagcttctgtacaacctctacatagatcaaggagactggccaggtcttctaggatgtggataattgctgtatgggcattatcaattgtggtgttcctattagtaatctccatgtttttcactgagcaaaggagaaacgcttcgagatctagggtttctagaagtttaaaggctcatgtctgagtattctctttttctaccgacacaatttctgactatagagcagacaatattcacaaactgttactttgtggacgtatataatacataaaaggattttgccaaaaggttatggtcctgggactgtataggctaacatctggtttgagttatcagaagccaaaggactagaacctttgcgaacgtctcctctcttttgtcaaaacttcccgtaaactgctagcatgtttcggtgccactgctgttgtacttgatttaataggttcttttattataacaatactgtgaagttccatatat

SEQ ID NO: 31073 - DNA, 4370 bp, Zea Mays
gagggacacgagaatagctcgtcaattcgtcatcgctcgatgctcgatgcctcgatctcggccactcggctgctctccacacacggccgggtgacaagtgacgctcccctccatcgcttccacttcgaaacatttcgaattcctcaacccccgaaagggcgaaaaccccaacgcctccaaaagtttcccgcccgagcccctcgaaccctagtaccatcaccgactggcgacgcctcgccggcggccggcgagatgcacatcaaggaggtaactctcgaggggttcaagtcgtacgcgggacggactgtggtgccggggttcgacccgctgttcaacgccatcaccgggctcaacggttccggcaagtccaacatcctcgactccatctgcttcgtgctcggcatcacagatctccgtcaggtacgcgctgcctcgctccaggagctcgtctacaagcaaggccaggccggggtcaccaaggctaccgtgtccatcgtcttcgacaattccgaccgctcccgctccccgctcggctacgaggactccccggagatcactgtcacgcgccagattgttgttggtggaaggaacaaataccttatcaatggccatcttgcacaaccttcccgggtgcagacccttttccactcagtgcagcttaatgtaaacaatcctcattttctaattatgcaagggcgcataacaaaagtgctgaacatgaagcctccagaaattttgtcaatgttagaagaggcagcaggtacaagaatgtacgaaatgaagaaagaatctgctcttaagacacttgaaaagaagcagaataaagttgatgagattaataaactccttgatgttgaaatcctccctgcactagagaaacttagaaaagagcggtgtcaatacatgaaatgggccaatggcaatgctgaactggataggctcaaaagattttgtattgcctatgactttgttcaggctgagagagtgcgagatggcgcactgaatgatgtcaaacaaattaaaacaaagattgttgagctggatgaaactacagaaaacataaaagcagctatacaagaaatggacaataacatttctaccttggctgctgaaaaagaagctaaagtaggtggtgaaatgaaggttctgtcagacaaagtggataaactatcacatgtacttatcaaggaaacttctgtgatgaataatcaagaggaaaccctgaagtctgaggaaaagggtgctgagaagattctcacaaacattgaggacataaaaaggtctatactcgagagagatgctgctgtaaaaaatgtagagaatgaggcttctgacatgaaaagaagagcagaggatctcacaaaggagttggacgagaaggagaaagaataccagggtgtgctagcaggaaaaagcagtgcaaatgagaagaaatgccttgaagatcaactgagagatgcaaaagctgcagttggagatgcagaatctggactaaagcagctagctacaaaaataaagcattctgaaaaggagttgaaggagaagaaaactctattagtatccaagcgtgatgaggctattgctgctgagaatgagctgaaaacaaggacaaaagacttagaaggtatcaaggcatccatgggatctattaattatgacgagggtcagatggaagctttgcaaaaggaccgttctgcagagttagaaattattcaaaaattaaaggatcgtgttcgtaacctttctggtgagcttgctaatgttcacttcagttatcgagaccctgaaagaaattttgacagatcaaaagtcaaaggggttgttgcacgtcttattaggattaaggacagctcaacagcaacagcactggaggttgctgcaggtgggaggttattcaatgtggttgttgacactgaagaaactggaaagcaacttttaaaaaatggggatctacgaagtagagtaaccatcatacctttgaacaaaatccaaacttacatgatacctgacagagttcagcagacagctcgtagactggttggtcctgacaatgtaacattagctctagaattggttggatatggtgaggaagtaaagaatgccgtggcttttgtctttggctcaacatttgtgtgtcgtaatatggatgcggcaaaagaggttgcgtttaataggcaaattagcagtactagtgtgactcttgagggtgacacttatcagccaagtggtcttttgactggaggtagtaaagggggtagagggaacttgctaaggaaactcgacgaactagctaaagctgaggctgatctatctgatcatgagaaaaagctctttgtcattgaacagcagattggagcccttttaccattgcagaaaaggcacactgagttgaaatctcagtttgaactgaagtcatatgatctctcgctgtttcagaacagagttgagcaaaatgaacatcacaagttaggtgagctcgtaaagaaaattgaacaagagcttcaagaatctaaacaagagttgacagaaaagcaagtgcagcatgaaaaatgtgtgtccacagtttctgagttagagaaaactatcaaaacttatggcacggaacgagagggcaaactcaaagcgctggaaaaaagaatcaaatcaattaaatcagagatgcagtcgatgtcgaagcaactaaaggcttatgaaagtgacagggagaggctgatcatggagaaagatgcggttgttggtgagcttgctacactggaagagcagctaacgacttcaaaagctcagattacttctctgtctgaaaccttggaaaaacagaaggacaaggttacatccataaagcaagattatgatcaagctgaaagtgagctcaacgttgggcgttctaaactgaaggaatgtgactcacagataaaccgtatggccaaggaacagcagaaacttcaacagaagttaagtgattcaaatgttgagaggaagaaaatggaaaatgaggttaagaggatggagatagagcagaaggattgctcttcaatagttgataagctagtcgagaaatataattggattgcaactgagaaacaattgtttgggaaaagtggtacagattatgattttgaatcttgtgaaccacataaagcccgagaggaacttgaaaatcttcaagctcaacaatccagtcttgagaagagggtcaataagaaagtaatggcaatgtttgagaaggcggaggatgagtacaatgatttgatgtcaaagaaaaacatcatcgagaatgacaaggcaaaaatcaagaaagtgatagaggagttggatgagaagaagaaggaaacattgaaggtcacttggctcaaagtaaacaaggatttcgggtctatattcagtactcttttacctggtacaatggcaaaacttgatcctccagaaggtggtacttttttggatggtcttgaagttcgtgtggcatttgggacagtttggaagcagtctctgtctgaacttagtggaggacaacgatcccttcttgctcttagtcttatcctggctctgcttctttttaaacctgcaccactttacatattggacgaggttgatgctgctcttgatctgagccacactcaaaacattggtagaatgatcaaggctcattttccgcactctcagttcatagttgtctctttaaaagagggtatgttcaacaacgccaatgtgatatttcgaacaaaatttgttgatggtgtgtccaccgtgacacgaacagtgccttcgaaacagagatgaccagtttacacatcatgcatcttctgaaccaaaactaggcatacaattccaaaactgtcattttaaggagctgctataatcaaacattttcgctgtttattcagccatgtttattcagccaggaaaattattccatgaaagctgaaccccacaattacttgacgctgatgcctcaagcccctcgcttgtcaggcaatgacatcaaaataggtgctgtaactgtaatctcatggcgtgacgttcatgatgacctcgactggcttctacattatgcgctttcttctgacctgatgtgtaattagcggttgaactattttgtgttgaaggtcgaccgtgtagcatgtatgtaacagccatttataaccaaggtcatgtataattctgacttgcaaatttaccctatgttgatttaccttttattacttagaacaaaaatctcatcatagttttagaaagtcaatgctctaaacacttcataatattattgactatcgtgtgcattgccgagaatgatttggtcattgttagtttctacgtcactgctcatggattttgtggcgttttttttttctgaaagcattgaagataag

SEQ ID NO: 31074 - DNA, 4581 bp, Zea Mays
ctcgatgctcgatgcctcgatctcggccactcggctgctctccacacacggccgggtgacaagtgacgctcccctccatcgcttccacttcgaaacatttcgaattcctcaacccccgaaagggcgaaaaccccaacgcctccaaaagtttcccgcccgagcccctcgaaccctagtaccatcaccgactggcgacgcctcgccggcggccggcgagatgcacatcaaggaggtaactctcgaggggttcaagtcgtacgcgggacggactgtggtgccggggttcgacccgctgttcaacgccatcaccgggctcaacggttccggcaagtccaacatcctcgactccatctgcttcgtgctcggcatcacagatctccgtcaggtacgcgctgcctcgctccaggagctcgtctacaagcaaggccaggccggggtcaccaaggctaccgtgtccatcgtcttcgacaattccgaccgctcccgctccccgctcggctacgaggactccccggagatcactgtcacgcgccagattgttgttggtggaaggaacaaataccttatcaatggccatcttgcacaaccttcccgggtgcagacccttttccactcagtgcagcttaatgtaaacaatcctcattttctaattatgcaagggcgcataacaaaagtgctgaacatgaagcctccagaaattttgtcaatgttagaagaggcagcaggtacaagaatgtacgaaatgaagaaagaatctgctcttaagacacttgaaaagaagcagaataaagttgatgagattaataaactccttgatgttgaaatcctccctgcactagagaaacttagaaaagagcggtgtcaatacatgaaatgggccaatggcaatgctgaactggataggctcaaaagattttgtattgcctatgactttgttcaggctgagagagtgcgagatggcgcactgaatgatgtcaaacaaattaaaacaaagattgttgagctggatgaaactacagaaaacataaaagcagctatacaagaaatggacaataacatttctaccttggctgctgaaaaagaagctaaagtaggtggtgaaatgaaggttctgtcagacaaagtggataaactatcacatgtacttatcaaggaaacttctgtgatgaataatcaagaggaaaccctgaagtctgaggaaaagggtgctgagaagattctcacaaacattgaggacataaaaaggtctatactcgagagagatgctgctgtaaaaaatgtagagaatgaggcttctgacatgaaaagaagagcagaggatctcacaaaggagttggacgagaaggagaaagaataccagggtgtgctagcaggaaaaagcagtgcaaatgagaagaaatgccttgaagatcaactgagagatgcaaaagctgcagttggagatgcagaatctggactaaagcagctagctacaaaaataaagcattctgaaaaggagttgaaggagaagaaaactctattagtatccaagcgtgatgaggctattgctgctgagaatgagctgaaaacaaggacaaaagacttagaaggtatcaaggcatccatgggatctattaattatgacgagggtcagatggaagctttgcaaaaggaccgttctgcagagttagaaattattcaaaaattaaaggatcgtgttcgtaacctttctggtgagcttgctaatgttcacttcagttatcgagaccctgaaagaaattttgacagatcaaaagtcaaaggggttgttgcacgtcttattaggattaaggacagctcaacagcaacagcactggaggttgctgcaggtgggaggttattcaatgtggttgttgacactgaagaaactggaaagcaacttttaaaaaatggggatctacgaagtagagtaaccatcatacctttgaacaaaatccaaacttacatgatacctgacagagttcagcagacagctcgtagactggttggtcctgacaatgtaacattagctctagaattggttggatatggtgaggaagtaaagaatgccgtggcttttgtctttggctcaacatttgtgtgtcgtaatatggatgcggcaaaagaggttgcgtttaataggcaaattagcagtactagtgtgactcttgagggtgacacttatcagccaagtggtcttttgactggaggtagtaaagggggtagagggaacttgctaaggaaactcgacgaactagctaaagctgaggctgatctatctgatcatgagaaaaagctctttgtcattgaacagcagattggagcccttttaccattgcagaaaaggcacactgagttgaaatctcagtttgaactgaagtcatatgatctctcgctgtttcagaacagagttgagcaaaatgaacatcacaagttaggtgagctcgtaaagaaaattgaacaagagcttcaagaatctaaacaagagttgacagaaaagcaagtgcagcatgaaaaatgtgtgtccacagtttctgagttagagaaaactatcaaaacttatggcacggaacgagagggcaaactcaaagcgctggaaaaaagaatcaaatcaattaaatcagagatgcagtcgatgtcgaagcaactaaagttgcggaagaattctggatgttgaccctggacctagttggtatgacttaggagtcatgattgactacggcactggctatgcaggcataaaagaaactggggcaaatggtcaatctgattgcttaaatgcaaaatactgctagtctccccctacattgagttagtctggcagtaaataactcaatcggatggggctcaagccccctactgtctctgcaaccatggaacgcccccttgcaacttgcaagcttatgaaagtgacagggagaggctgatcatggagaaagatgcggttgttggtgagcttgctacactggaagagcagctaacgacttcaaaagctcagattacttctctgtctgaaaccttggaaaaacagaaggacaaggttacatccataaagcaagattatgatcaagctgaaagtgagctcaacgttgggcgttctaaactgaaggaatgtgactcacagataaaccgtatggccaaggaacagcagaaacttcaacagaagttaagtgattcaaatgttgagaggaagaaaatggaaaatgaggttaagaggatggagatagagcagaaggattgctcttcaatagttgataagctagtcgagaaatataattggattgcaactgagaaacaattgtttgggaaaagtggtacagattatgattttgaatcttgtgaaccacataaagcccgagaggaacttgaaaatcttcaagctcaacaatccagtcttgagaagagggtcaataagaaagtaatggcaatgtttgagaaggcggaggatgagtacaatgatttgatgtcaaagaaaaacatcatcgagaatgacaaggcaaaaatcaagaaagtgatagaggagttggatgagaagaagaaggaaacattgaaggtcacttggctcaaagtaaacaaggatttcgggtctatattcagtactcttttacctggtacaatggcaaaacttgatcctccagaaggtggtacttttttggatggtcttgaagttcgtgtggcatttgggacagtttggaagcagtctctgtctgaacttagtggaggacaacgatcccttcttgctcttagtcttatcctggctctgcttctttttaaacctgcaccactttacatattggacgaggttgatgctgctcttgatctgagccacactcaaaacattggtagaatgatcaaggctcattttccgcactctcagttcatagttgtctctttaaaagagggtatgttcaacaacgccaatgtgatatttcgaacaaaatttgttgatggtgtgtccaccgtgacacgaacagtgccttcgaaacagagatgaccagtttacacatcatgcatcttctgaaccaaaactaggcatacaattccaaaactgtcattttaaggagctgctataatcaaacattttcgctgtttattcagccatgtttattcagccaggaaaattattccatgaaagctgaaccccacaattacttgacgctgatgcctcaagcccctcgcttgtcaggcaatgacatcaaaataggtgctgtaactgtaatctcatggcgtgacgttcatgatgacctcgactggcttctacattatgcgctttcttctgacctgatgtgtaattagcggttgaactattttgtgttgaaggtcgaccgtgtagcatgtatgtaacagccatttataaccaaggtcatgtataattctgacttgcaaatttaccctatgttgatttaccttttattacttagaacaaaaatctcatcatagttttagaaagtcaatgctctaaacacttcataatattattgactatcgtgtgcattgccgagaatgatttggtcattgttagtttctacgtcactgctcatggattttgtggcgttttttttttctgaaagcattgaagataag

SEQ ID NO: 31075 - DNA, 4257 bp, Zea Mays
tccacttcgaaacatttcgaattcctcaacccccgaaagggcgaaaaccccaacgcctccaaaagtttcccgcccgagcccctcgaaccctagtaccatcaccgactggcgacgcctcgccggcggccggcgagatgcacatcaaggaggtaactctcgaggggttcaagtcgtacgcgggacggactgtggtgccggggttcgacccgctgttcaacgccatcaccgggctcaacggttccggcaagtccaacatcctcgactccatctgcttcgtgctcggcatcacagatctccgtcaggtacgcgctgcctcgctccaggagctcgtctacaagcaaggccaggccggggtcaccaaggctaccgtgtccatcgtcttcgacaattccgaccgctcccgctccccgctcggctacgaggactccccggagatcactgtcacgcgccagattgttgttggtggaaggaacaaataccttatcaatggccatcttgcacaaccttcccgggtgcagacccttttccactcagtgcagcttaatgtaaacaatcctcattttctaattatgcaagggcgcataacaaaagtgctgaacatgaagcctccagaaattttgtcaatgttagaagaggcagcaggtacaagaatgtacgaaatgaagaaagaatctgctcttaagacacttgaaaagaagcagaataaagttgatgagattaataaactccttgatgttgaaatcctccctgcactagagaaacttagaaaagagcggtgtcaatacatgaaatgggccaatggcaatgctgaactggataggctcaaaagattttgtattgcctatgactttgttcaggctgagagagtgcgagatggcgcactgaatgatgtcaaacaaattaaaacaaagattgttgagctggatgaaactacagaaaacataaaagcagctatacaagaaatggacaataacatttctaccttggctgctgaaaaagaagctaaagtaggtggtgaaatgaaggttctgtcagacaaagtggataaactatcacatgtacttatcaaggaaacttctgtgatgaataatcaagaggaaaccctgaagtctgaggaaaagggtgctgagaagattctcacaaacattgaggacataaaaaggtctatactcgagagagatgctgctgtaaaaaatgtagagaatgaggcttctgacatgaaaagaagagcagaggatctcacaaaggagttggacgagaaggagaaagaataccagggtgtgctagcaggaaaaagcagtgcaaatgagaagaaatgccttgaagatcaactgagagatgcaaaagctgcagttggagatgcagaatctggactaaagcagctagctacaaaaataaagcattctgaaaaggagttgaaggagaagaaaactctattagtatccaagcgtgatgaggctattgctgctgagaatgagctgaaaacaaggacaaaagacttagaaggtatcaaggcatccatgggatctattaattatgacgagggtcagatggaagctttgcaaaaggaccgttctgcagagttagaaattattcaaaaattaaaggatcgtgttcgtaacctttctggtgagcttgctaatgttcacttcagttatcgagaccctgaaagaaattttgacagatcaaaagtcaaaggggttgttgcacgtcttattaggattaaggacagctcaacagcaacagcactggagtgcaggttgctgcaggtgggaggttattcaatgtggttgttgacactgaagaaactggaaagcaacttttaaaaaatggggatctacgaagtagagtaaccatcatacctttgaacaaaatccaaacttacatgatacctgacagagttcagcagacagctcgtagactggttggtcctgacaatgtaacattagctctagaattggttggatatggtgaggaagtaaagaatgccgtggcttttgtctttggctcaacatttgtgtgtcgtaatatggatgcggcaaaagaggttgcgtttaataggcaaattagcagtactagtgtgactcttgagggtgacacttatcagccaagtggtcttttgactggaggtagtaaagggggtagagggaacttgctaaggaaactcgacgaactagctaaagctgaggctgatctatctgatcatgagaaaaagctctttgtcattgaacagcagattggagcccttttaccattgcagaaaaggcacactgagttgaaatctcagtttgaactgaagtcatatgatctctcgctgtttcagaacagagttgagcaaaatgaacatcacaagttaggtgagctcgtaaagaaaattgaacaagagcttcaagaatctaaacaagagttgacagaaaagcaagtgcagcatgaaaaatgtgtgtccacagtttctgagttagagaaaactatcaaaacttatggcacggaacgagagggcaaactcaaagcgctggaaaaaagaatcaaatcaattaaatcagagatgcagtcgatgtcgaagcaactaaaggcttatgaaagtgacagggagaggctgatcatggagaaagatgcggttgttggtgagcttgctacactggaagagcagctaacgacttcaaaagctcagattacttctctgtctgaaaccttggaaaaacagaaggacaaggttacatccataaagcaagattatgatcaagctgaaagtgagctcaacgttgggcgttctaaactgaaggaatgtgactcacagataaaccgtatggccaaggaacagcagaaacttcaacagaagttaagtgattcaaatgttgagaggaagaaaatggaaaatgaggttaagaggatggagatagagcagaaggattgctcttcaatagttgataagctagtcgagaaatataattggattgcaactgagaaacaattgtttgggaaaagtggtacagattatgattttgaatcttgtgaaccacataaagcccgagaggaacttgaaaatcttcaagctcaacaatccagtcttgagaagagggtcaataagaaagtaatggcaatgtttgagaaggcggaggatgagtacaatgatttgatgtcaaagaaaaacatcatcgagaatgacaaggcaaaaatcaagaaagtgatagaggagttggatgagaagaagaaggaaacattgaaggtcacttggctcaaagtaaacaaggatttcgggtctatattcagtactcttttacctggtacaatggcaaaacttgatcctccagaaggtggtacttttttggatggtcttgaagttcgtgtggcatttgggacagtttggaagcagtctctgtctgaacttagtggaggacaacgatcccttcttgctcttagtcttatcctggctctgcttctttttaaacctgcaccactttacatattggacgaggttgatgctgctcttgatctgagccacactcaaaacattggtagaatgatcaaggctcattttccgcactctcagttcatagttgtctctttaaaagagggtatgttcaacaacgccaatgtgatatttcgaacaaaatttgttgatggtgtgtccaccgtgacacgaacagtgccttcgaaacagagatgaccagtttacacatcatgcatcttctgaaccaaaactaggcatacaattccaaaactgtcattttaaggagctgctataatcaaacattttcgctgtttattcagccatgtttattcagccaggaaaattattccatgaaagctgaaccccacaattacttgacgctgatgcctcaagcccctcgcttgtcaggcaatgacatcaaaataggtgctgtaactgtaatctcatggcgtgacgttcatgatgacctcgactggcttctacattatgcgctttcttctgacctgatgtgtaattagcggttgaactattttgtgttgaaggtcgaccgtgtagcatgtatgtaacagccatttataaccaaggtcatgtataattctgacttgcaaatttaccctatgttgatttaccttttattacttagaacaaaaatctcatcatagttttagaaagtcaatgctctaaacacttcataatattattgactatcgtgtgcattgccgagaatgatttggtcattgttagtttctacgtcactgctcatggattttgtggcgttttttttttctgaaagcattgaagataag

SEQ ID NO: 31076 - DNA, 2417 bp, Zea Mays
gggggggtaggtgatttggggtttgcgccacgattttgatttgcatatcctcaatttcggcgctgatgtgtcaagttggattaagatgctgccctgcgaactccgaagaggagctgctgcatgaggtggtttcaggtaaaaggagatggtgacttgcgatgtctggagctggaattttgaggagattgttgttggtggaaggaacaaataccttatcaatggccatcttgcacaaccttcccgggtgcagacccttttccactcagtgcagcttaatgtaaacaatcctcattttctaattatgcaagggcgcataacaaaagtgctgaacatgaagcctccagaaattttgtcaatgttagaagaggcagcaggtacaagaatgtacgaaatgaagaaagaatctgctcttaagacacttgaaaagaagcagaataaagttgatgagattaataaactccttgatgttgaaatcctccctgcactagagaaacttagaaaagagcggtgtcaatacatgaaatgggccaatggcaatgctgaactggataggctcaaaagattttgtattgcctatgactttgttcaggctgagagagtgcgagatggcgcactgaatgatgtcaaacaaattaaaacaaagattgttgagctggatgaaactacagaaaacataaaagcagctatacaagaaatggacaataacatttctaccttggctgctgaaaaagaagctaaagtaggtggtgaaatgaaggttctgtcagacaaagtggataaactatcacatgtacttatcaaggaaacttctgtgatgaataatcaagaggaaaccctgaagtctgaggaaaagggtgctgagaagattctcacaaacattgaggacataaaaaggtctatactcgagagagatgctgctgtaaaaaatgtagagaatgaggcttctgacatgaaaagaagagcagaggatctcacaaaggagttggacgagaaggagaaagaataccagggtgtgctagcaggaaaaagcagtgcaaatgagaagaaatgccttgaagatcaactgagagatgcaaaagctgcagttggagatgcagaatctggactaaagcagctagctacaaaaataaagcattctgaaaaggagttgaaggagaagaaaactctattagtatccaagcgtgatgaggctattgctgctgagaatgagctgaaaacaaggacaaaagacttagaaggtatcaaggcatccatgggatctattaattatgacgagggtcagatggaagctttgcaaaaggaccgttctgcagagttagaaattattcaaaaattaaaggatcgtgttcgtaacctttctggtgagcttgctaatgttcacttcagttatcgagaccctgaaagaaattttgacagatcaaaagtcaaaggggttgttgcacgtcttattaggattaaggacagctcaacagcaacagcactggaggttgctgcaggtgggaggttattcaatgtggttgttgacactgaagaaactggaaagcaacttttaaaaaatggggatctacgaagtagagtaaccatcatacctttgaacaaaatccaaacttacatgatacctgacagagttcagcagacagctcgtagactggttggtcctgacaatgtaacattagctctagaattggttggatatggtgaggaagtaaagaatgccgtggcttttgtctttggctcaacatttgtgtgtcgtaatatggatgcggcaaaagaggttgcgtttaataggcaaattagcagtactagtgtgactcttgagggtgacacttatcagccaagtggtcttttgactggaggtagtaaagggggtagagggaacttgctaaggaaactcgacgaactagctaaagctgaggctgatctatctgatcatgagaaaaagctctttgtcattgaacagcagattggagcccttttaccattgcagaaaaggcacactgagttgaaatctcagtttgaactgaagtcatatgatctctcgctgtttcagaacagagttgagcaaaatgaacatcacaagttaggtgagctcgtaaagaaaattgaacaagagcttcaagaatctaaacaagagttgacagaaaagcaagtgcagcatgaaaaatgtgtgtccacagtttctgagttagagaaaactatcaaaacttatggcacggaacgagagggcaaactcaaagcgctggaaaaaagaatcaaatcaattaaatcagagatgcagtcgatgtcgaagcaactaaagttgcggaagaattctggatgttgaccctggacctagttggtatgacttaggagtcatgattgactacggcactggctatgcaggcataaaagaaactggggcaaatggtcaatctgat

SEQ ID NO: 31077 - DNA, 3984 bp, Zea Mays
gggggggtaggtgatttggggtttgcgccacgattttgatttgcatatcctcaatttcggcgctgatgtgtcaagttggattaagatgctgccctgcgaactccgaagaggagctgctgcatgaggtggtttcaggtaaaaggagatggtgacttgcgatgtctggagctggaattttgaggagattgttgttggtggaaggaacaaataccttatcaatggccatcttgcacaaccttcccgggtgcagacccttttccactcagtgcagcttaatgtaaacaatcctcattttctaattatgcaagggcgcataacaaaagtgctgaacatgaagcctccagaaattttgtcaatgttagaagaggcagcaggtacaagaatgtacgaaatgaagaaagaatctgctcttaagacacttgaaaagaagcagaataaagttgatgagattaataaactccttgatgttgaaatcctccctgcactagagaaacttagaaaagagcggtgtcaatacatgaaatgggccaatggcaatgctgaactggataggctcaaaagattttgtattgcctatgactttgttcaggctgagagagtgcgagatggcgcactgaatgatgtcaaacaaattaaaacaaagattgttgagctggatgaaactacagaaaacataaaagcagctatacaagaaatggacaataacatttctaccttggctgctgaaaaagaagctaaagtaggtggtgaaatgaaggttctgtcagacaaagtggataaactatcacatgtacttatcaaggaaacttctgtgatgaataatcaagaggaaaccctgaagtctgaggaaaagggtgctgagaagattctcacaaacattgaggacataaaaaggtctatactcgagagagatgctgctgtaaaaaatgtagagaatgaggcttctgacatgaaaagaagagcagaggatctcacaaaggagttggacgagaaggagaaagaataccagggtgtgctagcaggaaaaagcagtgcaaatgagaagaaatgccttgaagatcaactgagagatgcaaaagctgcagttggagatgcagaatctggactaaagcagctagctacaaaaataaagcattctgaaaaggagttgaaggagaagaaaactctattagtatccaagcgtgatgaggctattgctgctgagaatgagctgaaaacaaggacaaaagacttagaaggtatcaaggcatccatgggatctattaattatgacgagggtcagatggaagctttgcaaaaggaccgttctgcagagttagaaattattcaaaaattaaaggatcgtgttcgtaacctttctggtgagcttgctaatgttcacttcagttatcgagaccctgaaagaaattttgacagatcaaaagtcaaaggggttgttgcacgtcttattaggattaaggacagctcaacagcaacagcactggaggttgctgcaggtgggaggttattcaatgtggttgttgacactgaagaaactggaaagcaacttttaaaaaatggggatctacgaagtagagtaaccatcatacctttgaacaaaatccaaacttacatgatacctgacagagttcagcagacagctcgtagactggttggtcctgacaatgtaacattagctctagaattggttggatatggtgaggaagtaaagaatgccgtggcttttgtctttggctcaacatttgtgtgtcgtaatatggatgcggcaaaagaggttgcgtttaataggcaaattagcagtactagtgtgactcttgagggtgacacttatcagccaagtggtcttttgactggaggtagtaaagggggtagagggaacttgctaaggaaactcgacgaactagctaaagctgaggctgatctatctgatcatgagaaaaagctctttgtcattgaacagcagattggagcccttttaccattgcagaaaaggcacactgagttgaaatctcagtttgaactgaagtcatatgatctctcgctgtttcagaacagagttgagcaaaatgaacatcacaagttaggtgagctcgtaaagaaaattgaacaagagcttcaagaatctaaacaagagttgacagaaaagcaagtgcagcatgaaaaatgtgtgtccacagtttctgagttagagaaaactatcaaaacttatggcacggaacgagagggcaaactcaaagcgctggaaaaaagaatcaaatcaattaaatcagagatgcagtcgatgtcgaagcaactaaaggcttatgaaagtgacagggagaggctgatcatggagaaagatgcggttgttggtgagcttgctacactggaagagcagctaacgacttcaaaagctcagattacttctctgtctgaaaccttggaaaaacagaaggacaaggttacatccataaagcaagattatgatcaagctgaaagtgagctcaacgttgggcgttctaaactgaaggaatgtgactcacagataaaccgtatggccaaggaacagcagaaacttcaacagaagttaagtgattcaaatgttgagaggaagaaaatggaaaatgaggttaagaggatggagatagagcagaaggattgctcttcaatagttgataagctagtcgagaaatataattggattgcaactgagaaacaattgtttgggaaaagtggtacagattatgattttgaatcttgtgaaccacataaagcccgagaggaacttgaaaatcttcaagctcaacaatccagtcttgagaagagggtcaataagaaagtaatggcaatgtttgagaaggcggaggatgagtacaatgatttgatgtcaaagaaaaacatcatcgagaatgacaaggcaaaaatcaagaaagtgatagaggagttggatgagaagaagaaggaaacattgaaggtcacttggctcaaagtaaacaaggatttcgggtctatattcagtactcttttacctggtacaatggcaaaacttgatcctccagaaggtggtacttttttggatggtcttgaagttcgtgtggcatttgggacagtttggaagcagtctctgtctgaacttagtggaggacaacgatcccttcttgctcttagtcttatcctggctctgcttctttttaaacctgcaccactttacatattggacgaggttgatgctgctcttgatctgagccacactcaaaacattggtagaatgatcaaggctcattttccgcactctcagttcatagttgtctctttaaaagagggtatgttcaacaacgccaatgtgatatttcgaacaaaatttgttgatggtgtgtccaccgtgacacgaacagtgccttcgaaacagagatgaccagtttacacatcatgcatcttctgaaccaaaactaggcatacaattccaaaactgtcattttaaggagctgctataatcaaacattttcgctgtttattcagccatgtttattcagccaggaaaattattccatgaaagctgaaccccacaattacttgacgctgatgcctcaagcccctcgcttgtcaggcaatgacatcaaaataggtgctgtaactgtaatctcatggcgtgacgttcatgatgacctcgactggcttctacattatgcgctttcttctgacctgatgtgtaattagcggttgaactattttgtgttgaaggtcgaccgtgtagcatgtatgtaacagccatttataaccaaggtcatgtataattctgacttgcaaatttaccctatgttgatttaccttttattacttagaacaaaaatctcatcatagttttagaaagtcaatgctctaaacacttcataatattattgactatcgtgtgcattgccgagaatgatttggtcattgttagtttctacgtcactgctcatggattttgtggcgttttttttttctgaaagcattgaagataag

SEQ ID NO: 31078 - DNA, 4417 bp, Zea Mays
cctacctcgggcgcgccatctcttctcggcacggcatgtggcgtgcaggtgtgcgggctgccatgctagcgcacaaatggcgttcgggcaccgtgtaccctggcccccactcgaaaaaggggaaacccgtcaggcctcgctcctcaccgtaggccgatagccaaccagccagacaacacgtggacacggcagcggcagcggcagcgccctccgacccccgccgggccaccaggcagaaaaggaacggaacggcgcagccgcggcggcggcggcggcggcggcggctgtaggttcccgcaccagcgactggcggacacgtatatccaatcatccatcttctctcgcacggccgcacccgtcctcggactcgttccgtctgctagcaatgccgctggcgctcgcgcagttgcaggacctgcgggaccgcatctccgaccgcctccgcccatggagccgctccgcgcagttctgggtccgcgccgcggacatctacaccagctacaaggtgtgccagctgcgggctgggtttgtgaaggatgaggacgagcgggaggccatgtgggagcagcagcacgagctcggcgcccagaagatgtattccctctgctccgagctcggcggtcttttcctcaaggctgctcaaattctggggaaacctgacctggcacctatggcttgggtgaagagacttgttacgctgtgtgacaaggccccagccacgccatttgatgtggttagagatgttgtggagaaacagttcatgaagaatttcgatgacatattcgaattcttcgatgttgagcctgttgggtctgcttctattgcacaggtgcatcgagcaaggcttaaattgtcaaatactgatgttgctgtcaaggttcaacatccaggagccgaacatctgatgatggttgatattcggaatatgcaagcaatggccttgtttctgcagaagtatgacataaacttcgatctattctctgccacgaaagagatggaaaagcagatatgctatgagtttgactttgtgcgcgaagcaagtgcaatggaaagaattcgagaattcctacgtatcaccaataagaaacctccggttatggtgccccgtgtgattcctgggatggttaccagagaggttttggtaatggaattcatcaaagggaccccaataatgaatcttggcaatgaaatggctagaaggggcatagatcctagcggtaagattgcagccatggcaaagcagtaagccccttcatctcaaaagagaagattttgtcagatcttactcttgcatatggtcaaatgatcttgaaggatggctttttccatgcagatccacacccaggaaacatccttatctgtaaggatacagaggtggctttacttgattatggacaagtgaaagaaatgccagaagatttacggcttgcttatgcaaatcttgtagttgcaatggctgatgatgatttcttgagggctgaggaaagtttcagggagcttggtattcgaacatgggccatatctgacaacaagttagaagaattgtttcagttatccctgcgaatgtttgatacaagattaccaccaggtgtaactgttatgtcaccttttgctgatgattcttcgcttactaaaattggagtggagagtttcccagaagagctattttcagtgcttcgaacaatccagcttttgcgagggctgactgtagggatgggccttacattctcgtgcgctaagcattggagatcaatcgctgaggatgcattgttgaaagcaggaagacaaagcgcttcaaaatcaagaaagcaaaagagaagttttctcaggagactgttttggtgaagtagggataggggctatcaaagaacatgatatacggacattctgtgatgaaagtatgaaacggaattagccaacagctcaagccttcgattcttatattcacagtacatcagttcacaattcatttactttgggtgcttgttatttgactcaacgatgttgctcattcctttataacaatgtgttatttggattttagtatatgtttagggattgtatctgaagttgacttgtccacaggcccttccataatctaactgagccctcctacatttttagcccacatagaccaaaatcagaccaatccttctggatgtagcacatcagatttgtagaccaaaaatatcggcctgttagctgttaccaagcctacatggtgtacgctcaactaacacatggtaggagtgatgaactctgttggttatggctctataaaggtccaacaacctcaggtcctcctgtacccgatccacctataaccatcatgctcacacacctattgatgtggtggtgtcgttgctctatgatttccctaatgttgaccttctataggctatatggggctcatggtcatgtcgatcgcctaagtgatgtagcctcaatctattgtgcctgtgtgggaggtgcatccaaaccaatctggatggaaccaccattcctggctctcttatctcagaataactatcgcctccttttgatccagatcaaggcattttcacatcttgcactacactcaatcaccacctcattgcccttatctagcctaggtgaatgagatggctccttgaaatatcccttgtgggttttggtagtttggatgacaacccaattaaaggactaacatgtgtgttaagtattgaacaggtacttaatgcaaagcttgcagggttcaacataagtgttcaagtgtgatggtccaaaggctgagatgactatggataatggacaccacaagtaagatgaacattgcttaagtgatactcggtgtgcgtaacttggacaactggttaagctaagtatggaggcaagaagagtttcgaggtactgagagcacggggggaaggtcaaggaggctgaggtacccaaagctatgggtgaagaagaagactttcaaagtcaaggttgatcgagttgagaagagctatggtgcattgaggatcacaacttaagggcatgacttacaactaatagggtaatacctatggttatgtggtgtaagtcataaggctcaaaatcaagctcaagaagtgaacaaggtcactagaaggagtagtgtcatagccaaaacttggaaacaacccaagagagctaagttcattttgacttttagtttgggttgttcctatgtttggatatgttctatgtgacctttgcagggtgttggagctcatatatgtcaatctagatcaagccaagctgatttgatggtttggagtccaacatcgaccccaaactggccaaaataggtaaacgatgaaaaatgttaagtatgcaaggtttgagtgttcaactatgctgcaaacaccttttactacatgtttggtactttggtttgctctctaactctttctgtagagaaagtgtcatttcaggctctgtttgaggaaaaacagaaaagagaggagaataatgggaaagaggtaactttttaggactaagtcaattggattatactctaaatatgtttgtctaagtctcaggaaattcctccccaaagttgaagtcaaatggagaaggaatggagcaaaaaacacttagtatgttgctgattggtgcaccggaccatgaacagtaacatatccggtgcacatgccaatgaataggaacgtatcggatgcataggataatgaacagtaacctgtcggtacaaatagcccaatgaatagtaccatgttcggtgcaccggacagcccctccaacaactctctccaactgctactcgatgccaacggctagctggtacaccggatggtccggtggcgcacccgactatttggtgcccatcagcgtagatggaaggcgctaatcaaatcctagactagtggcacgtggacctcgtctggtggcgcatcggacggtccggtgcccctcccacagagagcagttttcaagcagtttccaaaaggtaggggcaatgtctatatgcactgttggggctataaaaggacccttgaggtgcccatattcattgtaccaaggctcccaagtgcagcaatactttgtaaactcattacaaatcattcccatctccctctcttgtgtattcctctctagtttgtgtgttggcgcagttataagccaaaagagagtagaggtgctgttgcaagttagagtgggcaagatcttgagcaagcgaaggtgttattctgccggagtgctgtcaagaagattgtaaacagtcgtggcgccgttgtaaccaacatcgacatagtggaagccttgatatgaggaaggagttgaaatagactccaagccaggttggctaactccaacatggactaggcaatcattttaggattgcccaaaccacggggaaaaaaatccctgtgtcctatgtggttttgtgttgtgc

SEQ ID NO: 31079 - DNA, 5131 bp, Zea Mays
cttctcggcacggcatgtggcgtgcaggtgtgcgggctgccatgctagcgcacaaatggcgttcgggcaccgtgtaccctggcccccactcgaaaaaggggaaacccgtcaggcctcgctcctcaccgtaggccgatagccaaccagccagacaacacgtggacacggcagcggcagcggcagcgccctccgacccccgccgggccaccaggcagaaaaggaacggaacggcgcagccgcggcggcggcggcggcggcggcggctgtaggttcccgcaccagcgactggcggacacgtatatccaatcatccatcttctctcgcacggccgcacccgtcctcggactcgttccgtctgctagcaatgccgctggcgctcgcgcagttgcaggacctgcgggaccgcatctccgaccgcctccgcccatggagccgctccgcgcagttctgggtccgcgccgcggacatctacaccagctacaaggtgtgccagctgcgggctgggtttgtgaaggatgaggacgagcgggaggccatgtgggagcagcagcacgagctcggcgcccagaagatgtattccctctgctccgagctcggcggtcttttcctcaaggctgctcaaattctggggaaacctgacctggcacctatggcttgggtgaagagacttgttacgctgtgtgacaaggccccagccacgccatttgatgtggttagagatgttgtggagaaacagttcatgaagaatttcgatgacatattcgaattcttcgatgttgagcctgttgggtctgcttctattgcacaggtgcatcgagcaaggcttaaattgtcaaatactgatgttgctgtcaaggttcaacatccaggagccgaacatctgatgatggttgatattcggaatatgcaagcaatggccttgtttctgcagaagtatgacataaacttcgatctattctctgccacgaaagagatggaaaagcagatatgctatgagtttgactttgtgcgcgaagcaagtgcaatggaaagaattcgagaattcctacgtatcaccaataagaaacctccggttatggtgccccgtgtgattcctgggatggttaccagagaggttttggtaatggaattcatcaaagggaccccaataatgaatcttggcaatgaaatggctagaaggggcatagatcctagcggtaagattgcagccatggcaaagcagtaagccccttcatctcaaaagaggagtaaagatgacagcaccatgaaacgttccactgtatccagatttgttccactgtatgcagatttgtcagagtactgacctgaattcaacagttagcgctccagtaatgccagaaatccagttgtgagatcctcccgaacagtctgcttattagaccattttgtcactaaagagaacaattgaggtgcaaggtcagcactacattgtccgtggatgcacctgtcagtccaaaacaacgtggaggcaccattaccaacttctgagacctctgccatggagaggaaagcccgggcacagccatgaatttgaacagaggcaaccaatgacgatgaggttctgttttttgcaaccataactacctaaaatcctgagtacccatccaaggttttgttggttggaaatgcccaagctgcccagctcaggggcagcaacatactttagtctaagtcaccagagaccagagtaccagacaatgcccacttttgtgtttttacgtcctctccaaagaaagcaccacctgatcttatcaatggctttaagggcccatggtggaagttcaatggccattgccaagtagactagcattgaggtgaggacaaattggacaaagatacgttgaccagcatatggtaacaggccccttccatcctggaagcccatctgctatcttgtcaataatgggctagatttgagctttagatcattttttctctagagagacaggaatttcaaggaagattttgtcagatcttactcttgcatatggtcaaatgatcttgaaggatggctttttccatgcagatccacacccaggaaacatccttatctgtaaggatacagaggtggctttacttgattatggacaagtgaaagaaatgccagaagatttacggcttgcttatgcaaatcttgtagttgcaatggctgatgatgatttcttgagggctgaggaaagtttcagggagcttggtattcgaacatgggccatatctgacaacaagttagaagaattgtttcagttatccctgcgaatgtttgatacaagattaccaccaggtgtaactgttatgtcaccttttgctgatgattcttcgcttactaaaattggagtggagagtttcccagaagagctattttcagtgcttcgaacaatccagcttttgcgagggctgactgtagggatgggccttacattctcgtgcgctaagcattggagatcaatcgctgaggatgcattgttgaaagcaggaagacaaagcgcttcaaaatcaagaaagcaaaagagaagttttctcaggagactgttttggtgaagtagggataggggctatcaaagaacatgatatacggacattctgtgatgaaagtatgaaacggaattagccaacagctcaagccttcgattcttatattcacagtacatcagttcacaattcatttactttgggtgcttgttatttgactcaacgatgttgctcattcctttataacaatgtgttatttggattttagtatatgtttagggattgtatctgaagttgacttgtccacaggcccttccataatctaactgagccctcctacatttttagcccacatagaccaaaatcagaccaatccttctggatgtagcacatcagatttgtagaccaaaaatatcggcctgttagctgttaccaagcctacatggtgtacgctcaactaacacatggtaggagtgatgaactctgttggttatggctctataaaggtccaacaacctcaggtcctcctgtacccgatccacctataaccatcatgctcacacacctattgatgtggtggtgtcgttgctctatgatttccctaatgttgaccttctataggctatatggggctcatggtcatgtcgatcgcctaagtgatgtagcctcaatctattgtgcctgtgtgggaggtgcatccaaaccaatctggatggaaccaccattcctggctctcttatctcagaataactatcgcctccttttgatccagatcaaggcattttcacatcttgcactacactcaatcaccacctcattgcccttatctagcctaggtgaatgagatggctccttgaaatatcccttgtgggttttggtagtttggatgacaacccaattaaaggactaacatgtgtgttaagtattgaacaggtacttaatgcaaagcttgcagggttcaacataagtgttcaagtgtgatggtccaaaggctgagatgactatggataatggacaccacaagtaagatgaacattgcttaagtgatactcggtgtgcgtaacttggacaactggttaagctaagtatggaggcaagaagagtttcgaggtactgagagcacggggggaaggtcaaggaggctgaggtacccaaagctatgggtgaagaagaagactttcaaagtcaaggttgatcgagttgagaagagctatggtgcattgaggatcacaacttaagggcatgacttacaactaatagggtaatacctatggttatgtggtgtaagtcataaggctcaaaatcaagctcaagaagtgaacaaggtcactagaaggagtagtgtcatagccaaaacttggaaacaacccaagagagctaagttcattttgacttttagtttgggttgttcctatgtttggatatgttctatgtgacctttgcagggtgttggagctcatatatgtcaatctagatcaagccaagctgatttgatggtttggagtccaacatcgaccccaaactggccaaaataggtaaacgatgaaaaatgttaagtatgcaaggtttgagtgttcaactatgctgcaaacaccttttactacatgtttggtactttggtttgctctctaactctttctgtagagaaagtgtcatttcaggctctgtttgaggaaaaacagaaaagagaggagaataatgggaaagaggtaactttttaggactaagtcaattggattatactctaaatatgtttgtctaagtctcaggaaattcctccccaaagttgaagtcaaatggagaaggaatggagcaaaaaacacttagtatgttgctgattggtgcaccggaccatgaacagtaacatatccggtgcacatgccaatgaataggaacgtatcggatgcataggataatgaacagtaacctgtcggtacaaatagcccaatgaatagtaccatgttcggtgcaccggacagcccctccaacaactctctccaactgctactcgatgccaacggctagctggtacaccggatggtccggtggcgcacccgactatttggtgcccatcagcgtagatggaaggcgctaatcaaatcctagactagtggcacgtggacctcgtctggtggcgcatcggacggtccggtgcccctcccacagagagcagttttcaagcagtttccaaaaggtaggggcaatgtctatatgcactgttggggctataaaaggacccttgaggtgcccatattcattgtaccaaggctcccaagtgcagcaatactttgtaaactcattacaaatcattcccatctccctctcttgtgtattcctctctagtttgtgtgttggcgcagttataagccaaaagagagtagaggtgctgttgcaagttagagtgggcaagatcttgagcaagcgaaggtgttattctgccggagtgctgtcaagaagattgtaaacagtcgtggcgccgttgtaaccaacatcgacatagtggaagccttgatatgaggaaggagttgaaatagactccaagccaggttggctaactccaacatggactaggcaatcattttaggattgcccaaaccacggggaaaaaaatccctgtgtcctatgtggttttgtgttgtgc

SEQ ID NO: 31080 - DNA, 5310 bp, Zea Mays
cttctcggcacggcatgtggcgtgcaggtgtgcgggctgccatgctagcgcacaaatggcgttcgggcaccgtgtaccctggcccccactcgaaaaaggggaaacccgtcaggcctcgctcctcaccgtaggccgatagccaaccagccagacaacacgtggacacggcagcggcagcggcagcgccctccgacccccgccgggccaccaggcagaaaaggaacggaacggcgcagccgcggcggcggcggcggcggcggcggctgtaggttcccgcaccagcgactggcggacacgtatatccaatcatccatcttctctcgcacggccgcacccgtcctcggactcgttccgtctgctagcaatgccgctggcgctcgcgcagttgcaggacctgcgggaccgcatctccgaccgcctccgcccatggagccgctccgcgcagttctgggtccgcgccgcggacatctacaccagctacaaggtgtgccagctgcgggctgggtttgtgaaggatgaggacgagcgggaggccatgtgggagcagcagcacgagctcggcgcccagaagatgtattccctctgctccgagctcggcggtcttttcctcaaggctgctcaaattctggggaaacctgacctggcacctatggcttgggtgaagagacttgttacgctgtgtgacaaggccccagccacgccatttgatgtggttagagatgttgtggagaaacagttcatgaagaatttcgatgacatattcgaattcttcgatgttgagcctgttgggtctgcttctattgcacaggttcgtgcttaggtatttctcttcatctgtgaaatctggggagtgaactttctaccattcctgccaatgttaggcctttgcaaatgttgtttccttgttttgtaacatataagtacataacatcacatacatactgggaacatatcatttattttctcactaaagatggtttccaagatatattttgattcatatttgataggtgcatcgagcaaggcttaaattgtcaaatactgatgttgctgtcaaggttcaacatccaggagccgaacatctgatgatggttgatattcggaatatgcaagcaatggccttgtttctgcagaagtatgacataaacttcgatctattctctgccacgaaagagatggaaaagcagatatgctatgagtttgactttgtgcgcgaagcaagtgcaatggaaagaattcgagaattcctacgtatcaccaataagaaacctccggttatggtgccccgtgtgattcctgggatggttaccagagaggttttggtaatggaattcatcaaagggaccccaataatgaatcttggcaatgaaatggctagaaggggcatagatcctagcggtaagattgcagccatggcaaagcaggagtaaagatgacagcaccatgaaacgttccactgtatccagatttgttccactgtatgcagatttgtcagagtactgacctgaattcaacagttagcgctccagtaatgccagaaatccagttgtgagatcctcccgaacagtctgcttattagaccattttgtcactaaagagaacaattgaggtgcaaggtcagcactacattgtccgtggatgcacctgtcagtccaaaacaacgtggaggcaccattaccaacttctgagacctctgccatggagaggaaagcccgggcacagccatgaatttgaacagaggcaaccaatgacgatgaggttctgttttttgcaaccataactacctaaaatcctgagtacccatccaaggttttgttggttggaaatgcccaagctgcccagctcaggggcagcaacatactttagtctaagtcaccagagaccagagtaccagacaatgcccacttttgtgtttttacgtcctctccaaagaaagcaccacctgatcttatcaatggctttaagggcccatggtggaagttcaatggccattgccaagtagactagcattgaggtgaggacaaattggacaaagatacgttgaccagcatatggtaacaggccccttccatcctggaagcccatctgctatcttgtcaataatgggctagatttgagctttagatcattttttctctagagagacaggaatttcaaggaagattttgtcagatcttactcttgcatatggtcaaatgatcttgaaggatggctttttccatgcagatccacacccaggaaacatccttatctgtaaggatacagaggtggctttacttgattatggacaagtgaaagaaatgccagaagatttacggcttgcttatgcaaatcttgtagttgcaatggctgatgatgatttcttgagggctgaggaaagtttcagggagcttggtattcgaacatgggccatatctgacaacaagttagaagaattgtttcagttatccctgcgaatgtttgatacaagattaccaccaggtgtaactgttatgtcaccttttgctgatgattcttcgcttactaaaattggagtggagagtttcccagaagagctattttcagtgcttcgaacaatccagcttttgcgagggctgactgtagggatgggccttacattctcgtgcgctaagcattggagatcaatcgctgaggatgcattgttgaaagcaggaagacaaagcgcttcaaaatcaagaaagcaaaagagaagttttctcaggagactgttttggtgaagtagggataggggctatcaaagaacatgatatacggacattctgtgatgaaagtatgaaacggaattagccaacagctcaagccttcgattcttatattcacagtacatcagttcacaattcatttactttgggtgcttgttatttgactcaacgatgttgctcattcctttataacaatgtgttatttggattttagtatatgtttagggattgtatctgaagttgacttgtccacaggcccttccataatctaactgagccctcctacatttttagcccacatagaccaaaatcagaccaatccttctggatgtagcacatcagatttgtagaccaaaaatatcggcctgttagctgttaccaagcctacatggtgtacgctcaactaacacatggtaggagtgatgaactctgttggttatggctctataaaggtccaacaacctcaggtcctcctgtacccgatccacctataaccatcatgctcacacacctattgatgtggtggtgtcgttgctctatgatttccctaatgttgaccttctataggctatatggggctcatggtcatgtcgatcgcctaagtgatgtagcctcaatctattgtgcctgtgtgggaggtgcatccaaaccaatctggatggaaccaccattcctggctctcttatctcagaataactatcgcctccttttgatccagatcaaggcattttcacatcttgcactacactcaatcaccacctcattgcccttatctagcctaggtgaatgagatggctccttgaaatatcccttgtgggttttggtagtttggatgacaacccaattaaaggactaacatgtgtgttaagtattgaacaggtacttaatgcaaagcttgcagggttcaacataagtgttcaagtgtgatggtccaaaggctgagatgactatggataatggacaccacaagtaagatgaacattgcttaagtgatactcggtgtgcgtaacttggacaactggttaagctaagtatggaggcaagaagagtttcgaggtactgagagcacggggggaaggtcaaggaggctgaggtacccaaagctatgggtgaagaagaagactttcaaagtcaaggttgatcgagttgagaagagctatggtgcattgaggatcacaacttaagggcatgacttacaactaatagggtaatacctatggttatgtggtgtaagtcataaggctcaaaatcaagctcaagaagtgaacaaggtcactagaaggagtagtgtcatagccaaaacttggaaacaacccaagagagctaagttcattttgacttttagtttgggttgttcctatgtttggatatgttctatgtgacctttgcagggtgttggagctcatatatgtcaatctagatcaagccaagctgatttgatggtttggagtccaacatcgaccccaaactggccaaaataggtaaacgatgaaaaatgttaagtatgcaaggtttgagtgttcaactatgctgcaaacaccttttactacatgtttggtactttggtttgctctctaactctttctgtagagaaagtgtcatttcaggctctgtttgaggaaaaacagaaaagagaggagaataatgggaaagaggtaactttttaggactaagtcaattggattatactctaaatatgtttgtctaagtctcaggaaattcctccccaaagttgaagtcaaatggagaaggaatggagcaaaaaacacttagtatgttgctgattggtgcaccggaccatgaacagtaacatatccggtgcacatgccaatgaataggaacgtatcggatgcataggataatgaacagtaacctgtcggtacaaatagcccaatgaatagtaccatgttcggtgcaccggacagcccctccaacaactctctccaactgctactcgatgccaacggctagctggtacaccggatggtccggtggcgcacccgactatttggtgcccatcagcgtagatggaaggcgctaatcaaatcctagactagtggcacgtggacctcgtctggtggcgcatcggacggtccggtgcccctcccacagagagcagttttcaagcagtttccaaaaggtaggggcaatgtctatatgcactgttggggctataaaaggacccttgaggtgcccatattcattgtaccaaggctcccaagtgcagcaatactttgtaaactcattacaaatcattcccatctccctctcttgtgtattcctctctagtttgtgtgttggcgcagttataagccaaaagagagtagaggtgctgttgcaagttagagtgggcaagatcttgagcaagcgaaggtgttattctgccggagtgctgtcaagaagattgtaaacagtcgtggcgccgttgtaaccaacatcgacatagtggaagccttgatatgaggaaggagttgaaatagactccaagccaggttggctaactccaacatggactaggcaatcattttaggattgcccaaaccacggggaaaaaaatccctgtgtcctatgtggttttgtgttgtgc

SEQ ID NO: 31081 - DNA, 4224 bp, Zea Mays
gttcgtgcttaggtgcatcgagcaaggcttaaattgtcaaatactgatgttgctgtcaaggttcaacatccaggagccgaacatctgatgatggttgatattcggaatatgcaagcaatggccttgtttctgcagaagtatgacataaacttcgatctattctctgccacgaaagagatggaaaagcagatatgctatgagtttgactttgtgcgcgaagcaagtgcaatggaaagaattcgagaattcctacgtatcaccaataagaaacctccggttatggtgccccgtgtgattcctgggatggttaccagagaggttttggtaatggaattcatcaaagggaccccaataatgaatcttggcaatgaaatggctagaaggggcatagatcctagcgatttgtcagagtactgacctgaattcaacagttagcgctccagtaatgccagaaatccagttgtgagatcctcccgaacagtctgcttattagaccattttgtcactaaagagaacaattgaggtgcaaggtcagcactacattgtccgtggatgcacctgtcagtccaaaacaacgtggaggcaccattaccaacttctgagacctctgccatggagaggaaagcccgggcacagccatgaatttgaacagaggcaaccaatgacgatgaggttctgttttttgcaaccataactacctaaaatcctgagtacccatccaaggttttgttggttggaaatgcccaagctgcccagctcaggggcagcaacatactttagtctaagtcaccagagaccagagtaccagacaatgcccacttttgtgtttttacgtcctctccaaagaaagcaccacctgatcttatcaatggctttaagggcccatggtggaagttcaatggccattgccaagtagactagcattgaggtgaggacaaattggacaaagatacgttgaccagcatatggtaacaggccccttccatcctggaagcccatctgctatcttgtcaataatgggctagatttgagctttagatcattttttctctagagagacaggaatttcaaggaagattttgtcagatcttactcttgcatatggtcaaatgatcttgaaggatggctttttccatgcagatccacacccaggaaacatccttatctgtaaggatacagaggtggctttacttgattatggacaagtgaaagaaatgccagaagatttacggcttgcttatgcaaatcttgtagttgcaatggctgatgatgatttcttgagggctgaggaaagtttcagggagcttggtattcgaacatgggccatatctgacaacaagttagaagaattgtttcagttatccctgcgaatgtttgatacaagattaccaccaggtgtaactgttatgtcaccttttgctgatgattcttcgcttactaaaattggagtggagagtttcccagaagagctattttcagtgcttcgaacaatccagcttttgcgagggctgactgtagggatgggccttacattctcgtgcgctaagcattggagatcaatcgctgaggatgcattgttgaaagcaggaagacaaagcgcttcaaaatcaagaaagcaaaagagaagttttctcaggagactgttttggtgaagtagggataggggctatcaaagaacatgatatacggacattctgtgatgaaagtatgaaacggaattagccaacagctcaagccttcgattcttatattcacagtacatcagttcacaattcatttactttgggtgcttgttatttgactcaacgatgttgctcattcctttataacaatgtgttatttggattttagtatatgtttagggattgtatctgaagttgacttgtccacaggcccttccataatctaactgagccctcctacatttttagcccacatagaccaaaatcagaccaatccttctggatgtagcacatcagatttgtagaccaaaaatatcggcctgttagctgttaccaagcctacatggtgtacgctcaactaacacatggtaggagtgatgaactctgttggttatggctctataaaggtccaacaacctcaggtcctcctgtacccgatccacctataaccatcatgctcacacacctattgatgtggtggtgtcgttgctctatgatttccctaatgttgaccttctataggctatatggggctcatggtcatgtcgatcgcctaagtgatgtagcctcaatctattgtgcctgtgtgggaggtgcatccaaaccaatctggatggaaccaccattcctggctctcttatctcagaataactatcgcctccttttgatccagatcaaggcattttcacatcttgcactacactcaatcaccacctcattgcccttatctagcctaggtgaatgagatggctccttgaaatatcccttgtgggttttggtagtttggatgacaacccaattaaaggactaacatgtgtgttaagtattgaacaggtacttaatgcaaagcttgcagggttcaacataagtgttcaagtgtgatggtccaaaggctgagatgactatggataatggacaccacaagtaagatgaacattgcttaagtgatactcggtgtgcgtaacttggacaactggttaagctaagtatggaggcaagaagagtttcgaggtactgagagcacggggggaaggtcaaggaggctgaggtacccaaagctatgggtgaagaagaagactttcaaagtcaaggttgatcgagttgagaagagctatggtgcattgaggatcacaacttaagggcatgacttacaactaatagggtaatacctatggttatgtggtgtaagtcataaggctcaaaatcaagctcaagaagtgaacaaggtcactagaaggagtagtgtcatagccaaaacttggaaacaacccaagagagctaagttcattttgacttttagtttgggttgttcctatgtttggatatgttctatgtgacctttgcagggtgttggagctcatatatgtcaatctagatcaagccaagctgatttgatggtttggagtccaacatcgaccccaaactggccaaaataggtaaacgatgaaaaatgttaagtatgcaaggtttgagtgttcaactatgctgcaaacaccttttactacatgtttggtactttggtttgctctctaactctttctgtagagaaagtgtcatttcaggctctgtttgaggaaaaacagaaaagagaggagaataatgggaaagaggtaactttttaggactaagtcaattggattatactctaaatatgtttgtctaagtctcaggaaattcctccccaaagttgaagtcaaatggagaaggaatggagcaaaaaacacttagtatgttgctgattggtgcaccggaccatgaacagtaacatatccggtgcacatgccaatgaataggaacgtatcggatgcataggataatgaacagtaacctgtcggtacaaatagcccaatgaatagtaccatgttcggtgcaccggacagcccctccaacaactctctccaactgctactcgatgccaacggctagctggtacaccggatggtccggtggcgcacccgactatttggtgcccatcagcgtagatggaaggcgctaatcaaatcctagactagtggcacgtggacctcgtctggtggcgcatcggacggtccggtgcccctcccacagagagcagttttcaagcagtttccaaaaggtaggggcaatgtctatatgcactgttggggctataaaaggacccttgaggtgcccatattcattgtaccaaggctcccaagtgcagcaatactttgtaaactcattacaaatcattcccatctccctctcttgtgtattcctctctagtttgtgtgttggcgcagttataagccaaaagagagtagaggtgctgttgcaagttagagtgggcaagatcttgagcaagcgaaggtgttattctgccggagtgctgtcaagaagattgtaaacagtcgtggcgccgttgtaaccaacatcgacatagtggaagccttgatatgaggaaggagttgaaatagactccaagccaggttggctaactccaacatggactaggcaatcattttaggattgcccaaaccacggggaaaaaaatccctgtgtcctatgtggttttgtgttgtgc

SEQ ID NO: 31082 - DNA, 3729 bp, Zea Mays
agcaccatgaaacgttccactgtatccagatttgttccactgtatgcagatttgtcagagtactgacctgaattcaacagttagcgctccagtaatgccagaaatccagttgtgagatcctcccgaacagtctgcttattagaccattttgtcactaaagagaacaattgaggtgcaaggtcagcactacattgtccgtggatgcacctgtcagtccaaaacaacgtggaggcaccattaccaacttctgagacctctgccatggagaggaaagcccgggcacagccatgaatttgaacagaggcaaccaatgacgatgaggttctgttttttgcaaccataactacctaaaatcctgagtacccatccaaggttttgttggttggaaatgcccaagctgcccagctcaggggcagcaacatactttagtctaagtcaccagagaccagagtaccagacaatgcccacttttgtgtttttacgtcctctccaaagaaagcaccacctgatcttatcaatggctttaagggcccatggtggaagttcaatggccattgccaagtagactagcattgaggaagattttgtcagatcttactcttgcatatggtcaaatgatcttgaaggatggctttttccatgcagatccacacccaggaaacatccttatctgtaaggatacagaggtggctttacttgattatggacaagtgaaagaaatgccagaagatttacggcttgcttatgcaaatcttgtagttgcaatggctgatgatgatttcttgagggctgaggaaagtttcagggagcttggtattcgaacatgggccatatctgacaacaagttagaagaattgtttcagttatccctgcgaatgtttgatacaagattaccaccaggtgtaactgttatgtcaccttttgctgatgattcttcgcttactaaaattggagtggagagtttcccagaagagctattttcagtgcttcgaacaatccagcttttgcgagggctgactgtagggatgggccttacattctcgtgcgctaagcattggagatcaatcgctgaggatgcattgttgaaagcaggaagacaaagcgcttcaaaatcaagaaagcaaaagagaagttttctcaggagactgttttggtgaagtagggataggggctatcaaagaacatgatatacggacattctgtgatgaaagtatgaaacggaattagccaacagctcaagccttcgattcttatattcacagtacatcagttcacaattcatttactttgggtgcttgttatttgactcaacgatgttgctcattcctttataacaatgtgttatttggattttagtatatgtttagggattgtatctgaagttgacttgtccacaggcccttccataatctaactgagccctcctacatttttagcccacatagaccaaaatcagaccaatccttctggatgtagcacatcagatttgtagaccaaaaatatcggcctgttagctgttaccaagcctacatggtgtacgctcaactaacacatggtaggagtgatgaactctgttggttatggctctataaaggtccaacaacctcaggtcctcctgtacccgatccacctataaccatcatgctcacacacctattgatgtggtggtgtcgttgctctatgatttccctaatgttgaccttctataggctatatggggctcatggtcatgtcgatcgcctaagtgatgtagcctcaatctattgtgcctgtgtgggaggtgcatccaaaccaatctggatggaaccaccattcctggctctcttatctcagaataactatcgcctccttttgatccagatcaaggcattttcacatcttgcactacactcaatcaccacctcattgcccttatctagcctaggtgaatgagatggctccttgaaatatcccttgtgggttttggtagtttggatgacaacccaattaaaggactaacatgtgtgttaagtattgaacaggtacttaatgcaaagcttgcagggttcaacataagtgttcaagtgtgatggtccaaaggctgagatgactatggataatggacaccacaagtaagatgaacattgcttaagtgatactcggtgtgcgtaacttggacaactggttaagctaagtatggaggcaagaagagtttcgaggtactgagagcacggggggaaggtcaaggaggctgaggtacccaaagctatgggtgaagaagaagactttcaaagtcaaggttgatcgagttgagaagagctatggtgcattgaggatcacaacttaagggcatgacttacaactaatagggtaatacctatggttatgtggtgtaagtcataaggctcaaaatcaagctcaagaagtgaacaaggtcactagaaggagtagtgtcatagccaaaacttggaaacaacccaagagagctaagttcattttgacttttagtttgggttgttcctatgtttggatatgttctatgtgacctttgcagggtgttggagctcatatatgtcaatctagatcaagccaagctgatttgatggtttggagtccaacatcgaccccaaactggccaaaataggtaaacgatgaaaaatgttaagtatgcaaggtttgagtgttcaactatgctgcaaacaccttttactacatgtttggtactttggtttgctctctaactctttctgtagagaaagtgtcatttcaggctctgtttgaggaaaaacagaaaagagaggagaataatgggaaagaggtaactttttaggactaagtcaattggattatactctaaatatgtttgtctaagtctcaggaaattcctccccaaagttgaagtcaaatggagaaggaatggagcaaaaaacacttagtatgttgctgattggtgcaccggaccatgaacagtaacatatccggtgcacatgccaatgaataggaacgtatcggatgcataggataatgaacagtaacctgtcggtacaaatagcccaatgaatagtaccatgttcggtgcaccggacagcccctccaacaactctctccaactgctactcgatgccaacggctagctggtacaccggatggtccggtggcgcacccgactatttggtgcccatcagcgtagatggaaggcgctaatcaaatcctagactagtggcacgtggacctcgtctggtggcgcatcggacggtccggtgcccctcccacagagagcagttttcaagcagtttccaaaaggtaggggcaatgtctatatgcactgttggggctataaaaggacccttgaggtgcccatattcattgtaccaaggctcccaagtgcagcaatactttgtaaactcattacaaatcattcccatctccctctcttgtgtattcctctctagtttgtgtgttggcgcagttataagccaaaagagagtagaggtgctgttgcaagttagagtgggcaagatcttgagcaagcgaaggtgttattctgccggagtgctgtcaagaagattgtaaacagtcgtggcgccgttgtaaccaacatcgacatagtggaagccttgatatgaggaaggagttgaaatagactccaagccaggttggctaactccaacatggactaggcaatcattttaggattgcccaaaccacggggaaaaaaatccctgtgtcctatgtggttttgtgttgtgc

SEQ ID NO: 31083 - DNA, 2390 bp, Zea Mays
caccacacaagcaccagccttcccatcttttccttccttccacctcttcctcctctgtcacccacccctgtttcctctcgattgttcgttagttccttgcttgcctcgccagacagcctctatcctcctccccctcccccgtatccgccgacggcgtcgcctccaaggacctccacatcgaccccaactcatcgctctccgtccgcatcttcctccccacgcccccgccgccttccccgcacgcccacctcctcgcgcacgcgcacccgcgccgcgccagcgaccccaccccgacgacccccgcgcccgcgcccgccaacggcgcgccgtaccgagggtacctcccgcacgccgtctcctcgccgcgcgccgccgcgtcggcgcgccggaggctgcccatcgtcgtgcagttccacggcggcggcttcgtcaccgggagcaacactgccgcggccaacgacgccttctgcaggagggtcgccaagctctgcgatgccattgtcgtcgccgtggggtacaggcttgcgccagagagccgataccctgccgcgttcgatgacggggtcaaggtgctcaagtggatcgccaagcaggccaatctcgccatgatgaccaaggtcgggggtggtgttgacaccttcggtgcatccactgttgagccgtggattgctgcacatggtgatccagctaggtaaatgttactgatcctcctgtttatgtagctgcatagatgtgtgattgtgcgctaaactttactaattgatagggtaaatgttactgaacctccaatttatagctgcataaatgtgtgctaaactttactaattgatgaggcaatggtagggatcatgaatctgcaatgccaaaatgacaataagttctggaatccaagaatttgtgtaagaatcttttattgcattgcttgaagttgcacgtaaaatggttagtgggcaaaaacggttgttcacctgttcaacaaacatgcttttgttcccttcagatgatttaaacgtctaacacttgatagttaagcttggtcaacatgtcatatgtggttatgctatcaataagaggcttctccaaactatgcaaacatcagttaaccttaaccatgactcttttgtttcaacttaacgctggcacttgtatgatgtgaattgaagctttcacatgtattgaataaatgactggaactttcgcagaattaaatattgtattccatcatggaaatggaatctcctgaattagtattataactcttgtttgtgtaacaccatatacaagggagcttcacttgaggaattcccttaaattctgctttctctcgatcaacgagttactgtttcccgtatacaatcttgtgactcttatggttgttcatattcatgtgtcaccttcatctcactcacatgagagtaaacccctttatgtcactgctgctactttatccattcagctgttgaaattcctttttgtgttaactgttgtatattagtatcactggaatttgactgtatggtgtgttccttgtcgcagatgtgttctacttggtgcaagctgtggtgcaaatattgctgattatgtcactcggaaggtggtcgaagatgggaaaccgtttgacccggttaaggttgttgcacaagttctgatgtatccatttttcatagggagtgttccgacacactcggaaattcggcttgcgaactcatacttctacgacaagtccacatgtttacttgcttggagactatttttgtcagagaaagagttcaacctagaccaccctgctgccaaccctctggcgcctagcagacgagctcccccactgaagtgcatgccgccgaccttgacagttattgccgagcatgactggatgagggatcgagcaattgcttactctgaggaactccgcaaggttaatgttgactcgccagttcttgactacaaggatacggttcatgagtttgcaaccctggatgtgttcctaaaaacaccacaggcccaggcctgtgccgaggacattgccatatggatgaagaaatatatatccctccgagggcatgagttctcgtattagttgtagacccttcactgggaagcatcagtgtgttcttctcaactggtggaaagagggatgtttgattacagttgagtaaccagttagcttaatgtgactccttcagtgatttctgtgggagaatgtagtgtgcaaagttgtagactgtaatcaaaaggtactcttttcctgtagagctcaattctttcattccttttgtatcatttgtgcattacggaattactggtgcttgaggttaccatttttttgagaagaaatatcaatctcagtggtggagctgtgaagcactgagctccacacaacaacatcgtcc

SEQ ID NO: 31084 - DNA, 1003 bp, Zea Mays
gtggaatccacacataatgctgtctcattttaatttttatgttccattgcgggaaccttgatcattctactctactagtgcatgctttatggggcgactggaatgcattgatcattgatgcagtgcagtttgctggttatttacaccacatttttgatcaattgatctgtcctggtaaaagtatgatctttggctgtggaattcacacataatgctgtctcattttaaactttatgttccattgtggcaaccttgatcattctactctactagaaatatatacaggaagaaacaggttggggcttttctttttagaaaatgaaaattatccacagtgattgtaggccttgagttcaatcatcagatttccagatagatggtcaaggaacgcttgtaacagtgaagccaggcaaggagataaacacatagagttcttattgtgtttataaacaagaatgttctatttggtttgtcttattgccctattttggcaaaaggatgattatgcatcaagggttcttgattcttttttcccacagttttgatgtatatgatacatcagcgtgcactttatggaagatcagctataaatttatgattcaagtctgaacaggtgtttatactgtttctcatgcagaagtaagtttgatttcttcttgtttttttaaacaaaggtacaaggagaacaggtgggatcccaagcagcttatcggctctggtggcatgccatcatcacattctgccacggttacagcactagcagtagcgattgggttgcaagatggctttaactgctccctctttgcaacagcaactatatttgcaagtgtggtaatgtacgatgcttctggtatcagattgcatgctggaaagcaagcagcggtactgaaccaaatagtttgtgaacttccttctgaacatcccttgtctgaaacaagaccactgcgagaacttttaggccatacaccaacccagaacctcaaactggctgaccccacatcac

SEQ ID NO: 31085 - DNA, 1942 bp, Zea Mays
ccacttgcagtcaacaaaaccattcgtggaccacatccacagactgtggtcatgactcatcagttattccgagaccctcacaaacagactctgctcatcaggtattttcgggtctacggtcggtcaatcggagtgtacacagcaagcgccggcccgcgggcgctctcccgaatcccgacacccggagttggagttggaggagcccggagaggcggcggagcgcagccaaaaaaaaaaaaaaaaaaccctgagtcccgcaaaacccctaaaccctagcccctcacctctcgcctccgccctcatccgcgcgacttgcagcggttggaggcgaagccggctccatgacgaccctcctcaggcgcgcgtcgctgcggcgcgtcattgccgccgccgccgcctcttcttttcaccctgagagctataagcaagggatctgtggctccacatttcattgccgagagttcgcatcaaaagcaaaaaagaagtcaagtggaacagactctggggaggagaacatgtcaaagaaagacttggctttacaccaggctattgatcagataacgtctgcatttgggaagggggcaataatgtggcttgggcgttcacaaggccatagagatgtaccagtcgtgtctactgggtctttggatttggatatggctctaggaactggtggtcttccaaaggggcgtgttgtagaggtatatggtccagaggcttcaggcaagacaacgcttgctctacatgtcattgcagaagcacaaaagaatggaggttgctgcgcttgttccaaagactgagcttgatggtgagatgggtgatgcacatattgctcttcaggctaggttgatgagtcaagcccttcgcaagcttagccactccctttcactttcacaaacaattttgttatttattaatcagatcagggccaaggtagccacatttggatttggaggaccaactgaggttacttctggtggcaacgccttgaagttttatgcatctgttcgcttgaacatcaggcgtattggtttggtaaagaaaggcgaagagacaataggtagtcagattgctgtgaagattgtaaaaaacaagcatgccccacccttcaagactgcacagtttgagcttgaatttggaaaggggatatgccgcagttctgagctttttgaacttggattgaagcacaagcttatccgaaagagtggtggttcgtattatagtttcaatggtaaggctttcaatggtaaaagtaaccttaaatcttaccttactgaaaacaagagtgttgccaatgatctggagatggaactaaagagattgatgggaactgatgcgtctaaagagcaggaggcaggagacagttcgcagagtgattttcctgaagagagtgtcacacctgaagcatcgtcagaagaggatctgggagccataattgaaggttagccagtgatctgatgtgctggcaagtgggaacagaatttctggagcagttgttcctgtaaaacaatatcttgggtcctgaagtcaccaccgtttggatcgacatgcctgtggtgttctggtgatctcatcatagcagacttcagtctttactgtgcttatacagtagtgcagcaggaagagaattcacattgtgtgaaatcatggtgatatctgagaggtggaagttgtagtaagccgggaagggtgaggtattgtggtccgtggcatttaaacttcagtaagcaaacgccgtgtatatatgatgtgcacattttgaaaccgggcattctttattgactgctgctagatttacattgagctccctccacttccaatacctaccttttttttgcgtggagctagttttttggatggtgcttctgcggaagcctgttgctggaagatccaatgtcgtagagctggggcatttctgaccttggctgatctatgttcgccg

SEQ ID NO: 31086 - DNA, 2301 bp, Zea Mays
cagactgtggtcatgactcatcagttattccgagaccctcacaaacagactctgctcatcaggtattttcgggtctacggtcggtcaatcggagtgtacacagcaagcgccggcccgcgggcgctctcccgaatcccgacacccggagttggagttggaggagcccggagaggcggcggagcgcagccaaaaaaaaaaaaaaaaaaccctgagtcccgcaaaacccctaaaccctagcccctcacctctcgcctccgccctcatccgcgcgacttgcagcggttggaggcgaagccggctccatgacgaccctcctcaggcgcgcgtcgctgcggcgcgtcattgccgccgccgccgcctcttcttttcaccctgagagctataagcaagggatctgtggctccacatttcattgccgagagttcgcatcaaaagcaaaaaagaagtcaagtggaacagactctggggaggagaacatgtcaaagaaagacttggctttacaccaggctattgatcagataacgtctgcatttgggaagggggcaataatgtggcttgggcgttcacaaggccatagagatgtaccagtcgtgtctactgggtctttggatttggatatggctctaggaactggtggtcttccaaaggggcgtgttgtagaggtatatggtccagaggcttcaggcaagacaacgcttgctctacatgtcattgcagaagcacaaaagaatggaggttactgtgcctttgtagatgcagagcacgctttggatccagctctcgccgagtcaattggtgttgacactaacaatttactcctttctcagcccgattgtgctgagcaggcactcagtcttgtggacacactgattcgaagtggatctgttgatgttgttgtagtagacagtgttgctgcgcttgttccaaagactgagcttgatggtgagatgggtgatgcacatattgctcttcaggctaggttgatgagtcaagcccttcgcaagcttagccactccctttcactttcacaaacaattttgttatttattaatcagatcagggccaaggtagccacatttggatttggaggaccaactgaggttacttctggtggcaacgccttgaagttttatgcatctgttcgcttgaacatcaggcgtattggtttggtaaagaaaggcgaagaggtattgcatatgtttggcatttacctgattagtttagtctcatactataacgtatgaaattcagtaagttcacagcgtgactttgatttaacagagatatacatgtctttatgagacctatttaactgagccactactagacacatgtaataggcatctacatgtgttgtctgaaacagtatgcactctgtgtagcttttgaatgatgattccttccatttgcagacaataggtagtcagattgctgtgaagattgtaaaaaacaagcatgccccacccttcaagactgcacagtttgagcttgaatttggaaaggggatatgccgcagttctgagctttttgaacttggattgaagcacaagcttatccgaaagagtggtggttcgtattatagtttcaatggtaaggctttcaatggtaaaagtaaccttaaatcttaccttactgaaaacaagagtgttgccaatgatctggagatggaactaaagagattgatgggaactgatgcgtctaaagagcaggaggcaggagacagttcgcagagtgattttcctgaagagagtgtcacacctgaagcatcgtcagaagaggatctgggagccataattgaaggttagccagtgatctgatgtgctggcaagtgggaacagaatttctggagcagttgttcctgtaaaacaatatcttgggtcctgaagtcaccaccgtttggatcgacatgcctgtggtgttctggtgatctcatcatagcagacttcagtctttactgtgcttatacagtagtgcagcaggaagagaattcacattgtgtgaaatcatggtgatatctgagaggtggaagttgtagtaagccgggaagggtgaggtattgtggtccgtggcatttaaacttcagtaagcaaacgccgtgtatatatgatgtgcacattttgaaaccgggcattctttattgactgctgctagatttacattgagctccctccacttccaatacctaccttttttttgcgtggagctagttttttggatggtgcttctgcggaagcctgttgctggaagatccaatgtcgtagagctggggcatttctgaccttggctgatctatgttcgccg

SEQ ID NO: 31087 - DNA, 1722 bp, Zea Mays
gtgaagccctgggccaaatcatgagctataagcaagggatctgtggctccacatttcattgccgagagttcgcatcaaaagcaaaaaagaagtcaagtggaacagactctggggaggagaacatgtcaaagaaagacttggctttacaccaggctattgatcagataacgtctgcatttgggaagggggcaataatgtggcttgggcgttcacaaggccatagagatgtaccagtcgtgtctactgggtctttggatttggatatggctctaggaactggtggtcttccaaaggggcgtgttgtagaggtatatggtccagaggcttcaggcaagacaacgcttgctctacatgtcattgcagaagcacaaaagaatggaggttactgtgcctttgtagatgcagagcacgctttggatccagctctcgccgagtcaattggtgttgacactaacaatttactcctttctcagcccgattgtgctgagcaggcactcagtcttgtggacacactgattcgaagtggatctgttgatgttgttgtagtagacagtgttgctgcgcttgttccaaagactgagcttgatggtgagatgggtgatgcacatattgctcttcaggctaggttgatgagtcaagcccttcgcaagcttagccactccctttcactttcacaaacaattttgttatttattaatcagatcagggccaaggtagccacatttggatttggaggaccaactgaggttacttctggtggcaacgccttgaagttttatgcatctgttcgcttgaacatcaggcgtattggtttggtaaagaaaggcgaagagacaataggtagtcagattgctgtgaagattgtaaaaaacaagcatgccccacccttcaagactgcacagtttgagcttgaatttggaaaggggatatgccgcagttctgagctttttgaacttggattgaagcacaagcttatccgaaagagtggtggttcgtattatagtttcaatggtaaggctttcaatggtaaaagtaaccttaaatcttaccttactgaaaacaagagtgttgccaatgatctggagatggaactaaagagattgatgggaactgatgcgtctaaagagcaggaggcaggagacagttcgcagagtgattttcctgaagagagtgtcacacctgaagcatcgtcagaagaggatctgggagccataattgaaggttagccagtgatctgatgtgctggcaagtgggaacagaatttctggagcagttgttcctgtaaaacaatatcttgggtcctgaagtcaccaccgtttggatcgacatgcctgtggtgttctggtgatctcatcatagcagacttcagtctttactgtgcttatacagtagtgcagcaggaagagaattcacattgtgtgaaatcatggtgatatctgagaggtggaagttgtagtaagccgggaagggtgaggtattgtggtccgtggcatttaaacttcagtaagcaaacgccgtgtatatatgatgtgcacattttgaaaccgggcattctttattgactgctgctagatttacattgagctccctccacttccaatacctaccttttttttgcgtggagctagttttttggatggtgcttctgcggaagcctgttgctggaagatccaatgtcgtagagctggggcatttctgaccttggctgatctatgttcgccg

SEQ ID NO: 31088 - DNA, 2836 bp, Zea Mays
ttcccctcttctctcttctctatctctctctctctctcctcccccgcggccgcggccgccccacgctcttcctcctcctcctcgctcgtcgacggtgacccccgcggagccgcgtggatacctcgccggggagatctgcctgccgtctctacgggcagtcagatgttggagcttaggtagtagccaacgatggaagcaatggaggccgaagaaggtccttttctggctaatgatgccaagcatcaagacccagaagcaagcctggtatacaagcattgtgttcactacatgtagctcttgataaagccaaagggcttcttcaacattgtgcagactgcagcagactctacttggccatcacttcggaaactgtgcttttaaagtttgagaagtctagaagccagcttcaggagagtctaaggcgcactgaaagcatagtaactgaagatattggctgtaagattgtggagattgttggtgagctggaggaaattgtttttacattagatagatcagagaaggaagctggtgatgagctgatcaaattgctccagagaaataataaaacaaatggttccagtgacagtggggagcttgaggtattccatatgtctgctcttaaattgggaattacatcttctagggcagcactcaccgagagaagagcccttaagaagctaattgagaaggcccgttctgatgaagacaagcggaaggagcttgttgtgtcatacttgtacaatctcatgaggaagtactcaaagttcttcagaagtgagactggtgatgatacagattctcagggatcgtctccatgctcgccaacagtattaggcatggatgatatgtatgggccgtacaacaatggtcgggcatttagtagacagctttcgagcattcagtctttcaattcaaggtttggatctttcaattctaggcttggatcattcaattgcagacgtggtggtggtccaaggtctgagaatatgtcaatccctcctgaagaacttaggtgccctatttccttacaactcatgtatgatccagtcatcatttcatccgggcagacttatgagcgtatttgcattgagaaatggttcaacgatggtcacagcacatgtcctaaaactcagcagcaacttgcccacctgtcattgactccaaactactgtgttaaggccctcattgcgagctggtgtgagcagaacgattttccagttcctgatggtccaccagggacttttgatgtaaactggagacttgctttgtctgacactgaggccgcaggctgtgtgtcagttgaaagttttgattgtgctaatgcaaagagtgtcaaggttgtcccaatggagaacgttagaaaggaggagccagcaaacagtgaatcgggaactctggatgacggctcctgtaacgatttcgatttgaacgaaggctatgggaacttgctgctcctgctccatgaaagaagtaacatgaacaagcagtgcaggttggtggagcagataaggtatcttttgaaagacgacgaggaagcaaggatccagctgggctcaaatggctttgccgaggcactggttgagttcttgaggaatgctgtgaatgatggaaatgagaaggcacaagaagttggtgcaatggctcttttcaatcttgcagtcaacaacaacagaaacaaggggctcctgttatctgctggagtcaccgatctacttgagcagatgatatcgaatccacggctatctggtcctgccacagcactctacctgaatatttcctgccttcctgacgcgaaggccgtcatcggttcgagccaggccgtgccgttcctagtcgaccgtctgtacagccaagacggcagcgacacgagaggaagctcctgcaagcacgacgccctgtacacgctgtacaacctctcgagccaccaggccagcgtgccggcgcttctagccgcgggcatcgtggacgctctccactgcctcgtcacggagtctccagggtcggaggaggggcttggctggacagagaaggctctggcggtgctcatcagcctcgcggccacccaagctggccgaaaggagatcatgtccacccctggcttggtcagcacgctggcgatgctgctggacacgggcgagtcgacggagcaggagcaggcagtgtcgtgcctcctggtgatgtgcggcgccgacgacaagtgcatcgcgccggtgctccaggaaggggtggtcccgtccctcgtctccatctcggcggccgggactgggaggggcagggagaaggcccagaagctcctgaagctgttcagggagcagaggcagcgggacacgccgccgccacagcagcagcagcagcagctgctgcagagccagctggcggagggcgggaacggtggtggtggagctatcgtgtgccaccgggaatcgaagccgctgtgcaagtccaagtccaggaagctgggcaggacgctgagctcgctgtggaagaacaggggcttctcgctgtaccagtgctaggagatgcatgctagagtagtgttttgagttgatcagtgggtctgcgtctgtacatcatcttctgccttgtttttctcaactggtcctttcttccccccttcttctctgggggtgttgttttatttgaggtaaaaaaaacttgatgttcttccccccctcctcggttgggtgatgtagggcattttcttccatctcggccatgacaggtcatttgtacagttgctgctgcttcagtctatctgatactcagtctcccccttttcagatcaggcgcttcttcccattcaattcaaaacccaacacggcttgcagcttgcaag

SEQ ID NO: 31089 - DNA, 3008 bp, Zea Mays
ggccgccccacgctcttcctcctcctcctcgctcgtcgacggtgacccccgcggagccgcgtggatacctcgccggggagatctgcctgccgtctctacgggcaggtaccagagttggagcgtggttactggcaggctgtggctgcattcggcctcccgctcctcctacacgcgcgcgcccggcctccttcaaggttggctctgaagacaaagcccaagctccctgcgctgctgcgcaagcggccgaccttcctgccggcgatgttggagcttaggtagtagccaacgatggaagcaatggaggccgaagaaggtccttttctggctaatgatgccaagttgcacgcaggaatttgtagagcatttcatccttctgtatctaagctttccgccattttcccctttatcgaagcatcaagacccagaagcaagcctggtatacaagcattgtgttcactacatgtagctcttgataaagccaaagggcttcttcaacattgtgcagactgcagcagactctacttggccatcacttcggaaactgtgcttttaaagtttgagaagtctagaagccagcttcaggagagtctaaggcgcactgaaagcatagtaactgaagatattggctgtaagattgtggagattgttggtgagctggaggaaattgtttttacattagatagatcagagaaggaagctggtgatgagctgatcaaattgctccagagaaataataaaacaaatggttccagtgacagtggggagcttgaggtattccatatgtctgctcttaaattgggaattacatcttctagggcagcactcaccgagagaagagcccttaagaagctaattgagaaggcccgttctgatgaagacaagcggaaggagcttgttgtgtcatacttgtacaatctcatgaggaagtactcaaagttcttcagaagtgagactggtgatgatacagattctcagggatcgtctccatgctcgccaacagtattaggcatggatgatatgtatgggccgtacaacaatggtcgggcatttagtagacagctttcgagcattcagtctttcaattcaaggtttggatctttcaattctaggcttggatcattcaattgcagacgtggtggtggtccaaggtctgagaatatgtcaatccctcctgaagaacttaggtgccctatttccttacaactcatgtatgatccagtcatcatttcatccgggcagacttatgagcgtatttgcattgagaaatggttcaacgatggtcacagcacatgtcctaaaactcagcagcaacttgcccacctgtcattgactccaaactactgtgttaaggccctcattgcgagctggtgtgagcagaacgattttccagttcctgatggtccaccagggacttttgatgtaaactggagacttgctttgtctgacactgaggccgcaggctgtgtgtcagttgaaagttttgattgtgctaatgcaaagagtgtcaaggttgtcccaatggagaacgttagaaaggaggagccagcaaacagtgaatcgggaactctggatgacggctcctgtaacgatttcgatttgaacgaaggctatgggaacttgctgctcctgctccatgaaagaagtaacatgaacaagcagtgcaggttggtggagcagataaggtatcttttgaaagacgacgaggaagcaaggatccagctgggctcaaatggctttgccgaggcactggttgagttcttgaggaatgctgtgaatgatggaaatgagaaggcacaagaagttggtgcaatggctcttttcaatcttgcagtcaacaacaacagaaacaaggggctcctgttatctgctggagtcaccgatctacttgagcagatgatatcgaatccacggctatctggtcctgccacagcactctacctgaatatttcctgccttcctgacgcgaaggccgtcatcggttcgagccaggccgtgccgttcctagtcgaccgtctgtacagccaagacggcagcgacacgagaggaagctcctgcaagcacgacgccctgtacacgctgtacaacctctcgagccaccaggccagcgtgccggcgcttctagccgcgggcatcgtggacgctctccactgcctcgtcacggagtctccagggtcggaggaggggcttggctggacagagaaggctctggcggtgctcatcagcctcgcggccacccaagctggccgaaaggagatcatgtccacccctggcttggtcagcacgctggcgatgctgctggacacgggcgagtcgacggagcaggagcaggcagtgtcgtgcctcctggtgatgtgcggcgccgacgacaagtgcatcgcgccggtgctccaggaaggggtggtcccgtccctcgtctccatctcggcggccgggactgggaggggcagggagaaggcccagaagctcctgaagctgttcagggagcagaggcagcgggacacgccgccgccacagcagcagcagcagcagctgctgcagagccagctggcggagggcgggaacggtggtggtggagctatcgtgtgccaccgggaatcgaagccgctgtgcaagtccaagtccaggaagctgggcaggacgctgagctcgctgtggaagaacaggggcttctcgctgtaccagtgctaggagatgcatgctagagtagtgttttgagttgatcagtgggtctgcgtctgtacatcatcttctgccttgtttttctcaactggtcctttcttccccccttcttctctgggggtgttgttttatttgaggtaaaaaaaacttgatgttcttccccccctcctcggttgggtgatgtagggcattttcttccatctcggccatgacaggtcatttgtacagttgctgctgcttcagtctatctgatactcagtctcccccttttcagatcaggcgcttcttcccattcaattcaaaacccaacacggcttgcagcttgcaag

SEQ ID NO: 31090 - DNA, 3050 bp, Zea Mays
ggccgccccacgctcttcctcctcctcctcgctcgtcgacggtgacccccgcggagccgcgtggatacctcgccggggagatctgcctgccgtctctacgggcaggtaccagagttggagcgtggttactggcaggctgtggctgcattcggcctcccgctcctcctacacgcgcgcgcccggcctccttcaaggttggctctgaagacaaagcccaagctccctgcgctgctgcgcaagcggccgaccttcctgccggcggtactccctgtgctggatcctctgtctagtgttgcagctgccagcgcttctcatcctcactctaccggagtggagatccgtccgggcgtgggttgattccttcttttcgggtcagatgttggagcttaggtagtagccaacgatggaagcaatggaggccgaagaaggtccttttctggctaatgatgccaagcatcaagacccagaagcaagcctggtatacaagcattgtgttcactacatgtagctcttgataaagccaaagggcttcttcaacattgtgcagactgcagcagactctacttggccatcacttcggaaactgtgcttttaaagtttgagaagtctagaagccagcttcaggagagtctaaggcgcactgaaagcatagtaactgaagatattggctgtaagattgtggagattgttggtgagctggaggaaattgtttttacattagatagatcagagaaggaagctggtgatgagctgatcaaattgctccagagaaataataaaacaaatggttccagtgacagtggggagcttgaggtattccatatgtctgctcttaaattgggaattacatcttctagggcagcactcaccgagagaagagcccttaagaagctaattgagaaggcccgttctgatgaagacaagcggaaggagcttgttgtgtcatacttgtacaatctcatgaggaagtactcaaagttcttcagaagtgagactggtgatgatacagattctcagggatcgtctccatgctcgccaacagtattaggcatggatgatatgtatgggccgtacaacaatggtcgggcatttagtagacagctttcgagcattcagtctttcaattcaaggtttggatctttcaattctaggcttggatcattcaattgcagacgtggtggtggtccaaggtctgagaatatgtcaatccctcctgaagaacttaggtgccctatttccttacaactcatgtatgatccagtcatcatttcatccgggcagacttatgagcgtatttgcattgagaaatggttcaacgatggtcacagcacatgtcctaaaactcagcagcaacttgcccacctgtcattgactccaaactactgtgttaaggccctcattgcgagctggtgtgagcagaacgattttccagttcctgatggtccaccagggacttttgatgtaaactggagacttgctttgtctgacactgaggccgcaggctgtgtgtcagttgaaagttttgattgtgctaatgcaaagagtgtcaaggttgtcccaatggagaacgttagaaaggaggagccagcaaacagtgaatcgggaactctggatgacggctcctgtaacgatttcgatttgaacgaaggctatgggaacttgctgctcctgctccatgaaagaagtaacatgaacaagcagtgcaggttggtggagcagataaggtatcttttgaaagacgacgaggaagcaaggatccagctgggctcaaatggctttgccgaggcactggttgagttcttgaggaatgctgtgaatgatggaaatgagaaggcacaagaagttggtgcaatggctcttttcaatcttgcagtcaacaacaacagaaacaaggggctcctgttatctgctggagtcaccgatctacttgagcagatgatatcgaatccacggctatctggtcctgccacagcactctacctgaatatttcctgccttcctgacgcgaaggccgtcatcggttcgagccaggccgtgccgttcctagtcgaccgtctgtacagccaagacggcagcgacacgagaggaagctcctgcaagcacgacgccctgtacacgctgtacaacctctcgagccaccaggccagcgtgccggcgcttctagccgcgggcatcgtggacgctctccactgcctcgtcacggagtctccagggtcggaggaggggcttggctggacagagaaggctctggcggtgctcatcagcctcgcggccacccaagctggccgaaaggagatcatgtccacccctggcttggtcagcacgctggcgatgctgctggacacgggcgagtcgacggagcaggagcaggcagtgtcgtgcctcctggtgatgtgcggcgccgacgacaagtgcatcgcgccggtgctccaggaaggggtggtcccgtccctcgtctccatctcggcggccgggactgggaggggcagggagaaggcccagaagctcctgaagctgttcagggagcagaggcagcgggacacgccgccgccacagcagcagcagcagcagctgctgcagagccagctggcggagggcgggaacggtggtggtggagctatcgtgtgccaccgggaatcgaagccgctgtgcaagtccaagtccaggaagctgggcaggacgctgagctcgctgtggaagaacaggggcttctcgctgtaccagtgctaggagatgcatgctagagtagtgttttgagttgatcagtgggtctgcgtctgtacatcatcttctgccttgtttttctcaactggtcctttcttccccccttcttctctgggggtgttgttttatttgaggtaaaaaaaacttgatgttcttccccccctcctcggttgggtgatgtagggcattttcttccatctcggccatgacaggtcatttgtacagttgctgctgcttcagtctatctgatactcagtctcccccttttcagatcaggcgcttcttcccattcaattcaaaacccaacacggcttgcagcttgcaag

SEQ ID NO: 31091 - DNA, 3119 bp, Zea Mays
ggccgccccacgctcttcctcctcctcctcgctcgtcgacggtgacccccgcggagccgcgtggatacctcgccggggagatctgcctgccgtctctacgggcaggtaccagagttggagcgtggttactggcaggctgtggctgcattcggcctcccgctcctcctacacgcgcgcgcccggcctccttcaaggttggctctgaagacaaagcccaagctccctgcgctgctgcgcaagcggccgaccttcctgccggcggtactccctgtgctggatcctctgtctagtgttgcagctgccagcgcttctcatcctcactctaccggagtggagatccgtccgggcgtgggttgattccttcttttcgggatgttggagcttaggtagtagccaacgatggaagcaatggaggccgaagaaggtccttttctggctaatgatgccaagttgcacgcaggaatttgtagagcatttcatccttctgtatctaagctttccgccattttcccctttatcgaagcatcaagacccagaagcaagcctggtatacaagcattgtgttcactacatgtagctcttgataaagccaaagggcttcttcaacattgtgcagactgcagcagactctacttggccatcacttcggaaactgtgcttttaaagtttgagaagtctagaagccagcttcaggagagtctaaggcgcactgaaagcatagtaactgaagatattggctgtaagattgtggagattgttggtgagctggaggaaattgtttttacattagatagatcagagaaggaagctggtgatgagctgatcaaattgctccagagaaataataaaacaaatggttccagtgacagtggggagcttgaggtattccatatgtctgctcttaaattgggaattacatcttctagggcagcactcaccgagagaagagcccttaagaagctaattgagaaggcccgttctgatgaagacaagcggaaggagcttgttgtgtcatacttgtacaatctcatgaggaagtactcaaagttcttcagaagtgagactggtgatgatacagattctcagggatcgtctccatgctcgccaacagtattaggcatggatgatatgtatgggccgtacaacaatggtcgggcatttagtagacagctttcgagcattcagtctttcaattcaaggtttggatctttcaattctaggcttggatcattcaattgcagacgtggtggtggtccaaggtctgagaatatgtcaatccctcctgaagaacttaggtgccctatttccttacaactcatgtatgatccagtcatcatttcatccgggcagacttatgagcgtatttgcattgagaaatggttcaacgatggtcacagcacatgtcctaaaactcagcagcaacttgcccacctgtcattgactccaaactactgtgttaaggccctcattgcgagctggtgtgagcagaacgattttccagttcctgatggtccaccagggacttttgatgtaaactggagacttgctttgtctgacactgaggccgcaggctgtgtgtcagttgaaagttttgattgtgctaatgcaaagagtgtcaaggttgtcccaatggagaacgttagaaaggaggagccagcaaacagtgaatcgggaactctggatgacggctcctgtaacgatttcgatttgaacgaaggctatgggaacttgctgctcctgctccatgaaagaagtaacatgaacaagcagtgcaggttggtggagcagataaggtatcttttgaaagacgacgaggaagcaaggatccagctgggctcaaatggctttgccgaggcactggttgagttcttgaggaatgctgtgaatgatggaaatgagaaggcacaagaagttggtgcaatggctcttttcaatcttgcagtcaacaacaacagaaacaaggggctcctgttatctgctggagtcaccgatctacttgagcagatgatatcgaatccacggctatctggtcctgccacagcactctacctgaatatttcctgccttcctgacgcgaaggccgtcatcggttcgagccaggccgtgccgttcctagtcgaccgtctgtacagccaagacggcagcgacacgagaggaagctcctgcaagcacgacgccctgtacacgctgtacaacctctcgagccaccaggccagcgtgccggcgcttctagccgcgggcatcgtggacgctctccactgcctcgtcacggagtctccagggtcggaggaggggcttggctggacagagaaggctctggcggtgctcatcagcctcgcggccacccaagctggccgaaaggagatcatgtccacccctggcttggtcagcacgctggcgatgctgctggacacgggcgagtcgacggagcaggagcaggcagtgtcgtgcctcctggtgatgtgcggcgccgacgacaagtgcatcgcgccggtgctccaggaaggggtggtcccgtccctcgtctccatctcggcggccgggactgggaggggcagggagaaggcccagaagctcctgaagctgttcagggagcagaggcagcgggacacgccgccgccacagcagcagcagcagcagctgctgcagagccagctggcggagggcgggaacggtggtggtggagctatcgtgtgccaccgggaatcgaagccgctgtgcaagtccaagtccaggaagctgggcaggacgctgagctcgctgtggaagaacaggggcttctcgctgtaccagtgctaggagatgcatgctagagtagtgttttgagttgatcagtgggtctgcgtctgtacatcatcttctgccttgtttttctcaactggtcctttcttccccccttcttctctgggggtgttgttttatttgaggtaaaaaaaacttgatgttcttccccccctcctcggttgggtgatgtagggcattttcttccatctcggccatgacaggtcatttgtacagttgctgctgcttcagtctatctgatactcagtctcccccttttcagatcaggcgcttcttcccattcaattcaaaacccaacacggcttgcagcttgcaag

SEQ ID NO: 31092 - DNA, 3800 bp, Zea Mays
ggccgccccacgctcttcctcctcctcctcgctcgtcgacggtgacccccgcggagccgcgtggatacctcgccggggagatctgcctgccgtctctacgggcaggtaccagagttggagcgtggttactggcaggctgtggctgcattcggcctcccgctcctcctacacgcgcgcgcccggcctccttcaaggttggctctgaagacaaagcccaagctccctgcgctgctgcgcaagcggccgaccttcctgccggcggtactccctgtgctggatcctctgtctagtgttgcagctgccagcgcttctcatcctcactctaccggagtggagatccgtccgggcgtgggttgattccttcttttcggggtgagtgattctagcttgtttgggtggatgctccgagaggtcgttttcttggaactcatcctttgctgtggccatgagcaatcaaatcgcgcattaagacgacatggatttgtgttctccgtcgcgctagccgctaggcccgacgcatctcgttcacccagttgtggctcggctaggttcttcagctcgcaagaccgttctcactctgcccccaccccaaaaaaatatcggttcataacagctcccatggcccacgctaagtccatccctgaacctgccgacatcatgtttttcttcttcttttttatttctgggcacaagactagtcaaatgctgctcactgggtgcattggcgccttaggtttgttcaaaatgtgtggttttggtaaagaaaaaaattattgggctccaaggggctggaaatctcaaaatttgcagaggggacgtccttttcagtgggttgtttacgggagccaaagtttatttttcgtgaacagtgtattgcgggcttgccagttggttttaactcttccatttctactaatagtatctggacatttgatttgccccattctacaatgtccagacccgttctttccttttagcctaagaaaaggccttgccaaatgttcagagtgaaatgctaatgttatctgtttttcttgtgattattgtagtcagatgttggagcttaggtagtagccaacgatggaagcaatggaggccgaagaaggtccttttctggctaatgatgccaagttgcacgcaggaatttgtagagcatttcatccttctgtatctaagctttccgccattttcccctttatcgaagcatcaagacccagaagcaagcctggtatacaagcattgtgttcactacatgtagctcttgataaagccaaagggcttcttcaacattgtgcagactgcagcagactctacttggccatcacttcggaaactgtgcttttaaagtttgagaagtctagaagccagcttcaggagagtctaaggcgcactgaaagcatagtaactgaagatattggctgtaagattgtggagattgttggtgagctggaggaaattgtttttacattagatagatcagagaaggaagctggtgatgagctgatcaaattgctccagagaaataataaaacaaatggttccagtgacagtggggagcttgaggtattccatatgtctgctcttaaattgggaattacatcttctagggcagcactcaccgagagaagagcccttaagaagctaattgagaaggcccgttctgatgaagacaagcggaaggagcttgttgtgtcatacttgtacaatctcatgaggaagtactcaaagttcttcagaagtgagactggtgatgatacagattctcagggatcgtctccatgctcgccaacagtattaggcatggatgatatgtatgggccgtacaacaatggtcgggcatttagtagacagctttcgagcattcagtctttcaattcaaggtttggatctttcaattctaggcttggatcattcaattgcagacgtggtggtggtccaaggtctgagaatatgtcaatccctcctgaagaacttaggtgccctatttccttacaactcatgtatgatccagtcatcatttcatccgggcagacttatgagcgtatttgcattgagaaatggttcaacgatggtcacagcacatgtcctaaaactcagcagcaacttgcccacctgtcattgactccaaactactgtgttaaggccctcattgcgagctggtgtgagcagaacgattttccagttcctgatggtccaccagggacttttgatgtaaactggagacttgctttgtctgacactgaggccgcaggctgtgtgtcagttgaaagttttgattgtgctaatgcaaagagtgtcaaggttgtcccaatggagaacgttagaaaggaggagccagcaaacagtgaatcgggaactctggatgacggctcctgtaacgatttcgatttgaacgaaggctatgggaacttgctgctcctgctccatgaaagaagtaacatgaacaagcagtgcaggttggtggagcagataaggtatcttttgaaagacgacgaggaagcaaggatccagctgggctcaaatggctttgccgaggcactggttgagttcttgaggaatgctgtgaatgatggaaatgagaaggcacaagaagttggtgcaatggctcttttcaatcttgcagtcaacaacaacagaaacaaggggctcctgttatctgctggagtcaccgatctacttgagcagatgatatcgaatccacggctatctggtcctgccacagcactctacctgaatatttcctgccttcctgacgcgaaggccgtcatcggttcgagccaggccgtgccgttcctagtcgaccgtctgtacagccaagacggcagcgacacgagaggaagctcctgcaagcacgacgccctgtacacgctgtacaacctctcgagccaccaggccagcgtgccggcgcttctagccgcgggcatcgtggacgctctccactgcctcgtcacggagtctccagggtcggaggaggggcttggctggacagagaaggctctggcggtgctcatcagcctcgcggccacccaagctggccgaaaggagatcatgtccacccctggcttggtcagcacgctggcgatgctgctggacacgggcgagtcgacggagcaggagcaggcagtgtcgtgcctcctggtgatgtgcggcgccgacgacaagtgcatcgcgccggtgctccaggaaggggtggtcccgtccctcgtctccatctcggcggccgggactgggaggggcagggagaaggcccagaagctcctgaagctgttcagggagcagaggcagcgggacacgccgccgccacagcagcagcagcagcagctgctgcagagccagctggcggagggcgggaacggtggtggtggagctatcgtgtgccaccgggaatcgaagccgctgtgcaagtccaagtccaggaagctgggcaggacgctgagctcgctgtggaagaacaggggcttctcgctgtaccagtgctaggagatgcatgctagagtagtgttttgagttgatcagtgggtctgcgtctgtacatcatcttctgccttgtttttctcaactggtcctttcttccccccttcttctctgggggtgttgttttatttgaggtaaaaaaaacttgatgttcttccccccctcctcggttgggtgatgtagggcattttcttccatctcggccatgacaggtcatttgtacagttgctgctgcttcagtctatctgatactcagtctcccccttttcagatcaggcgcttcttcccattcaattcaaaacccaacacggcttgcagcttgcaag

SEQ ID NO: 31093 - DNA, 3012 bp, Zea Mays
ggccgccccacgctcttcctcctcctcctcgctcgtcgacggtgacccccgcggagccgcgtggatacctcgccggggagatctgcctgccgtctctacgggcaggtaccagagttggagcgtggttactggcaggctgtggctgcattcggcctcccgctcctcctacacgcgcgcgcccggcctccttcaaggttggctctgaagacaaagcccaagctccctgcgctgctgcgcaagcggccgaccttcctgccggcgtcagatgttggagcttaggtagtagccaacgatggaagcaatggaggccgaagaaggtccttttctggctaatgatgccaagttgcacgcaggaatttgtagagcatttcatccttctgtatctaagctttccgccattttcccctttatcgaagcatcaagacccagaagcaagcctggtatacaagcattgtgttcactacatgtagctcttgataaagccaaagggcttcttcaacattgtgcagactgcagcagactctacttggccatcacttcggaaactgtgcttttaaagtttgagaagtctagaagccagcttcaggagagtctaaggcgcactgaaagcatagtaactgaagatattggctgtaagattgtggagattgttggtgagctggaggaaattgtttttacattagatagatcagagaaggaagctggtgatgagctgatcaaattgctccagagaaataataaaacaaatggttccagtgacagtggggagcttgaggtattccatatgtctgctcttaaattgggaattacatcttctagggcagcactcaccgagagaagagcccttaagaagctaattgagaaggcccgttctgatgaagacaagcggaaggagcttgttgtgtcatacttgtacaatctcatgaggaagtactcaaagttcttcagaagtgagactggtgatgatacagattctcagggatcgtctccatgctcgccaacagtattaggcatggatgatatgtatgggccgtacaacaatggtcgggcatttagtagacagctttcgagcattcagtctttcaattcaaggtttggatctttcaattctaggcttggatcattcaattgcagacgtggtggtggtccaaggtctgagaatatgtcaatccctcctgaagaacttaggtgccctatttccttacaactcatgtatgatccagtcatcatttcatccgggcagacttatgagcgtatttgcattgagaaatggttcaacgatggtcacagcacatgtcctaaaactcagcagcaacttgcccacctgtcattgactccaaactactgtgttaaggccctcattgcgagctggtgtgagcagaacgattttccagttcctgatggtccaccagggacttttgatgtaaactggagacttgctttgtctgacactgaggccgcaggctgtgtgtcagttgaaagttttgattgtgctaatgcaaagagtgtcaaggttgtcccaatggagaacgttagaaaggaggagccagcaaacagtgaatcgggaactctggatgacggctcctgtaacgatttcgatttgaacgaaggctatgggaacttgctgctcctgctccatgaaagaagtaacatgaacaagcagtgcaggttggtggagcagataaggtatcttttgaaagacgacgaggaagcaaggatccagctgggctcaaatggctttgccgaggcactggttgagttcttgaggaatgctgtgaatgatggaaatgagaaggcacaagaagttggtgcaatggctcttttcaatcttgcagtcaacaacaacagaaacaaggggctcctgttatctgctggagtcaccgatctacttgagcagatgatatcgaatccacggctatctggtcctgccacagcactctacctgaatatttcctgccttcctgacgcgaaggccgtcatcggttcgagccaggccgtgccgttcctagtcgaccgtctgtacagccaagacggcagcgacacgagaggaagctcctgcaagcacgacgccctgtacacgctgtacaacctctcgagccaccaggccagcgtgccggcgcttctagccgcgggcatcgtggacgctctccactgcctcgtcacggagtctccagggtcggaggaggggcttggctggacagagaaggctctggcggtgctcatcagcctcgcggccacccaagctggccgaaaggagatcatgtccacccctggcttggtcagcacgctggcgatgctgctggacacgggcgagtcgacggagcaggagcaggcagtgtcgtgcctcctggtgatgtgcggcgccgacgacaagtgcatcgcgccggtgctccaggaaggggtggtcccgtccctcgtctccatctcggcggccgggactgggaggggcagggagaaggcccagaagctcctgaagctgttcagggagcagaggcagcgggacacgccgccgccacagcagcagcagcagcagctgctgcagagccagctggcggagggcgggaacggtggtggtggagctatcgtgtgccaccgggaatcgaagccgctgtgcaagtccaagtccaggaagctgggcaggacgctgagctcgctgtggaagaacaggggcttctcgctgtaccagtgctaggagatgcatgctagagtagtgttttgagttgatcagtgggtctgcgtctgtacatcatcttctgccttgtttttctcaactggtcctttcttccccccttcttctctgggggtgttgttttatttgaggtaaaaaaaacttgatgttcttccccccctcctcggttgggtgatgtagggcattttcttccatctcggccatgacaggtcatttgtacagttgctgctgcttcagtctatctgatactcagtctcccccttttcagatcaggcgcttcttcccattcaattcaaaacccaacacggcttgcagcttgcaag

SEQ ID NO: 31094 - DNA, 2872 bp, Zea Mays
ggccgccccacgctcttcctcctcctcctcgctcgtcgacggtgacccccgcggagccgcgtggatacctcgccggggagatctgcctgccgtctctacgggcaggtaccagagttggagcgtggttactggcaggctgtggctgcattcggcctcccgctcctcctacacgcgcgcgcccggcctccttcaagtcagatgttggagcttaggtagtagccaacgatggaagcaatggaggccgaagaaggtccttttctggctaatgatgccaagcatcaagacccagaagcaagcctggtatacaagcattgtgttcactacatgtagctcttgataaagccaaagggcttcttcaacattgtgcagactgcagcagactctacttggccatcacttcggaaactgtgcttttaaagtttgagaagtctagaagccagcttcaggagagtctaaggcgcactgaaagcatagtaactgaagatattggctgtaagattgtggagattgttggtgagctggaggaaattgtttttacattagatagatcagagaaggaagctggtgatgagctgatcaaattgctccagagaaataataaaacaaatggttccagtgacagtggggagcttgaggtattccatatgtctgctcttaaattgggaattacatcttctagggcagcactcaccgagagaagagcccttaagaagctaattgagaaggcccgttctgatgaagacaagcggaaggagcttgttgtgtcatacttgtacaatctcatgaggaagtactcaaagttcttcagaagtgagactggtgatgatacagattctcagggatcgtctccatgctcgccaacagtattaggcatggatgatatgtatgggccgtacaacaatggtcgggcatttagtagacagctttcgagcattcagtctttcaattcaaggtttggatctttcaattctaggcttggatcattcaattgcagacgtggtggtggtccaaggtctgagaatatgtcaatccctcctgaagaacttaggtgccctatttccttacaactcatgtatgatccagtcatcatttcatccgggcagacttatgagcgtatttgcattgagaaatggttcaacgatggtcacagcacatgtcctaaaactcagcagcaacttgcccacctgtcattgactccaaactactgtgttaaggccctcattgcgagctggtgtgagcagaacgattttccagttcctgatggtccaccagggacttttgatgtaaactggagacttgctttgtctgacactgaggccgcaggctgtgtgtcagttgaaagttttgattgtgctaatgcaaagagtgtcaaggttgtcccaatggagaacgttagaaaggaggagccagcaaacagtgaatcgggaactctggatgacggctcctgtaacgatttcgatttgaacgaaggctatgggaacttgctgctcctgctccatgaaagaagtaacatgaacaagcagtgcaggttggtggagcagataaggtatcttttgaaagacgacgaggaagcaaggatccagctgggctcaaatggctttgccgaggcactggttgagttcttgaggaatgctgtgaatgatggaaatgagaaggcacaagaagttggtgcaatggctcttttcaatcttgcagtcaacaacaacagaaacaaggggctcctgttatctgctggagtcaccgatctacttgagcagatgatatcgaatccacggctatctggtcctgccacagcactctacctgaatatttcctgccttcctgacgcgaaggccgtcatcggttcgagccaggccgtgccgttcctagtcgaccgtctgtacagccaagacggcagcgacacgagaggaagctcctgcaagcacgacgccctgtacacgctgtacaacctctcgagccaccaggccagcgtgccggcgcttctagccgcgggcatcgtggacgctctccactgcctcgtcacggagtctccagggtcggaggaggggcttggctggacagagaaggctctggcggtgctcatcagcctcgcggccacccaagctggccgaaaggagatcatgtccacccctggcttggtcagcacgctggcgatgctgctggacacgggcgagtcgacggagcaggagcaggcagtgtcgtgcctcctggtgatgtgcggcgccgacgacaagtgcatcgcgccggtgctccaggaaggggtggtcccgtccctcgtctccatctcggcggccgggactgggaggggcagggagaaggcccagaagctcctgaagctgttcagggagcagaggcagcgggacacgccgccgccacagcagcagcagcagcagctgctgcagagccagctggcggagggcgggaacggtggtggtggagctatcgtgtgccaccgggaatcgaagccgctgtgcaagtccaagtccaggaagctgggcaggacgctgagctcgctgtggaagaacaggggcttctcgctgtaccagtgctaggagatgcatgctagagtagtgttttgagttgatcagtgggtctgcgtctgtacatcatcttctgccttgtttttctcaactggtcctttcttccccccttcttctctgggggtgttgttttatttgaggtaaaaaaaacttgatgttcttccccccctcctcggttgggtgatgtagggcattttcttccatctcggccatgacaggtcatttgtacagttgctgctgcttcagtctatctgatactcagtctcccccttttcagatcaggcgcttcttcccattcaattcaaaacccaacacggcttgcagcttgcaag

SEQ ID NO: 31095 - DNA, 3938 bp, Zea Mays
gcacaggtcagtggatcaactgccctcctgctgctttaatctccgtccacccatgaccacgaggttaatttgaaacccacgggccagcaattatttgtggcgggaaagcaagcctgctagaacgatagacaacggctccgatggaccgaaggcaaggcgaggcctccacggctccacctccactgtctccactcaaccgagcgagcggtagaaaaaagttcggaagagcgaaagaggccgcggaaaaggcgtgcaagcggccgcgagggaatccaattccaattccaattccagcctcacgtcctcccctcccctctgccctgccctgccctgccccgctttgttttacattccattccatcccatcccattttgcagctcctccttccgcagcggcaggggcaggaggagacgacggtcgccaccggcgccctgcaccggcggatgtcggatcgggagctccgccccctgcgctccatcagaatcacaggggacggtcgatgcctgttcaggtccgtcgcctacggcgcctgcctgaggagaggaaagcatgcgcccagcgacagcgcccagaaggaactggccgacgagctccgagccaaagtagctgatgagttcgtcaagcgaagaggagacaccgaatggttccttgaaggcagctttgagagttatgtgagacagatgagaaagcctcatgcttggggaggggaacctgagctgttcatgtgttcccacgttctcaggatgcccatcaccgtctacatgtatacgggcagctccgacggcccaaggatcatagcggaatacggccaggaatacggaaaggacgatccagtccgcgttctctacgacggctacgggcactacgacgcactccagccatctctcgcgaggtgtgtaggtcaccgggggctgcgctgcctaagcttcttctacaggacagctgcgtaactgcgagcagctcaagatttgacgacgctatttttttactccagttccacacagccgtatagccaatacgaaactatgcctggcggctttgactgtaccagccttttctgttcttcaacgtttgatgtataaataaacacacacacacacaaaaaaaaactcgtcacccgagtcagaaaatcagttgagctactacctggtaccatgcccagcatcgagtgaccgaccgtgtaaagtttcttcgatcgtttttgctcaacaagaatgctgcatagaaaaaaaaaagctgaataatgctcaagttgtcatactaaaattctcttggacttcgtatggggtggcatgaacgctcggtcagtgctcggtttctgagttacggtcttgtcaaaatccagtgacacacaaaaaaaaagatgagctcgatgaaaaatggagcacagatgatattcctacaacaattttaccagcaacaacaatcccagtcgcgttgaaagggaggacttctttacacgaaagccagagccaccgcgtcgcggtaactaaattacaacatcgtcctacttgttatctcctagtcttcaagccgttggcaccccggtcgctagtccgtggaacaaccaagaaaagaggaagctgagtcatggaagccgctccacatgtcacgcacttctgcccgcggcctggtctcctgaagcaacagctctggtttaacagtcacattgttacggcgtaaaaaccctcctccgtctgcttctccagcatcagcagcagctcttgttgcctaggcaacagcagtttgcttggtcgtgttttagcttctgcaaggatccatgtttttttaggcatggtaagagatagtgtatttttgtttgtaggcatgtcgagataaagactcaagtcacaaatatatatatattttttgtttgcacaccaagcgatacgtacgtacctcaacttggtccttgagctctttgatgtactccacagcaaggtccaacatgtccgacgtattcgtttgctgcgtgttcacgagaaacaccaataaacacgctgacgaaaatgggcgatggcaacgaacaacaacgagaacaggttgttcagcaatcccgcacgggaaaaatctacggatgacgataatgaatggctatggctcattgcagatcttaagctcagcttaccttgtccatgttgggcacgaggtcttgcagcttcttcagcctcttgctgatcctcgtccttctttcctgaacgtacgccagcgaacaaggaaaacgaaattggtttctgtgctgacatccagctagcatcaaagctggcagagtgtggcaccatatattgcgccgtgcttttttttagcgaatcgtttgggaaggaccgaaggatcgagtagatgaactgaccctctcggcaatgctccgtgggtgagtcgcgcagccacgcctcgcacgcactctgcaggcgacggagtcctgctgcagctgcaggtagtcgtccatgccgggcagctccagggacgagttggacaggccgaactggacatacatacagcaaggccaaaaaaaaaacagctcactcccgtcagcatggaaccacgccgtcgatgatgcatgacgccggggagcggcaaagtaaggccagagctaggcacggaaagcggcgcgcgctgacctgcgggtcaatggtgctgaagttggtgaccatgtcgtcggcgccggcggcggggtccaccttgggcttcttgcagggggcagacgagaacatgatggagttggtgtcgtcccaggagccgacggagaaggtcctggagaggtaggaggaggactgcgcggcgtcgctggagctgttgcacccgccggcgcccacgatgctctccccgatgtcggccggtatcatccccatctccgagatctgcggcaggtcctgcctggagaagctccactgcgagctgagctgcgcgtggccgtggccgtggccggggcccagcgcggcgtcgctgcccgcctgcgtgtagctccccatcgctcctccgctcgccgccattcctgcagtgggcgcatccggaagatcgtcgaacacacgtcaaacaggtagactatagctgacccgtgcccgcatgtcagcgactgttcgtcgagcttgaggtaaaaggcattcttttggtatatttattttagtagtatcgttcctttttttcacgctttcttcctttttttcattttaagaaaaacaagaacattgtaccatcgatgatttttcttctttatcgcgttctagctagaaagtagttggatgaacggctggtgagtgctgctgacaagcgctgcccagcccccagcaggttcgccgtagctacagccggattcgcagcgggacggccaggaacggtcgccctcacgtcacctaggtcggcagcatataggccgcctttccgaaaaccgaaagagcagacaatggaggggacgggaccaatccgcgtgtatttgtttacgttaatttcatactgtggtcgcgataggattcttcggcaaggtgcgttgcatttgcactgcgcttgcgtactactgtgcgacgaacgatgttgcggcacggattcactaccaagggagctagggaagcattgttaatgagagccgagaacgctggacatgtgcgccggtgggtgggtgatcgacttcgcgtctcgttcggagctggagctggagctggagctggagaggagtattattctatacaacggccgccgggcacatgccaaccaaccaaatcagcgagaccaacgttatgctaatttactctagtattattctagcttagctgaagccgaaagcgcagtgattacagctaccgccatttactctagcagtttagttactgttactgttactcctaccttgggttcgaattcaacgtgctcctagcctgcctccctaatcacggcaaagccggaaaacgacgaccgagacacgtaccccagcaagcgcaagctg

SEQ ID NO: 31096 - DNA, 594 bp, Zea Mays
ctaaaatcagaaaccagataatataatctcctcctaacaatccacgctaccaatcttataagccgaaagcaacactgcatgttttctttatgtgcgggcaacgccatacatctgatggctcccatggaggaatcacaggggacggtcgatgcctgttcaggtccgtcgcctacggcgcctgcctgaggagaggaaagcatgcgcccagcgacagcgcccagaaggaactggccgacgagctccgagccaaagtagctgatgagttcgtcaagcgaagaggagacaccgaatggttccttgaaggcagctttgagagttatgtgagacagatgagaaagcctcatgcttggggaggggaacctgagctgttcatgtgttcccacgttctcaggatgcccatcaccgtctacatgtatacgggcagctccgacggcccaaggatcatagcggaatacggccaggaatacggaaaggacgatccagtccgcgttctctacgacggctacgggcactacgacgcactccagccatctctcgtaagaacacaatcatcgagacttgctctcatctagctcggaaccagtaacacacccc

SEQ ID NO: 31097 - DNA, 3796 bp, Zea Mays
cacgctaccaatcttataagccgaaagcaacactgcatgttttctttatgtgcgggcaacgccatacatctgatggctcccatggaggaatcacaggggacggtcgatgcctgttcaggtccgtcgcctacggcgcctgcctgaggagaggaaagcatgcgcccagcgacagcgcccagaaggaactggccgacgagctccgagccaaagtagctgatgagttcgtcaagcgaagaggagacaccgaatggttccatcctctttccattactgcttttatgatatatgtattattagtttccatggacgtactatctgtttctgcatacagactatatattcccatacagcaactttacacatttaatttgttgatagatgtccttccatccttaataaagatctaatgtcaaaagaacatgctccagctcccaatatacaaagacgactatgtcttattaactcctttccaatcttaggttccttgaaggcagctttgagagttatgtgagacagatgagaaagcctcatgcttggggaggggaacctgagctgttcatgtgttcccacgttctcaggatgcccatcaccgtctacatgtatacgggcagctccgacggcccaaggatcatagcggaatacggccaggaatacggaaaggacgatccagtccgcgttctctacgacggctacgggcactacgacgcactccagccatctctcgtaagaacacaatcatcgagactgcgaggtgtgtaggtcaccgggggctgcgctgcctaagcttcttctacaggacagctgcgtaactgcgagcagctcaagatttgacgacgctatttttttactccagttccacacagccgtatagccaatacgaaactatgcctggcggctttgactgtaccagccttttctgttcttcaacgtttgatgtataaataaacacacacacacacaaaaaaaaactcgtcacccgagtcagaaaatcagttgagctactacctggtaccatgcccagcatcgagtgaccgaccgtgtaaagtttcttcgatcgtttttgctcaacaagaatgctgcatagaaaaaaaaaagctgaataatgctcaagttgtcatactaaaattctcttggacttcgtatggggtggcatgaacgctcggtcagtgctcggtttctgagttacggtcttgtcaaaatccagtgacacacaaaaaaaaagatgagctcgatgaaaaatggagcacagatgatattcctacaacaattttaccagcaacaacaatcccagtcgcgttgaaagggaggacttctttacacgaaagccagagccaccgcgtcgcggtaactaaattacaacatcgtcctacttgttatctcctagtcttcaagccgttggcaccccggtcgctagtccgtggaacaaccaagaaaagaggaagctgagtcatggaagccgctccacatgtcacgcacttctgcccgcggcctggtctcctgaagcaacagctctggtttaacagtcacattgttacggcgtaaaaaccctcctccgtctgcttctccagcatcagcagcagctcttgttgcctaggcaacagcagtttgcttggtcgtgttttagcttctgcaaggatccatgtttttttaggcatggtaagagatagtgtatttttgtttgtaggcatgtcgagataaagactcaagtcacaaatatatatatattttttgtttgcacaccaagcgatacgtacgtacctcaacttggtccttgagctctttgatgtactccacagcaaggtccaacatgtccgacgtattcgtttgctgcgtgttcacgagaaacaccaataaacacgctgacgaaaatgggcgatggcaacgaacaacaacgagaacaggttgttcagcaatcccgcacgggaaaaatctacggatgacgataatgaatggctatggctcattgcagatcttaagctcagcttaccttgtccatgttgggcacgaggtcttgcagcttcttcagcctcttgctgatcctcgtccttctttcctgaacgtacgccagcgaacaaggaaaacgaaattggtttctgtgctgacatccagctagcatcaaagctggcagagtgtggcaccatatattgcgccgtgcttttttttagcgaatcgtttgggaaggaccgaaggatcgagtagatgaactgaccctctcggcaatgctccgtgggtgagtcgcgcagccacgcctcgcacgcactctgcaggcgacggagtcctgctgcagctgcaggtagtcgtccatgccgggcagctccagggacgagttggacaggccgaactggacatacatacagcaaggccaaaaaaaaaacagctcactcccgtcagcatggaaccacgccgtcgatgatgcatgacgccggggagcggcaaagtaaggccagagctaggcacggaaagcggcgcgcgctgacctgcgggtcaatggtgctgaagttggtgaccatgtcgtcggcgccggcggcggggtccaccttgggcttcttgcagggggcagacgagaacatgatggagttggtgtcgtcccaggagccgacggagaaggtcctggagaggtaggaggaggactgcgcggcgtcgctggagctgttgcacccgccggcgcccacgatgctctccccgatgtcggccggtatcatccccatctccgagatctgcggcaggtcctgcctggagaagctccactgcgagctgagctgcgcgtggccgtggccgtggccggggcccagcgcggcgtcgctgcccgcctgcgtgtagctccccatcgctcctccgctcgccgccattcctgcagtgggcgcatccggaagatcgtcgaacacacgtcaaacaggtagactatagctgacccgtgcccgcatgtcagcgactgttcgtcgagcttgaggtaaaaggcattcttttggtatatttattttagtagtatcgttcctttttttcacgctttcttcctttttttcattttaagaaaaacaagaacattgtaccatcgatgatttttcttctttatcgcgttctagctagaaagtagttggatgaacggctggtgagtgctgctgacaagcgctgcccagcccccagcaggttcgccgtagctacagccggattcgcagcgggacggccaggaacggtcgccctcacgtcacctaggtcggcagcatataggccgcctttccgaaaaccgaaagagcagacaatggaggggacgggaccaatccgcgtgtatttgtttacgttaatttcatactgtggtcgcgataggattcttcggcaaggtgcgttgcatttgcactgcgcttgcgtactactgtgcgacgaacgatgttgcggcacggattcactaccaagggagctagggaagcattgttaatgagagccgagaacgctggacatgtgcgccggtgggtgggtgatcgacttcgcgtctcgttcggagctggagctggagctggagctggagaggagtattattctatacaacggccgccgggcacatgccaaccaaccaaatcagcgagaccaacgttatgctaatttactctagtattattctagcttagctgaagccgaaagcgcagtgattacagctaccgccatttactctagcagtttagttactgttactgttactcctaccttgggttcgaattcaacgtgctcctagcctgcctccctaatcacggcaaagccggaaaacgacgaccgagacacgtaccccagcaagcgcaagctg

SEQ ID NO: 31098 - DNA, 613 bp, Zea Mays
tctgagactgtggaggcattagtttgtaccaaagactggaatcttgcatctaacaaagatcgcaatgacaaggtaccgtcaattgttgaggagttcatggcagatgaaaatgaatatagctcggcaattgaagagggacagaaccaagctgacaatgaaggaaatggtgaggatagtgaggatgagggcagcgatatggagttatgatttttctgcagctgttcatgggagtctgtttcacaagtttcagtgctccgaagcctaagatgatgcttaaatcttggttttcgacattttggcgctagctggtagctgctacacttaatccttaatgtagtaatgacaatgtagttctagtttggagaggtatgtactattgtgacattttggcgctagctggtagctgctacgacattttggctgctagctggtagctggtagctagttctattgtgatatgtacgcagtacagtacttagcatttagcaatgctgatggctcacgctcatgactgcttgcctatttacttagctttatctgtctattagcctgatcggttgtgacatttgaatctggatgctatatatgaatgaatgatgtgtctttatatccg

SEQ ID NO: 31099 - DNA, 1859 bp, Zea Mays
gtatacaaatataatgcaacatactgtcattaaatatgctttttctgtaagttttatatttcaccaatgatgttgttattgttaactgacattgcttcacactatcaattttggattcggcgcaatgatttgtgggattgaaatcaaatcttaaatcaacagtctatttaggtggctatgataaagaggagaaagctgctagggcttatgatcttgctgctctgaagtactggggtgccacaacaacaacaaattttccagtgagtaactacgaaaaggagctcgaggacatgaagcacatgacaaggcaggagtttgtagcgtctctgagaaggaagagcagtggtttctccagaggtgcatccatttacaggggagtgactaggcatcaccaacatggaagatggcaagcacggattggacgagttgcagggaacaaggatctttacttgggcaccttcagcacccaggaggaggcagcggaggcgtacgacatcgcggcgatcaagttccgcggcctcaacgccgtcaccaacttcgacatgagccgctacgacgtgaagagcatcctggacagcagcgccctccccatcggcagcgccgccaagcgtctcaaggaggccgaggccgcagcgtccgcgcagcaccaccacgccggcgtggtgagctacgacgtcggccgcatcgcctcgcagctcggcgacggcggagccctagcggcggcgtacggcgcgcactaccacggcgccgcctggccgaccatcgcgttccagccgggcgccgccaccacaggcctgtaccacccgtacgcgcagcagccaatgcgcggcggcgggtggtgcaagcaggagcaggaccacgcggtgatcgcggccgcgcacagcctgcaggacctccaccacttgaacctgggcgcggccggcgcgcacgactttttctcggcagggcagcaggccgccgccgcagctgcgatgcacggcctggctagcatcgacagtgcgtcgctcgagcacagcaccggctccaactccgtcgtctacaacggcggggtcggcgatagcaacggcgccagcgccgttggcagcggcggtggctacatgatgccgatgagcgctgccggagcaaccactacatcggcaatggtgagccacgagcagatgcatgcacgggcctacgacgaagccaagcaggctgctcagatggggtacgagagctacctggtgaacgcggagaacaatggtggcggaaggatgtctgcatgggggaccgtcgtctctgcagccgcggcggcagcagcaagcagcaacgacaacattgccgccgacgtcggccatggcggcgcgcagctcttcagtgtctggaacgacacttaagctacgcgggccggcctggctctccgaatccgaaccgatcgatgcgtcgtaaaacgtacactgacataagtaacaacacttagggttcttcatggagttgttaccagtaagttgttacttgtcatatgttttaagttctcaatttgtagctggaaggaaagctagggtttcttctgaagggtagggtgatggcttgtgaagagtgccacgcatgcacggggttttctccatgatgacggtaccttcacttgctgccattttggggttcaggttcagaagatggataccgagtagcagtattaaccaaaagccatgtttaaatgggatgggtaggaaattgaaccggcaagcttgcttgtaaatggtagctagggtggatgagctgacacgaggtgaaaatgatggcaccttaatggtctagtgtttccattctagagatcaaactgaagcagggagatgcgcaatagttcattcattgcttttgct

SEQ ID NO: 31100 - DNA, 1031 bp, Zea Mays
cgcaagcctggaacgcgtgagcgtcgtgccagtgtgcgcgtcacaggaccggagtgggtgtagctgtgtgcgtggtgttcctgcctgtctggtggaccagctgcgtctggtggtggaattccttatgtatcgtgaagtctgaactggaaaggatatcaaacaaacaaaggaaatatctatttcgaccagttcctatatatctctctgtcgtcgtcctcctccaacctttaccccaattccttctgttggtatagatcggcgctgttaacaattggtatcagagctccaacgatcctcggaccttcttcctccatggctactgcttcatcaccgatcgacgcccagctcactcaagcgctggaacaccaaacccgtgccattctcgccgagctcgacaaacgcttttccgccatcgattccaagtgggagctccgcgtcggtgccctggagtcccaagcgaaagagttcgcccgccaccacgaggacatctcctccacgatccgggcggatgtcgaggcgcacctctcagcggccgatgcggataccctggaccggatccgctactgggaggcatccacaggtttcggcgacggcgcagcgacgctcggattcggaggcatcgcaagaagcaagcagatccggacggtttgggttggcttcggccacgcagaaccgttgggcctgcctttggaccaggccgtcactgggccagtatcgtcgccgccttagcgtcactcacactgacaaaaaaaaaagagagagagagagagagatgaaaaaacagctctctcatcgaacttcgatggggagagcgtgcagcggcacacgaagttttttttataaaaaaaaggcgtgcagcacaccgatcaatgtggcatctctccatatccagtagtataggcgcacagcaggtacagccacgcacatcggcacatggagaattggagacacgatccgtcgccgccattctttcatgtggacaattctcatctcgacgacggttcgcgtgcaccggcaccaagaaaatgtta

SEQ ID NO: 31101 - DNA, 2946 bp, Zea Mays
ggtatagatcggcgctgttaacaattggtatcagagctccaacgatcctcggaccttcttcctccatggctactgcttcatcaccgatcgacgcccagctcactcaagcgctggaacaccaaacccgtgccattctcgccgagctcgacaaacgcttttccgccatcgattccaagtgggagctccgcgtcggtgccctggagtcccaagcgaaagagttcgcccgccaccacgaggacatctcctccacgatccgggcggatgtcgaggcgcacctctcagcggccgatgcggataccctggaccggatccgctactgggaggcatccacaggtgctcgcgttaccgccctggagtccgccatccacctgctcgatacttggcgtcctcgaatggggtcttcagtggatgctttccacacctccatggatacagttcacgctgaactgtccaaaatggagatccaatggtccaatggagcgcgcgttgacggcttctccaggcccagcctccttgacgcgcgcgaatcggcaccggcgcgctcacctgcgcccgtcagcttcgccgatggctcatgttttgggccccgcctttcctctactaaccgggactgtggatttgggccctatgtggtcgatctccacttcccggtcaagggtacgtggtctcctcaaccccatggttcatttgagtttcctgcccaccataatttcagtcctggagaactagagcgtcgtggactctcgagtcgcgggttgggtggccttcctaaacttagtttcccagtattcaatggtacttgtcgcaaattatggcaaaaacggtgtgaagactattttgatatgtatgccaccgaagagataatgtgggtcaaagtcgctactatgcacttccaaggtgtagttgcacgctggctgcagtcaattgagcttgtttgtcgtcgctctcttggcgccagttttgccaattcgtccatgaaagatttggccgccagcaacatgaattggttatccgccagcttttccacataaaacagacctctactgtccaggattacattgatcgtttttgcgagctagttgatttgctggtcacctatgaacacacaacagaccctttatactacactatgagatttgttgatggcctgcgcgatgatatcaaatgtgttattcttgtccaacgacctggcgatctcgatactgcctgctccttggccttgttgcaggaagcagcggagcctgctcgtgccgaccgttcttatacggctcggccaatgctgaagcctgtcgcggctcgctgggatcaacctcgaactgggactagtgacaactccaagcactccctcgctgctgctccaactgctgattctaaagtggcttctcttcgtgcctatcgccatgctagaggtctctgccaatattgtgctgagaaatggagcaaaggccacaagtgtgctgagacagtgcagttgcatgttgttcaagagttatgggatatgttgtctgttgatcagccagagtctaagggggagtttgaggattctgttgaccagttaatgctcttattatccaaggaatctatgtcggctaatacactatctaaggcattcagaatttgtggacaactgcaaggcatggagatgttgatgctgcttgattcagggagttcccatagttttttgaattcagtccgcaccaccgacttatcaggttttgttccgttggacacgcccttgtcggtcagagtagccaatggcaatgtcttgctttgttcagtggagctacctaatgcagaatggtcagtgcagggtgtcactttttcttccacatttaaagtcctgcctctacccttttatgatatcattttgggcatggattggcttgaaaatctgagcccaatgacagtggattggaaacacaagtggttgtcagtcccactggctggcagtacagtgcttttgcaaggttgtcacccattagtccctgtgggaactttgctggaggtcccacaggtggctgttaattcagccgaatagattcagttattgtctattgaggagttgcagttgcccgaacatgtgctgcacttacttcgtgtattccaagacttatttcaatcaccatctactttgccacctagcaggtcctgtgatcacactattcctcttattgaagcagctcgaccagttaatattcgaccctatcggttttctcctgcgatgaaggatgagatcgagtctcaagtggctgaaatgttgcaaactggattaattcaacatagtcacagctcgttttcctctccagtgctgcgggtcaaaaagaaggattcttcttggcgtttttgcgtcgattacaggcatcttaatgctcttactatcaagtccaagtaccctgtcccaattattgatgagctactcgatgagctgtttggtgcatcctggttttctatattggaccttagggcgggtttccaccagattttattgaaagagggtttcggcgacggcgcagcgacgctcggattcggaggcatcgcaagaagcaagcagatccggacggtttgggttggcttcggccacgcagaaccgttgggcctgcctttggaccaggccgtcactgggccagtatcgtcgccgccttagcgtcactcacactgacaaaaaaaaaagagagagagagagagagatgaaaaaacagctctctcatcgaacttcgatggggagagcgtgcagcggcacacgaagttttttttataaaaaaaaggcgtgcagcacaccgatcaatgtggcatctctccatatccagtagtataggcgcacagcaggtacagccacgcacatcggcacatggagaattggagacacgatccgtcgccgccattctttcatgtggacaattctcatctcgacgacggttcgcgtgcaccggcaccaagaaaatgtta

SEQ ID NO: 31102 - DNA, 3282 bp, Zea Mays
attttgttagtgacgtgaaccaaacaaaatacgtagctaaatcaaatcacggtgtcatatgattctattaataaaatatatttttaaccaactaactattaactctagtgcatttaaataaacctgactataacgaaaaatgttctaatcgtgatgaaagcttgccctgcgctgtgcgtgtaggatgcgcaaattaccaaaagggccctgggctactgagttggcggctgctctctcggtggtcccaaagggaagagggggaaccgggcagagagcagcgcaggacaagacaggcagagaagtcgctagccagactagtctgcgcggtgatccgtcttccctggggtgttccgccgtcctgcagcagaggcagggggttgccgctctcgccgccgcacgctgcggctctgctctgctccgcctgatccttcctgcggcccttgttttttcctctcgtttcaggtggccagccttggttttgcagaactcattcagtggcctctgctgaaaagtgttcaatggcgtcaggagccaccttaagctgggttaaaaccccatttgacacccgaagatttcatgacctatctaatctaagtttccgctgccgaaacccttttggatcaattcagccctggtggctgcaaactgatcaagactcatccctaatcaaggttcgcgtggctgctgattattcagactcaatgccagattcaaagtacacgagagatcggggttatcaccctcttgaagaagttaaagaacgtccaaagaagaaggacctgttgctgacagatattgaaacagctagaacagtagtagaggcaaatagcaaggggttgcttgtatttcctgctagggtacacaatgaacctcatggacatgtttcttggtcggagtttcaatatgttgttgatgaatatggagacattttctttgaagtacctgacagtgagaacatcctggaagatgatactgcaaacaatcctgtgacagttttgattggaatggatggacccattattggagaaagtagtgtggcgattagtgatttcagtgattacatggatggtgaaaattttatggacgttcctgatgagcaccacaccaagattgatacagaaataactgatattctcatagagtgggggatgcctgcaacaatgcgtgcaatacatccgatttactttgccaaatgtttgacaaaggtaagcgataaataattatttgaagagtgcagacaccacaaaccagcagcacttggaatagtgaaaatggtcaagctgataaagatgctattaacgaaaggacagacccagtgggcagtggcccgttctggtggctcccacatgagtagggtctagacaaggaataatcaaggcaagctttactcctgcattttgcagagaggctgcattgaactaggacctttggctcagtgagaaggcttcgcaccactgcaccaggcttgcccttcaataaagatgctattaatgattcattgaattcagcttacatcatgcacgatttgaatgtgaaccttcaaatcatgcactttagattgcagtctccagaccactccggttgcccatatcaagttctgaaaaaaaaggcaaagatagaaaatcaagatggtctcatgttagcttcagaatatggtatctttcaggagggatagcaaatatcagtaaaacaaaagaaagattggcaacagtttgatgtctttctcggagtatcccttttcccatcaattagtatttgataaaaactctgctaaaactagaatatatttagcttttgtatatatgccaatccgaactttttaatttgttctgaactttcatgtgccagtctgttgtagagtaaaaactttaccaaagcatttctccgagcataagtggtcacaagagcatagctctaaatgtgtccctcatcaaatctctcaagttgcagagaactaggcaatcacgttacctgctcttttactgcacaggccattcataataataatggggagaagatggatagtccatcaaacggtctctctattgtaggatatctgagacctgctttcatagaggaagagtcttacttgaggagcatgtttcatggtgacaatggtggttattcatctgactggaaagtaaatgaaaccgatgaatacaacagagaaactcggccagtttctggaaccaatcgcctcattgatgatgataaatcaagatttgacttcaatcatgctgaaactagaactgattcaatgatctacaagctggagataatgacaattgaactgttttccatgtatggaaagcagtttaagattgatccacaagattttcaagattcagaaccagatattcttgcaaattctgcttcatcgataatagaacggatcaaagaaaacagtgatcagtgtgccgcggctctcaggtcgctctgtcgccggaaaaagggcctcactgtcgaggaggcaagcttgattggtgttgacagccttggtattgatgtaagagccttttctggcttggaagttaagactgttcgattttcattcaatgcacaggcgctctctgaacgttcagctgaaaagaagatcaggcgaatgcttttcccccgttaccagcgtaaaaacgtgaaagcctctactgaagatgagtcttaacctatcagctgtttttcctgagaaagcatgcaaacacctggttcaaagacaaggtgtcaagggaatcaacacaatatcatcttatgcgagtttgctaggagatagcgcacaacctgtcgactatgagaatgaccaaaaacatcagagtaataaggtttgccatgcatggtctctaacatgcttccaagaatatagtttggtttctgacagataataaaaaaaaaacgaataaggtgccagttcatgtataaaagatgaactgcgactttatgctggcggaaactgattagctgaccaagctttgtcagctacaaattcccagtaataataacgagctgcgaggtgaaagggcagagtaataaggtctcgttggcctaaatcagttcttagtttcttacccacaacctgtaactaactttgttgtctcttttcatgtagacataaatgtcatgcaacgcaactgcgattatggcattgttttgttgaactatacataaaagaaaacttgataaagtttcgagtgcttttagctgtcagattctactgtgctcgattgcactactgtactcgtgtactgtaagaaaagactgaccagttattttccaggaaaattaaagaac

SEQ ID NO: 31103 - DNA, 3041 bp, Zea Mays
aatgttctaatcgtgatgaaagcttgccctgcgctgtgcgtgtaggatgcgcaaattaccaaaagggccctgggctactgagttggcggctgctctctcggtggtcccaaagggaagagggggaaccgggcagagagcagcgcaggacaagacaggcagagaagtcgctagccagactagtctgcgcggtgatccgtcttccctggggtgttccgccgtcctgcagcagaggcagggggttgccgctctcgccgccgcacgctgcggctctgctctgctccgcctgatccttcctgcggcccttgttttttcctctcgtttcaggtggccagccttggttttgcagaactcattcagtggcctctgctgaaaagtgttcaatggcgtcaggagccaccttaagctgggttaaaaccccatttgacacccgaagatttcatgacctatctaatctaagtttccgctgccgaaacccttttggatcaattcagccctggtggctgcaaactgatcaagactcatccctaatcaaggttcgcgtggctgctgattattcagactcaatgccagattcaaagtacacgagagatcggggttatcaccctcttgaagaagttaaagaacgtccaaagaagaaggacctgttgctgacagatattgaaacagctagaacagtagtagagacattttctttgaagtacctgacagtgagaacatcctggaagatgatactgcaaacaatcctgtgacagttttgattggaatggatggacccattattggagaaagtagtgtggcgattagtgatttcagtgattacatggatggtgaaaattttatggacgttcctgatgagcaccacaccaagattgatacagaaataactgatattctcatagagtgggggatgcctgcaacaatgcgtgcaatacatccgatttactttgccaaatgtttgacaaaggtaagcgataaataattatttgaagagtgcagacaccacaaaccagcagcacttggaatagtgaaaatggtcaagctgataaagatgctattaacgaaaggacagacccagtgggcagtggcccgttctggtggctcccacatgagtagggtctagacaaggaataatcaaggcaagctttactcctgcattttgcagagaggctgcattgaactaggacctttggctcagtgagaaggcttcgcaccactgcaccaggcttgcccttcaataaagatgctattaatgattcattgaattcagcttacatcatgcacgatttgaatgtgaaccttcaaatcatgcactttagattgcagtctccagaccactccggttgcccatatcaagttctgaaaaaaaaggcaaagatagaaaatcaagatggtctcatgttagcttcagaatatggtatctttcaggagggatagcaaatatcagtaaaacaaaagaaagattggcaacagtttgatgtctttctcggagtatcccttttcccatcaattagtatttgataaaaactctgctaaaactagaatatatttagcttttgtatatatgccaatccgaactttttaatttgttctgaactttcatgtgccagtctgttgtagagtaaaaactttaccaaagcatttctccgagcataagtggtcacaagagcatagctctaaatgtgtccctcatcaaatctctcaagttgcagagaactaggcaatcacgttacctgctcttttactgcacaggccattcataataataatggggagaagatggatagtccatcaaacggtctctctattgtaggatatctgagacctgctttcatagaggaagagtcttacttgaggagcatgtttcatggtgacaatggtggttattcatctgactggaaagtaaatgaaaccgatgaatacaacagagaaactcggccagtttctggaaccaatcgcctcattgatgatgataaatcaagatttgacttcaatcatgctgaaactagaactgattcaatgatctacaagctggagataatgacaattgaactgttttccatgtatggaaagcagtttaagattgatccacaagattttcaagattcagaaccagatattcttgcaaattctgcttcatcgataatagaacggatcaaagaaaacagtgatcagtgtgccgcggctctcaggtcgctctgtcgccggaaaaagggcctcactgtcgaggaggcaagcttgattggtgttgacagccttggtattgatgtaagagccttttctggcttggaagttaagactgttcgattttcattcaatgcacaggcgctctctgaacgttcagctgaaaagaagatcaggcgaatgcttttcccccgttaccagcgtaaaaacgtgaaagcctctactgaagatgagtcttaacctatcagctgtttttcctgagaaagcatgcaaacacctggttcaaagacaaggtgtcaagggaatcaacacaatatcatcttatgcgagtttgctaggagatagcgcacaacctgtcgactatgagaatgaccaaaaacatcagagtaataaggtttgccatgcatggtctctaacatgcttccaagaatatagtttggtttctgacagataataaaaaaaaaacgaataaggtgccagttcatgtataaaagatgaactgcgactttatgctggcggaaactgattagctgaccaagctttgtcagctacaaattcccagtaataataacgagctgcgaggtgaaagggcagagtaataaggtctcgttggcctaaatcagttcttagtttcttacccacaacctgtaactaactttgttgtctcttttcatgtagacataaatgtcatgcaacgcaactgcgattatggcattgttttgttgaactatacataaaagaaaacttgataaagtttcgagtgcttttagctgtcagattctactgtgctcgattgcactactgtactcgtgtactgtaagaaaagactgaccagttattttccaggaaaattaaagaac

SEQ ID NO: 31104 - DNA, 3203 bp, Zea Mays
aatgttctaatcgtgatgaaagcttgccctgcgctgtgcgtgtaggatgcgcaaattaccaaaagggccctgggctactgagttggcggctgctctctcggtggtcccaaagggaagagggggaaccgggcagagagcagcgcaggacaagacaggcagagaagtcgctagccagactagtctgcgcggtgatccgtcttccctggggtgttccgccgtcctgcagcagaggcagggggttgccgctctcgccgccgcacgctgcggctctgctctgctccgcctgatccttcctgcggcccttgttttttcctctcgtttcaggtggccagccttggttttgcagcatgtttaaattgtgtcaagactggagaaataccatccatgcagaatcatccatattataactcattcagtggcctctgctgaaaagtgttcaatggcgtcaggagccaccttaagctgggttaaaaccccatttgacacccgaagatttcatgacctatctaatctaagtttccgctgccgaaacccttttggatcaattcagccctggtggctgcaaactgatcaagactcatccctaatcaaggttcgcgtggctgctgattattcagactcaatgccagattcaaagtacacgagagatcggggttatcaccctcttgaagaagttaaagaacgtccaaagaagaaggacctgttgctgacagatattgaaacagctagaacagtagtagaggcaaatagcaaggggttgcttgtatttcctgctagggtacacaatgaacctcatggacatgtttcttggtcggagtttcaatatgttgttgatgaatatggagacattttctttgaagtacctgacagtgagaacatcctggaagatgatactgcaaacaatcctgtgacagttttgattggaatggatggacccattattggagaaagtagtgtggcgattagtgatttcagtgattacatggatggtgaaaattttatggacgttcctgatgagcaccacaccaagattgatacagaaataactgatattctcatagagtgggggatgcctgcaacaatgcgtgcaatacatccgatttactttgccaaatgtttgacaaaggtaagcgataaataattatttgaagagtgcagacaccacaaaccagcagcacttggaatagtgaaaatggtcaagctgataaagatgctattaacgaaaggacagacccagtgggcagtggcccgttctggtggctcccacatgagtagggtctagacaaggaataatcaaggcaagctttactcctgcattttgcagagaggctgcattgaactaggacctttggctcagtgagaaggcttcgcaccactgcaccaggcttgcccttcaataaagatgctattaatgattcattgaattcagcttacatcatgcacgatttgaatgtgaaccttcaaatcatgcactttagattgcagtctccagaccactccggttgcccatatcaagttctgaaaaaaaaggcaaagatagaaaatcaagatggtctcatgttagcttcagaatatggtatctttcaggagggatagcaaatatcagtaaaacaaaagaaagattggcaacagtttgatgtctttctcggagtatcccttttcccatcaattagtatttgataaaaactctgctaaaactagaatatatttagcttttgtatatatgccaatccgaactttttaatttgttctgaactttcatgtgccagtctgttgtagagtaaaaactttaccaaagcatttctccgagcataagtggtcacaagagcatagctctaaatgtgtccctcatcaaatctctcaagttgcagagaactaggcaatcacgttacctgctcttttactgcacaggccattcataataataatggggagaagatggatagtccatcaaacggtctctctattgtaggatatctgagacctgctttcatagaggaagagtcttacttgaggagcatgtttcatggtgacaatggtggttattcatctgactggaaagtaaatgaaaccgatgaatacaacagagaaactcggccagtttctggaaccaatcgcctcattgatgatgataaatcaagatttgacttcaatcatgctgaaactagaactgattcaatgatctacaagctggagataatgacaattgaactgttttccatgtatggaaagcagtttaagattgatccacaagattttcaagattcagaaccagatattcttgcaaattctgcttcatcgataatagaacggatcaaagaaaacagtgatcagtgtgccgcggctctcaggtcgctctgtcgccggaaaaagggcctcactgtcgaggaggcaagcttgattggtgttgacagccttggtattgatgtaagagccttttctggcttggaagttaagactgttcgattttcattcaatgcacaggcgctctctgaacgttcagctgaaaagaagatcaggcgaatgcttttcccccgttaccagcgtaaaaacgtgaaagcctctactgaagatgagtcttaacctatcagctgtttttcctgagaaagcatgcaaacacctggttcaaagacaaggtgtcaagggaatcaacacaatatcatcttatgcgagtttgctaggagatagcgcacaacctgtcgactatgagaatgaccaaaaacatcagagtaataaggtttgccatgcatggtctctaacatgcttccaagaatatagtttggtttctgacagataataaaaaaaaaacgaataaggtgccagttcatgtataaaagatgaactgcgactttatgctggcggaaactgattagctgaccaagctttgtcagctacaaattcccagtaataataacgagctgcgaggtgaaagggcagagtaataaggtctcgttggcctaaatcagttcttagtttcttacccacaacctgtaactaactttgttgtctcttttcatgtagacataaatgtcatgcaacgcaactgcgattatggcattgttttgttgaactatacataaaagaaaacttgataaagtttcgagtgcttttagctgtcagattctactgtgctcgattgcactactgtactcgtgtactgtaagaaaagactgaccagttattttccaggaaaattaaagaac

SEQ ID NO: 31105 - DNA, 3101 bp, Zea Mays
aatgttctaatcgtgatgaaagcttgccctgcgctgtgcgtgtaggatgcgcaaattaccaaaagggccctgggctactgagttggcggctgctctctcggtggtcccaaagggaagagggggaaccgggcagagagcagcgcaggacaagacaggcagagaagtcgctagccagactagtctgcgcggtgatccgtcttccctggggtgttccgccgtcctgcagcagaggcagggggttgccgctctcgccgccgcacgctgcggctctgctctgctccgcctgatccttcctgcggcccttgttttttcctctcgtttcaggtggccagccttggttttgcagaactcattcagtggcctctgctgaaaagtgttcaatggcgtcaggagccaccttaagctgggttaaaaccccatttgacacccgaagatttcatgacctatctaatctaagtttccgctgccgaaacccttttggatcaattcagccctggtggctgcaaactgatcaagactcatccctaatcaaggttcgcgtggctgctgattattcagactcaatgccagattcaaagtacacgagagatcggggttatcaccctcttgaagaagttaaagaacgtccaaagaagaaggacctgttgctgacagatattgaaacagctagaacagtagtagaggcaaatagcaaggggttgcttgtatttcctgctagggtacacaatgaacctcatggacatgtttcttggtcggagtttcaatatgttgttgatgaatatggagacattttctttgaagtacctgacagtgagaacatcctggaagatgatactgcaaacaatcctgtgacagttttgattggaatggatggacccattattggagaaagtagtgtggcgattagtgatttcagtgattacatggatggtgaaaattttatggacgttcctgatgagcaccacaccaagattgatacagaaataactgatattctcatagagtgggggatgcctgcaacaatgcgtgcaatacatccgatttactttgccaaatgtttgacaaaggtaagcgataaataattatttgaagagtgcagacaccacaaaccagcagcacttggaatagtgaaaatggtcaagctgataaagatgctattaacgaaaggacagacccagtgggcagtggcccgttctggtggctcccacatgagtagggtctagacaaggaataatcaaggcaagctttactcctgcattttgcagagaggctgcattgaactaggacctttggctcagtgagaaggcttcgcaccactgcaccaggcttgcccttcaataaagatgctattaatgattcattgaattcagcttacatcatgcacgatttgaatgtgaaccttcaaatcatgcactttagattgcagtctccagaccactccggttgcccatatcaagttctgaaaaaaaaggcaaagatagaaaatcaagatggtctcatgttagcttcagaatatggtatctttcaggagggatagcaaatatcagtaaaacaaaagaaagattggcaacagtttgatgtctttctcggagtatcccttttcccatcaattagtatttgataaaaactctgctaaaactagaatatatttagcttttgtatatatgccaatccgaactttttaatttgttctgaactttcatgtgccagtctgttgtagagtaaaaactttaccaaagcatttctccgagcataagtggtcacaagagcatagctctaaatgtgtccctcatcaaatctctcaagttgcagagaactaggcaatcacgttacctgctcttttactgcacaggccattcataataataatggggagaagatggatagtccatcaaacggtctctctattgtaggatatctgagacctgctttcatagaggaagagtcttacttgaggagcatgtttcatggtgacaatggtggttattcatctgactggaaagtaaatgaaaccgatgaatacaacagagaaactcggccagtttctggaaccaatcgcctcattgaactgattcaatgatctacaagctggagataatgacaattgaactgttttccatgtatggaaagcagtttaagattgatccacaagattttcaagattcagaaccagatattcttgcaaattctgcttcatcgataatagaacggatcaaagaaaacagtgatcagtgtgccgcggctctcaggtcgctctgtcgccggaaaaagggcctcactgtcgaggaggcaagcttgattggtgttgacagccttggtattgatgtaagagccttttctggcttggaagttaagactgttcgattttcattcaatgcacaggcgctctctgaacgttcagctgaaaagaagatcaggcgaatgcttttcccccgttaccagcgtaaaaacgtgaaagcctctactgaagatgagtcttaacctatcagctgtttttcctgagaaagcatgcaaacacctggttcaaagacaaggtgtcaagggaatcaacacaatatcatcttatgcgagtttgctaggagatagcgcacaacctgtcgactatgagaatgaccaaaaacatcagagtaataaggtttgccatgcatggtctctaacatgcttccaagaatatagtttggtttctgacagataataaaaaaaaaacgaataaggtgccagttcatgtataaaagatgaactgcgactttatgctggcggaaactgattagctgaccaagctttgtcagctacaaattcccagtaataataacgagctgcgaggtgaaagggcagagtaataaggtctcgttggcctaaatcagttcttagtttcttacccacaacctgtaactaactttgttgtctcttttcatgtagacataaatgtcatgcaacgcaactgcgattatggcattgttttgttgaactatacataaaagaaaacttgataaagtttcgagtgcttttagctgtcagattctactgtgctcgattgcactactgtactcgtgtactgtaagaaaagactgaccagttattttccaggaaaattaaagaac

SEQ ID NO: 31106 - DNA, 3179 bp, Zea Mays
aatgttctaatcgtgatgaaagcttgccctgcgctgtgcgtgtaggatgcgcaaattaccaaaagggccctgggctactgagttggcggctgctctctcggtggtcccaaagggaagagggggaaccgggcagagagcagcgcaggacaagacaggcagagaagtcgctagccagactagtctgcgcggtgatccgtcttccctggggtgttccgccgtcctgcagcagaggcagggggttgccgctctcgccgccgcacgctgcggctctgctctgctccgcctgatccttcctgcggcccttgttttttcctctcgtttcaggtggccagccttggttttgcagaactcattcagtggcctctgctgaaaagtgttcaatggcgtcaggagccaccttaagctgggttaaaaccccatttgacacccgaagatttcatgacctatctaatctaagtttccgctgccgaaacccttttggatcaattcagccctggtggctgcaaactgatcaagactcatccctaatcaaggttcgcgtggctgctgattattcagactcaatgccagattcaaagtacacgagagatcggggttatcaccctcttgaagaagttaaagaacgtccaaagaagaaggacctgttgctgacagatattgaaacagctagaacagtagtagaggcaaatagcaaggggttgcttgtatttcctgctagggtacacaatgaacctcatggacatgtttcttggtcggagtttcaatatgttgttgatgaatatggagacattttctttgaagtacctgacagtgagaacatcctggaagatgatactgcaaacaatcctgtgacagttttgattggaatggatggacccattattggagaaagtagtgtggcgattagtgatttcagtgattacatggatggtgaaaattttatggacgttcctgatgagcaccacaccaaggtttgctaacaagttattttccctgctttcatcagattgatacagaaataactgatattctcatagagtgggggatgcctgcaacaatgcgtgcaatacatccgatttactttgccaaatgtttgacaaaggtaagcgataaataattatttgaagagtgcagacaccacaaaccagcagcacttggaatagtgaaaatggtcaagctgataaagatgctattaacgaaaggacagacccagtgggcagtggcccgttctggtggctcccacatgagtagggtctagacaaggaataatcaaggcaagctttactcctgcattttgcagagaggctgcattgaactaggacctttggctcagtgagaaggcttcgcaccactgcaccaggcttgcccttcaataaagatgctattaatgattcattgaattcagcttacatcatgcacgatttgaatgtgaaccttcaaatcatgcactttagattgcagtctccagaccactccggttgcccatatcaagttctgaaaaaaaaggcaaagatagaaaatcaagatggtctcatgttagcttcagaatatggtatctttcaggagggatagcaaatatcagtaaaacaaaagaaagattggcaacagtttgatgtctttctcggagtatcccttttcccatcaattagtatttgataaaaactctgctaaaactagaatatatttagcttttgtatatatgccaatccgaactttttaatttgttctgaactttcatgtgccagtctgttgtagagtaaaaactttaccaaagcatttctccgagcataagtggtcacaagagcatagctctaaatgtgtccctcatcaaatctctcaagttgcagagaactaggcaatcacgttacctgctcttttactgcacaggccattcataataataatggggagaagatggatagtccatcaaacggtctctctattgtaggatatctgagacctgctttcatagaggaagagtcttacttgaggagcatgtttcatggtgacaatggtggttattcatctgactggaaagtaaatgaaaccgatgaatacaacagagaaactcggccagtttctggaaccaatcgcctcattgatgatgataaatcaagatttgacttcaatcatgctgaaactagaactgattcaatgatctacaagctggagataatgacaattgaactgttttccatgtatggaaagcagtttaagattgatccacaagattttcaagattcagaaccagatattcttgcaaattctgcttcatcgataatagaacggatcaaagaaaacagtgatcagtgtgccgcggctctcaggtcgctctgtcgccggaaaaagggcctcactgtcgaggaggcaagcttgattggtgttgacagccttggtattgatgtaagagccttttctggcttggaagttaagactgttcgattttcattcaatgcacaggcgctctctgaacgttcagctgaaaagaagatcaggcgaatgcttttcccccgttaccagcgtaaaaacgtgaaagcctctactgaagatgagtcttaacctatcagctgtttttcctgagaaagcatgcaaacacctggttcaaagacaaggtgtcaagggaatcaacacaatatcatcttatgcgagtttgctaggagatagcgcacaacctgtcgactatgagaatgaccaaaaacatcagagtaataaggtttgccatgcatggtctctaacatgcttccaagaatatagtttggtttctgacagataataaaaaaaaaacgaataaggtgccagttcatgtataaaagatgaactgcgactttatgctggcggaaactgattagctgaccaagctttgtcagctacaaattcccagtaataataacgagctgcgaggtgaaagggcagagtaataaggtctcgttggcctaaatcagttcttagtttcttacccacaacctgtaactaactttgttgtctcttttcatgtagacataaatgtcatgcaacgcaactgcgattatggcattgttttgttgaactatacataaaagaaaacttgataaagtttcgagtgcttttagctgtcagattctactgtgctcgattgcactactgtactcgtgtactgtaagaaaagactgaccagttattttccaggaaaattaaagaac

SEQ ID NO: 31107 - DNA, 3034 bp, Zea Mays
aatgttctaatcgtgatgaaagcttgccctgcgctgtgcgtgtaggatgcgcaaattaccaaaagggccctgggctactgagttggcggctgctctctcggtggtcccaaagggaagagggggaaccgggcagagagcagcgcaggacaagacaggcagagaagtcgctagccagactagtctgcgcggtgatccgtcttccctggggtgttccgccgtcctgcagcagaggcagggggttgccgctctcgccgccgcacgctgcggctctgctctgctccgcctgatccttcctgcggcccttgttttttcctctcgtttcaggtggccagccttggttttgcagaactcattcagtggcctctgctgaaaagtgttcaatggcgtcaggagccaccttaagctgggttaaaaccccatttgacacccgaagatttcatgacctatctaatctaagtttccgctgccgaaacccttttggatcaattcagccctggtggctgcaaactgatcaagactcatccctaatcaaggttcgcgtggctgctgattattcagactcaatgccagattcaaagtacacgagagatcggggttatcaccctcttgaagaagttaaagaacgtccaaagaagaaggacctgttgctgacagatattgaaacagctagaacagtagtagaggcaaatagcaaggggttgcttgtatttcctgctagggtacacaatgaacctcatggacatgtttcttggtcggagtttcaatatgttgttgatgaatatggagacattttctttgaagtacctgacagtgagaacatcctggaagatgatactgcaaacaatcctgtgacagttttgattggaatggatggacccattattggagaaagtagtgtggcgattagtgatttcagtgattacatggatggtgaaaattttatggacgttcctgatgagcaccacaccaagattgatacagaaataactgatattctcatagagtgggggatgcctgcaacaatgcgtgcaatacatccgatttactttgccaaatgtttgacaaaggtaagcgataaataattatttgaagagtgcagacaccacaaaccagcagcacttggaatagtgaaaatggtcaagctgataaagatgctattaacgaaaggacagacccagtgggcagtggcccgttctggtggctcccacatgagtagggtctagacaaggaataatcaaggcaagctttactcctgcattttgcagagaggctgcattgaactaggacctttggctcagtgagaaggcttcgcaccactgcaccaggcttgcccttcaataaagatgctattaatgattcattgaattcagcttacatcatgcacgatttgaatgtgaaccttcaaatcatgcactttagattgcagtctccagaccactccggttgcccatatcaagttctgaaaaaaaaggcaaagatagaaaatcaagatggtctcatgttagcttcagaatatggtatctttcaggagggatagcaaatatcagtaaaacaaaagaaagattggcaacagtttgatgtctttctcggagtatcccttttcccatcaattagtatttgataaaaactctgctaaaactagaatatatttagcttttgtatatatgccaatccgaactttttaatttgttctgaactttcatgtgccagtctgttgtagagtaaaaactttaccaaagcatttctccgagcataagtggtcacaagagcatagctctaaatgtgtccctcatcaaatctctcaagttgcagagaactaggcaatcacgttacctgctcttttactgcacaggccattcataataataatggggagaagatggatagtccatcaaacggtctctctattgtaggatatctgagacctgctttcatagaggaagagtcttacttgaggagcatgtttcatggtgacaatggtggttattcatctgactggaaagtaaatgaaaccgatgaatacaacagagaaactcggccagtttctggaaccaatcgcctcattgtttaagattgatccacaagattttcaagattcagaaccagatattcttgcaaattctgcttcatcgataatagaacggatcaaagaaaacagtgatcagtgtgccgcggctctcaggtcgctctgtcgccggaaaaagggcctcactgtcgaggaggcaagcttgattggtgttgacagccttggtattgatgtaagagccttttctggcttggaagttaagactgttcgattttcattcaatgcacaggcgctctctgaacgttcagctgaaaagaagatcaggcgaatgcttttcccccgttaccagcgtaaaaacgtgaaagcctctactgaagatgagtcttaacctatcagctgtttttcctgagaaagcatgcaaacacctggttcaaagacaaggtgtcaagggaatcaacacaatatcatcttatgcgagtttgctaggagatagcgcacaacctgtcgactatgagaatgaccaaaaacatcagagtaataaggtttgccatgcatggtctctaacatgcttccaagaatatagtttggtttctgacagataataaaaaaaaaacgaataaggtgccagttcatgtataaaagatgaactgcgactttatgctggcggaaactgattagctgaccaagctttgtcagctacaaattcccagtaataataacgagctgcgaggtgaaagggcagagtaataaggtctcgttggcctaaatcagttcttagtttcttacccacaacctgtaactaactttgttgtctcttttcatgtagacataaatgtcatgcaacgcaactgcgattatggcattgttttgttgaactatacataaaagaaaacttgataaagtttcgagtgcttttagctgtcagattctactgtgctcgattgcactactgtactcgtgtactgtaagaaaagactgaccagttattttccaggaaaattaaagaac

SEQ ID NO: 31108 - DNA, 2970 bp, Zea Mays
aatgttctaatcgtgatgaaagcttgccctgcgctgtgcgtgtaggatgcgcaaattaccaaaagggccctgggctactgagttggcggctgctctctcggtggtcccaaagggaagagggggaaccgggcagagagcagcgcaggacaagacaggcagagaagtcgctagccagactagtctgcgcggtgatccgtcttccctggggtgttccgccgtcctgcagcagaggcagggggttgccgctctcgccgccgcacgctgcggctctgctctgctccgcctgatccttcctgcggcccttgttttttcctctcgtttcaggtggccagccttggttttgcagaactcattcagtggcctctgctgaaaagtgttcaatggcgtcaggagccaccttaagctgggttaaaaccccatttgacacccgaagatttcatgacctatctaatctaagtttccgctgccgaaacccttttggatcaattcagccctggtggctgcaaactgatcaagactcatccctaatcaaggttcgcgtggctgctgattattcagactcaatgccagattcaaagtacacgagagatcggggttatcaccctcttgaagaagttaaagaacgtccaaagaagaaggacctgttgctgacagatattgaaacagctagaacagtagtagaggcaaatagcaaggggttgcttgtatttcctgctagggtacacaatgaacctcatggacatgtttcttggtcggagtttcaatatgttgttgatgaatatggagacattttctttgaagtacctgacagtgagaacatcctggaagatgatactgcaaacaatcctgtgacagttttgattggaatggatggacccattattggagaaagtagtgtggcgattagtgatttcagtgattacatggatggtgaaaattttatggacgttcctgatgagcaccacaccaagattgatacagaaataactgatattctcatagagtgggggatgcctgcaacaatgcgtgcaatacatccgatttactttgccaaatgtttgacaaaggccattcataataataatggggagaagatggatagtccatcaaacggtctctctattgtaggatatctgagacctgctttcatagaggaagagtcttacttgaggagcatgtttcatggtgacaatggtggttattcatctgactggaaagtaaatgaaaccgatgaatacaacagagaaactcggccagtttctggaaccaatcgcctcattggtaatttagttggttgaaatcttgcacgtcagctatccactttactccaatttttattttactagtactaagcaaatattcagatgatgataaatcaagatttgacttcaatcatgctgaaactagaactgattcaatgatctacaagctggagataatgacaattgaactgttttccatgtatggaaagcagtttaagattgatccacaagattttcaagattcagaaccagatattcttgcaaattctgcttcatcgataatagaacggatcaaagaaaacagtgatcagtgtgccgcggctctcaggtcgctctgtcgccggaaaaagggcctcactgtcgaggtgtgtttgttaccactgatgagttattttcatggtcgcaatatgcaagttatcatttctttgcatggaatgctcttattttaaccatgtatccaaattcagtatttcattgcgacaagggtttagcccatttttcaaccgccaacttttgtggtagtttgaagttcagccttgaactatgaaatcgagtaccatacgctctccaactttcaaaactagacaaatttggccatcttcctggttccgaaggtggttttctttatttctaaaaataataaaaatctgctttaatctctataaattcacaggtaattgatttcaaatcagaaaaatatgaagtagtatcattttttctgaaaaagttatctttgaggttgaaaatgtactttaccctaattaagcatgacgctctcactgttgcattgccaataggaccctaattaagcatgacattgtcactgttgcattgccagtagaacaagcactccttcagcataagctttgtttgcaaactgatatgttccgcaggaggcaagcttgattggtgttgacagccttggtattgatgtaagagccttttctggcttggaagttaagactgttcgattttcattcaatgcacaggcgctctctgaacgttcagctgaaaagaagatcaggcgaatgcttttcccccgttaccagcgtaaaaacgtgaaagcctctactgaagatgagtcttaacctatcagctgtttttcctgagaaagcatgcaaacacctggttcaaagacaaggtgtcaagggaatcaacacaatatcatcttatgcgagtttgctaggagatagcgcacaacctgtcgactatgagaatgaccaaaaacatcagagtaataaggtttgccatgcatggtctctaacatgcttccaagaatatagtttggtttctgacagataataaaaaaaaaacgaataaggtgccagttcatgtataaaagatgaactgcgactttatgctggcggaaactgattagctgaccaagctttgtcagctacaaattcccagtaataataacgagctgcgaggtgaaagggcagagtaataaggtctcgttggcctaaatcagttcttagtttcttacccacaacctgtaactaactttgttgtctcttttcatgtagacataaatgtcatgcaacgcaactgcgattatggcattgttttgttgaactatacataaaagaaaacttgataaagtttcgagtgcttttagctgtcagattctactgtgctcgattgcactactgtactcgtgtactgtaagaaaagactgaccagttattttccaggaaaattaaagaac

SEQ ID NO: 31109 - DNA, 3482 bp, Zea Mays
aatgttctaatcgtgatgaaagcttgccctgcgctgtgcgtgtaggatgcgcaaattaccaaaagggccctgggctactgagttggcggctgctctctcggtggtcccaaagggaagagggggaaccgggcagagagcagcgcaggacaagacaggcagagaagtcgctagccagactagtctgcgcggtgatccgtcttccctggggtgttccgccgtcctgcagcagaggcagggggttgccgctctcgccgccgcacgctgcggctctgctctgctccgcctgatccttcctgcggcccttgttttttcctctcgtttcaggtggccagccttggttttgcagaactcattcagtggcctctgctgaaaagtgttcaatggcgtcaggagccaccttaagctgggttaaaaccccatttgacacccgaagatttcatgacctatctaatctaagtttccgctgccgaaacccttttggatcaattcagccctggtggctgcaaactgatcaagactcatccctaatcaaggttcgcgtggctgctgattattcagactcaatgccagattcaaagtacacgagagatcggggttatcaccctcttgaagaagttaaagaacgtccaaagaagaaggacctgttgctgacagatattgaaacagctagaacagtagtagaggtatggtaacctggtgcaactaaatagtgtgtttcttatgcacctagctatttaatgtttcataggtatggttatggcctgtagtatagagttcttcaaactaatccaaatatttgttgtaaaaacctgcacaaattcctccaggcgcgtaacaaacaaaatgatggtttatacctttataagacatgccagtgagtatctgagcctaggtaacgtttgcaatcttccttctctaggcaaatagcaaggggttgcttgtatttcctgctagggtacacaatgaacctcatggacatgtttcttggtcggagtttcaatatgttgttgatgaatatggagacattttctttgaagtacctgacagtgagaacatcctggaagatgatactgcaaacaatcctgtgttttgattggaatggatggacccattattggagaaagtagtgtggcgattagtgatttcagtgattacatggatggtgaaaattttatggacgttcctgatgagcaccacaccaaggtttgctaacaagttattttccctgctttcatcaggtactatgggtcattcttcttagtagcaagtagcgctatcattattgatgtttcctttgtgaaatgtccagattgatacagaaataactgatattctcatagagtgggggatgcctgcaacaatgcgtgcaatacatccgatttactttgccaaatgtttgacaaaggtaagcgataaataattatttgaagagtgcagacaccacaaaccagcagcacttggaatagtgaaaatggtcaagctgataaagatgctattaacgaaaggacagacccagtgggcagtggcccgttctggtggctcccacatgagtagggtctagacaaggaataatcaaggcaagctttactcctgcattttgcagagaggctgcattgaactaggacctttggctcagtgagaaggcttcgcaccactgcaccaggcttgcccttcaataaagatgctattaatgattcattgaattcagcttacatcatgcacgatttgaatgtgaaccttcaaatcatgcactttagattgcagtctccagaccactccggttgcccatatcaagttctgaaaaaaaaggcaaagatagaaaatcaagatggtctcatgttagcttcagaatatggtatctttcaggagggatagcaaatatcagtaaaacaaaagaaagattggcaacagtttgatgtctttctcggagtatcccttttcccatcaattagtatttgataaaaactctgctaaaactagaatatatttagcttttgtatatatgccaatccgaactttttaatttgttctgaactttcatgtgccagtctgttgtagagtaaaaactttaccaaagcatttctccgagcataagtggtcacaagagcatagctctaaatgtgtccctcatcaaatctctcaagttgcagagaactaggcaatcacgttacctgctcttttactgcacaggccattcataataataatggggagaagatggatagtccatcaaacggtctctctattgtaggatatctgagacctgctttcatagaggaagagtcttacttgaggagcatgtttcatggtgacaatggtggttattcatctgactggaaagtaaatgaaaccgatgaatacaacagagaaactcggccagtttctggaaccaatcgcctcattgatgatgataaatcaagatttgacttcaatcatgctgaaactagaactgattcaatgatctacaagctggagataatgacaattgaactgttttccatgtatggaaagcagtttaagattgatccacaagattttcaagattcagaaccagatattcttgcaaattctgcttcatcgataatagaacggatcaaagaaaacagtgatcagtgtgccgcggctctcaggtcgctctgtcgccggaaaaagggcctcactgtcgaggaggcaagcttgattggtgttgacagccttggtattgatgtaagagccttttctggcttggaagttaagactgttcgattttcattcaatgcacaggcgctctctgaacgttcagctgaaaagaagatcaggcgaatgcttttcccccgttaccagcgtaaaaacgtgaaagcctctactgaagatgagtcttaacctatcagctgtttttcctgagaaagcatgcaaacacctggttcaaagacaaggtgtcaagggaatcaacacaatatcatcttatgcgagtttgctaggagatagcgcacaacctgtcgactatgagaatgaccaaaaacatcagagtaataaggtttgccatgcatggtctctaacatgcttccaagaatatagtttggtttctgacagataataaaaaaaaaacgaataaggtgccagttcatgtataaaagatgaactgcgactttatgctggcggaaactgattagctgaccaagctttgtcagctacaaattcccagtaataataacgagctgcgaggtgaaagggcagagtaataaggtctcgttggcctaaatcagttcttagtttcttacccacaacctgtaactaactttgttgtctcttttcatgtagacataaatgtcatgcaacgcaactgcgattatggcattgttttgttgaactatacataaaagaaaacttgataaagtttcgagtgcttttagctgtcagattctactgtgctcgattgcactactgtactcgtgtactgtaagaaaagactgaccagttattttccaggaaaattaaagaac

SEQ ID NO: 31110 - DNA, 2595 bp, Zea Mays
aatgttctaatcgtgatgaaagcttgccctgcgctgtgcgtgtaggatgcgcaaattaccaaaagggccctgggctactgagttggcggctgctctctcggtggtcccaaagggaagagggggaaccgggcagagagcagcgcaggacaagacaggcagagaagtcgctagccagactagtctgcgcggtgatccgtcttccctggggtgttccgccgtcctgcagcagaggcagggggttgccgctctcgccgccgcacgctgcggctctgctctgctccgcctgatccttcctgcggcccttgttttttcctctcgtttcaggtggccagccttggttttgcagaactcattcagtggcctctgctgaaaagtgttcaatggcgtcaggagccaccttaagctgggttaaaaccccatttgacacccgaagatttcatgacctatctaatctaagtttccgctgccgaaacccttttggatcaattcagccctggtggctgcaaactgatcaagactcatccctaatcaaggttcgcgtggctgctgattattcagactcaatgccagattcaaagtacacgagagatcggggttatcaccctcttgaagaagttaaagaacgtccaaagaagaaggacctgttgctgacagatattgaaacagctagaacagtagtagaggtatggtaacctggtgcaactaaatagtgtgtttcttatgcacctagctatttaatgtttcataggtatggttatggcctgtagtatagagttcttcaaactaatccaaatatttgttgtaaaaacctgcacaaattcctccaggcgcgtaacaaacaaaatgatggtttatacctttataagacatgccagtgagtatctgagcctaggtaacgtttgcaatcttccttctctaggcaaatagcaaggggttgcttgtatttcctgctagggtacacaatgaacctcatggacatgtttcttggtcggagtttcaatatgttgttgatgaatatggagacattttctttgaagtacctgacagtgagaacatcctggaagatgatactgcaaacaatcctgtgacagttttgattggaatggatggacccattattggagaaagtagtgtggcgattagtgatttcagtgattacatggatggtgaaaattttatggacgttcctgatgagcaccacaccaagattgatacagaaataactgatattctcatagagtgggggatgcctgcaacaatgcgtgcaatacatccgatttactttgccaaatgtttgacaaaggccattcataataataatggggagaagatggatagtccatcaaacggtctctctattgtaggatatctgagacctgctttcatagaggaagagtcttacttgaggagcatgtttcatggtgacaatggtggttattcatctgactggaaagtaaatgaaaccgatgaatacaacagagaaactcggccagtttctggaaccaatcgcctcattgatgatgataaatcaagatttgacttcaatcatgctgaaactagaactgattcaatgatctacaagctggagataatgacaattgaactgttttccatgtatggaaagcagtttaagattgatccacaagattttcaagattcagaaccagatattcttgcaaattctgcttcatcgataatagaacggatcaaagaaaacagtgatcagtgtgccgcggctctcaggtcgctctgtcgccggaaaaagggcctcactgtcgaggaggcaagcttgattggtgttgacagccttggtattgatgtaagagccttttctggcttggaagttaagactgttcgattttcattcaatgcacaggcgctctctgaacgttcagctgaaaagaagatcaggcgaatgcttttcccccgttaccagcgtaaaaacgtgaaagcctctactgaagatgagtcttaacctatcagctgtttttcctgagaaagcatgcaaacacctggttcaaagacaaggtgtcaagggaatcaacacaatatcatcttatgcgagtttgctaggagatagcgcacaacctgtcgactatgagaatgaccaaaaacatcagagtaataaggtttgccatgcatggtctctaacatgcttccaagaatatagtttggtttctgacagataataaaaaaaaaacgaataaggtgccagttcatgtataaaagatgaactgcgactttatgctggcggaaactgattagctgaccaagctttgtcagctacaaattcccagtaataataacgagctgcgaggtgaaagggcagagtaataaggtctcgttggcctaaatcagttcttagtttcttacccacaacctgtaactaactttgttgtctcttttcatgtagacataaatgtcatgcaacgcaactgcgattatggcattgttttgttgaactatacataaaagaaaacttgataaagtttcgagtgcttttagctgtcagattctactgtgctcgattgcactactgtactcgtgtactgtaagaaaagactgaccagttattttccaggaaaattaaagaac

SEQ ID NO: 31111 - DNA, 2800 bp, Zea Mays
cacccggagtcggagcggagcatccgatcctccaccagtccaccaccgagtgcactcagccacacaccagctgttgtgccctgtgcggcgctctactgagcgatacgcggacttggcggcggccatgccactctcggagccgtcggcgccggccgtgctcgcggcgctgccgcgggcgctctccctcgcggccgcggccgtcgcggccgcaaccgcgaccctcctcctcatctccgccgtcttctccaccccccaccacgcggcgtcctcctcgtcccctcagctttccccgtccgccagcgcctccaccgcggcgcctgtggccccggcgcccgcacacgcgcccgactccggcccaggccacccccaccccccgcctcccgttcccccgtgccctcccaacgccacccacgacgtcccctgccacgagcctccctcgcgcgagcgccactgccccccgcgcccgccgccgccgccgcctcttcttcctcacccgccaaaggacccgccgccgcaccctccgccgcactgccgcgtcccgccgccgcccaggtaccgcccgcccccgccgtggcccgcgcgccgcgaccgcgcgaggtacgccaacgtggacctcccgccgctgcccccggttaaggcggcggatggacagcagcaggaccccgttcacggtcgcggggagtggctgctgttcaccgacggggtgcagggttatgtcgagcggctggagcgcgtcgtgccgctccgcgacggcgtggtgcacacggcgctcgacatcggatgcggggtcgcgagctttggggactatctgctcaactatggcgtactgaccatgtccattgctccgagggatagatttgaaccgcaggtgcagctcgccttggagcgtggactgcctgcaatgatcggagcgcttgttgcccacaggctaccgtatccatcgaggtccttcgacatggtgcactgtgcggactgccgtgtcccatggactgctcatgctgattccagatgggctctacatgctggaaatcgaccgtcttctccaacctggtggctattgggttttctctaagccacccgtcaactggaaatctacatacaacatttcgaatcaagggaccatagacaagcaggacaatcaagtagctatggatgacatgtcgaaaaggcttcgttggacgaaggtgtctgaagagggcacaatttctgtttggagaaagccttcttgtaatctccattgcgaccaagaagcaaatgcaaagcttgctggattgccaccactctgcacaggagaagacccagatagtgcctggtatgcaaatatttcaatgtgtatgacatgtattccaagagctgaaacttttaatggctgtgctggtggtgccatgaaaaaatggcctaaaagacttggtgcagtgccaccaaggatagccagtggggaaatcgagtggctgtccattcagagatatagatacgacactctggtttgggagaaaagggttaacttctatctcacgtatctaaattttttgtctaatggaacctacagaaatgtcatggacatgagtgccggttctggtggctttgccgctgctatgtccaagcatcctgtctgggtcatgaatgtggttcctgcaaatacgacagagaacgcccttggtgtcatctatgagcgtggtttgattggaacatacactgactggtgcgaggccttctctacttatccacgaacatacgatctgatacatggtaatggaatcttcagctcccatattcacaagtgtgggattatcgacatcctggttgagatggatcgtattctccggccagggggtgccgtcatagttcgggacagagccgacgtcgttctcagagtcaagaaggacgccgaccgtctacgatggcatagccgagttgtcgacactgaaaatgggcctctggatccagagaagctcctcattgtggacaattccctgccactcccagggagctgaatagaagtgagagcactagcaagaacccgcaggatcagatcaggcttctaggtgacggtctgctcatgtttcgggaaagagccggtggtctggtctgcgaccttactacctgttacagtatgtcttttcggtttaagaagatctcactacatgtgcagcagaggtacagatgaagggtctacaggcgactgggatgtttattacatgtacagacaggtgttggagaaacaaaatgctacgtattacctttacagaggaagggttcaaggctattggctatcgtacagcgagagattcagaattgcatgcaggtgtacctacatatatgaccagtggtccaatatattggagtcagtgacgactccagtggatgccatttcttagctccaatatgatatgcagcctgatttctcatgctcgaacgactagctgtgcagttagaactatccggtctcgattctgtagagtatgtctacgttgagtgtacctttttttttggtaaatccattcatgtacatttgtataggttgttgtattgtagatcttgtgagctgtgttgtttggtcgctaagcaatctacggcgtattatactgcggcatagagtgtacaggggaggccagattacacctgtgtctgtgtgtgtctctgtccttccaactttcccggttcaggctgcggtgccgagagtgggattgtgttatttggggtgttgtacaagccaagtgaatgtgcagatcgagtatggacatgatttctttcttatacagtggccgttgtcataattttcacaatggcaggtcattat

SEQ ID NO: 31112 - DNA, 2585 bp, Zea Mays
ctgagcgatacgcggacttggcggcggccatgccactctcggagccgtcggcgccggccgtgctcgcggcgctgccgcgggcgctctccctcgcggccgcggccgtcgcggccgcaaccgcgaccctcctcctcatctccgccgtcttctccaccccccaccacgcggcgtcctcctcgtcccctcagctttccccgtccgccagcgcctccaccgcggcgcctgtggccccggcgcccgcacacgcgcccgactccggcccaggccacccccaccccccgcctcccgttcccccgtgccctcccaacgccacccacgacgtcccctgccacgagcctccctcgcgcgagcgccactgccccccgcgcccgccgccgccgccgcctcttcttcctcacccgccaaaggacccgccgccgcaccctccgccgcactgccgcgtcccgccgccgcccaggtaccgcccgcccccgccgtggcccgcgcgccgcgaccgcgcgaggtacgccaacgtggacctcccgccgctgcccccggttaaggcggcggatggacagcagcaggaccccgttcacggtcgcggggagtggctgctgttcaccgacggggtgcagggttatgtcgagcggctggagcgcgtcgtgccgctccgcgacggcgtggtgcacacggcgctcgacatcggatgcggggtcgcgagctttggggactatctgctcaactatggcgtactgaccatgtccattgctccgagggatagatttgaaccgcaggtgcagctcgccttggagcgtggactgcctgcaatgatcggagcgcttgttgcccacaggctaccgtatccatcgaggtccttcgacatggtgcactgtgcggactgccgtgtcccatggactgctcatgatgggctctacatgctggaaatcgaccgtcttctccaacctggtggctattgggttttctctaagccacccgtcaactggaaatctacatacaacatttcgaatcaagggaccatagacaagcaggacaatcaagtagctatggatgacatgtcgaaaaggcttcgttggacgaaggtgtctgaagagggcacaatttctgtttggagaaagccttcttgtaatctccattgcgaccaagaagcaaatgcaaagcttgctggattgccaccactctgcacaggagaagacccagatagtgcctggtatgcaaatatttcaatgtgtatgacatgtattccaagagctgaaacttttaatggctgtgctggtggtgccatgaaaaaatggcctaaaagacttggtgcagtgccaccaaggatagccagtggggaaatcgagtggctgtccattcagagatatagatacgacactctggtttgggagaaaagggttaacttctatctcacgtatctaaattttttgtctaatggaacctacagaaatgtcatggacatgagtgccggttctggtggctttgccgctgctatgtccaagcatcctgtctgggtcatgaatgtggttcctgcaaatacgacagagaacgcccttggtgtcatctatgagcgtggtttgattggaacatacactgactggtgcgaggccttctctacttatccacgaacatacgatctgatacatggtaatggaatcttcagctcccatattcacaagtgtgggattatcgacatcctggttgagatggatcgtattctccggccagggggtgccgtcatagttcgggacagagccgacgtcgttctcagagtcaagaaggacgccgaccgtctacgatggcatagccgagttgtcgacactgaaaatgggcctctggatccagagaagctcctcattgtggacaattccctgccactcccagggagctgaatagaagtgagagcactagcaagaacccgcaggatcagatcaggcttctagaggtacagatgaagggtctacaggcgactgggatgtttattacatgtacagacaggtgttggagaaacaaaatgctacgtattacctttacagaggaagggttcaaggctattggctatcgtacagcgagagattcagaattgcatgcaggtgtacctacatatatgaccagtggtccaatatattggagtcagtgacgactccagtggatgccatttcttagctccaatatgatatgcagcctgatttctcatgctcgaacgactagctgtgcagttagaactatccggtctcgattctgtagagtatgtctacgttgagtgtacctttttttttggtaaatccattcatgtacatttgtataggttgttgtattgtagatcttgtgagctgtgttgtttggtcgctaagcaatctacggcgtattatactgcggcatagagtgtacaggggaggccagattacacctgtgtctgtgtgtgtctctgtccttccaactttcccggttcaggctgcggtgccgagagtgggattgtgttatttggggtgttgtacaagccaagtgaatgtgcagatcgagtatggacatgatttctttcttatacagtggccgttgtcataattttcacaatggcaggtcattat

SEQ ID NO: 31113 - DNA, 2599 bp, Zea Mays
atgccactctcggagccgtcggcgccggccgtgctcgcggcgctgccgcgggcgctctccctcgcggccgcggccgtcgcggccgcaaccgcgaccctcctcctcatctccgccgtcttctccaccccccaccacgcggcgtcctcctcgtcccctcagctttccccgtccgccagcgcctccaccgcggcgcctgtggccccggcgcccgcacacgcgcccgactccggcccaggccacccccaccccccgcctcccgttcccccgtgccctcccaacgccacccacgacgtcccctgccacgagcctccctcgcgcgagcgccactgccccccgcgcccgccgccgccgccgcctcttcttcctcacccgccaaaggacccgccgccgcaccctccgccgcactgccgcgtcccgccgccgcccaggtaccgcccgcccccgccgtggcccgcgcgccgcgaccgcgcgaggtacgccaacgtggacctcccgccgctgcccccggttaaggcggcggatggacagcagcaggaccccgttcacggtcgcggggagtggctgctgttcaccgacggggtgcagggttatgtcgagcggctggagcgcgtcgtgccgctccgcgacggcgtggtgcacacggcgctcgacatcggatgcggggtcgcgagctttggggactatctgctcaactatggcgtactgaccatgtccattgctccgagggatagatttgaaccgcaggtgcagctcgccttggagcgtggactgcctgcaatgatcggagcgcttgttgcccacaggctaccgtatccatcgaggtccttcgacatggtgcactgtgcggactgccgtgtcccatggactgctcatgatgggctctacatgctggaaatcgaccgtcttctccaacctggtggctattgggttttctctaagccacccgtcaactggaaatctacatacaacatttcgaatcaagggaccatagacaagcaggacaatcaagtagctatggatgacatgtcgaaaaggcttcgttggacgaaggtgtctgaagagggcacaatttctgtttggagaaagccttcttgtaatctccattgcgaccaagaagcaaatgcaaagcttgctggattgccaccactctgcacaggagaagacccagatagtgcctgaaatgtcatggacatgagtgccggttctggtggctttgccgctgctatgtccaagcatcctgtctgggtcatgaatgtggttcctgcaaatacgacagagaacgcccttggtgtcatctatgagcgtggtttgattggaacatacactgactggtactgttaatgaaacctttttcttcttgaaataaactgacactcccaaactatacagtcagacatacaaaataactctccatgttgcttgttaatatgtttccaggtgcgaggccttctctacttatccacgaacatacgatctgatacatggtaatggaatcttcagctcccatattcacaagtaagtgacccgctaacttggcgatgttaaaaagccactgaaagagaacaacaaaaggcatagactgcgatctgcgaagcaagtgaacaattcaagtagcacacactagtcccttgcagttaaattaagtcccggctcagccatccatcttgacacgaaactattctctgtcaggtgtgggattatcgacatcctggttgagatggatcgtattctccggccagggggtgccgtcatagttcgggacagagccgacgtcgttctcagagtcaagaaggacgccgaccgtctacgatggcatagccgagttgtcgacactgaaaatgggcctctggatccagagaagctcctcattgtggacaattccctgccactcccagggagctgaatagaagtgagagcactagcaagaacccgcaggatcagatcaggcttctagaggtacagatgaagggtctacaggcgactgggatgtttattacatgtacagacaggtgttggagaaacaaaatgctacgtattacctttacagaggaagggttcaaggctattggctatcgtacagcgagagattcagaattgcatgcaggtgtacctacatatatgaccagtggtccaatatattggagtcagtgacgactccagtggatgccatttcttagctccaatatgatatgcagcctgatttctcatgctcgaacgactagctgtgcagttagaactatccggtctcgattctgtagagtatgtctacgttgagtgtacctttttttttggtaaatccattcatgtacatttgtataggttgttgtattgtagatcttgtgagctgtgttgtttggtcgctaagcaatctacggcgtattatactgcggcatagagtgtacaggggaggccagattacacctgtgtctgtgtgtgtctctgtccttccaactttcccggttcaggctgcggtgccgagagtgggattgtgttatttggggtgttgtacaagccaagtgaatgtgcagatcgagtatggacatgatttctttcttatacagtggccgttgtcataattttcacaatggcaggtcattat

SEQ ID NO: 31114 - DNA, 1735 bp, Zea Mays
aaaaggccctctttgaggagagtgtgagtgagaaaacaaaaacaaaaagggtaccgccctcctctccacctataaaaatgcggccaccgcccaccgccctccgcctcccacctccacctgacctcccgtcccgcattcgggacgaagccaccaacgacgagctcagcagcgccgacgccgcaacgacaaccagagcaccccgcactgtggagaattcatgtaaattatattaaaaggtagcaatgtggcgccgctgttgctgcaattgccaagtggatgaatccgaccagcatgaaaatgggcatgtcaaggccacaatcaacaacattgatggggcaataatggggttgaaagattctactactggaaaagtcgagccgcaggatgctgctccccaaattgatatccctgttctatccttggatgaactgatagaaaaaactgatgactttggttcaacggctttgataggtgaaggttcttatgggagagtgtactatgcgattcttgataatggaacaaaaatggcagtaaagaaacttgattctactgaaaatgaacccactgctgaattcttgacccaggaagaaaaggagttcaaggtgctcaacctggcctggcgcttgattggatgcagcgagtgcaaattgctgttgatgcggcaaaaggacttgaatatcttcatgagaaagttcagccttccattgtccatagggatattagatcaagtaatatcctcttgtttgaagatttcaaggcaaagatagcagactttaatctctcaaatcaggctccagatatggctgcccggttgcattcaactcgtgtcttgggaacctttggatatcatgctccagagtatgcaatgaccggtcaactaacccagaaaagtgatgtatatagcttcggagtagttcttttggagcttttgacaggtagaaagccagtagaccatacaatgcctagagggcagcagagcctagtaacttgggctaccccaaggttaactgaagacaaggtgaagcagtgtgtagatccacggttgatgggggaatatccggcgaaaggactcgctaagcttgctgctgtagcagctttgtgtgtgcaatatgaagctgaattcgcccaaatatgagcattgtggttaaggctctgtctccactactcgtaacaaagcagactccatcacctgttgttgacagttgacgtacaaaattaacctaagttgcaaatatgagcggcaacagttgggacactacggacatttgatcggttcacctcagtcacagatttcaaacactaactgcatggagatggagggcatctttagtactgcattaacaactttgcatctgcggttctacagcatgtgcaaggcaacaatattccttttcatctctcagtaaatgccagtatcaaggagactactgaaatattcagtgatcaacattgagacttttttttttttgcaaagatgcggaatggtaaaagacccttcttttggtgtcacaaacagcaatgggatctcccagtatacatgttcgactcagaaaccgtaacggtaaaaaaattccactgtgaatcggaagacatgcaaagcaaacaacgtagcaattagtcatttcgctctaatttgaaaaacgtgcaaagctcagtaatcagtaaacacgccgtagtatctctcatgcatcacgcacatacaggaatgagatctccggtagacatgcgcgatcag

SEQ ID NO: 31115 - DNA, 1862 bp, Zea Mays
aaaaggccctctttgaggagagtgtgagtgagaaaacaaaaacaaaaagggtaccgccctcctctccacctataaaaatgcggccaccgcccaccgccctccgcctcccacctccacctgacctcccgtcccgcattcgggacgaagccaccaacgacgagctcagcagcgccgacgccgcaacgacaaccagagcaccccgcactgtggagaattcatgtaaattatattaaaaggtagcaatgtggcgccgctgttgctgcaattgccaagtggatgaatccgaccagcatgaaaatgggcatgtcaaggccacaatcaacaacattgatggggcaataatggggttgaaagattctactactggaaaagtcgagccgcaggatgctgctccccaaattgatatccctgttctatccttggatgaactgatagaaaaaactgatgactttggttcaacggctttgataggtgaaggttcttatgggagagtgtactatgcgattcttgataatggaacaaaaatggcagtaaagaaacttgattctactgaaaatgaacccactgctgaattcttgacccaggtttcattggtttcaagattgaaacatgaaaactttgttgacatgttggggtactgtatggagcgtaatcttcgcatagtagcctatgaattcgccaccatgggttctctgcatgatgtactacatggaagaaaaggagttcaaggtgctcaacctggcctggcgcttgattggatgcagcgagtgcaaattgctgttgatgcggcaaaaggacttgaatatcttcatgagaaagttcagccttccattgtccatagggatattagatcaagtaatatcctcttgtttgaagatttcaaggcaaagatagcagactttaatctctcaaatcaggctccagatatggctgcccggttgcattcaactcgtgtcttgggaacctttggatatcatgctccagagtatgcaatgaccggtcaactaacccagaaaagtgatgtatatagcttcggagtagttcttttggagcttttgacaggtagaaagccagtagaccatacaatgcctagagggcagcagagcctagtaacttgggctaccccaaggttaactgaagacaaggtgaagcagtgtgtagatccacggttgatgggggaatatccggcgaaaggactcgctaagcttgctgctgtagcagctttgtgtgtgcaatatgaagctgaattcgcccaaatatgagcattgtggttaaggctctgtctccactactcgtaacaaagcagactccatcacctgttgttgacagttgacgtacaaaattaacctaagttgcaaatatgagcggcaacagttgggacactacggacatttgatcggttcacctcagtcacagatttcaaacactaactgcatggagatggagggcatctttagtactgcattaacaactttgcatctgcggttctacagcatgtgcaaggcaacaatattccttttcatctctcagtaaatgccagtatcaaggagactactgaaatattcagtgatcaacattgagacttttttttttttgcaaagatgcggaatggtaaaagacccttcttttggtgtcacaaacagcaatgggatctcccagtatacatgttcgactcagaaaccgtaacggtaaaaaaattccactgtgaatcggaagacatgcaaagcaaacaacgtagcaattagtcatttcgctctaatttgaaaaacgtgcaaagctcagtaatcagtaaacacgccgtagtatctctcatgcatcacgcacatacaggaatgagatctccggtagacatgcgcgatcag

SEQ ID NO: 31116 - DNA, 1839 bp, Zea Mays
aaaaagggtaccgccctcctctccacctataaaaatgcggccaccgcccaccgccctccgcctcccacctccacctgacctcccgtcccgcattcgggacgaagccaccaacgacgagctcagcagcgccgacgccgcaacgacaaccagagcaccccgcactgtggagaattcatgtaaattatattaaaaggtagcaatgtggcgccgctgttgctgcaattgccaagtggatgaatccgaccagcatgaaaatgggcatgtcaaggccacaatcaacaacattgatggggcaataatggggttgaaagattctactactggaaaagtcgagccgcaggatgctgctccccaaattgatatccctgttctatccttggatgaactgatagaaaaaactgatgactttggttcaacggctttgataggtgaaggttcttatgggagagtgtactatgcgattcttgataatggaacaaaaatggcagtaaagaaacttgattctactgaaaatgaacccactgctgaattcttgacccaggtttcattggtttcaagattgaaacatgaaaactttgttgacatgttggggtactgtatggagcgtaatcttcgcatagtagcctatgaattcgccaccatgggttctctgcatgatgtactacatggaagaaaaggagttcaaggtgctcaacctggcctggcgcttgattggatgcagcgagtgcaaattgctgttgatgcggcaaaaggacttgaatatcttcatgagaaagttcagccttccattgtccatagggatattagatcaagtaatatcctcttgtttgaagatttcaaggcaaagatagcagactttaatctctcaaatcaggctccagatatggctgcccggttgcattcaactcgtgtcttgggaacctttggatatcatgctccagagtaaaaacccttttcttaaagtatgcaatgaccggtcaactaacccagaaaagtgatgtatatagcttcggagtagttcttttggagcttttgacaggtagaaagccagtagaccatacaatgcctagagggcagcagagcctagtaacttgggctaccccaaggttaactgaagacaaggtgaagcagtgtgtagatccacggttgatgggggaatatccggcgaaaggactcgctaagcttgctgctgtagcagctttgtgtgtgcaatatgaagctgaattcgcccaaatatgagcattgtggttaaggctctgtctccactactcgtaacaaagcagactccatcacctgttgttgacagttgacgtacaaaattaacctaagttgcaaatatgagcggcaacagttgggacactacggacatttgatcggttcacctcagtcacagatttcaaacactaactgcatggagatggagggcatctttagtactgcattaacaactttgcatctgcggttctacagcatgtgcaaggcaacaatattccttttcatctctcagtaaatgccagtatcaaggagactactgaaatattcagtgatcaacattgagacttttttttttttgcaaagatgcggaatggtaaaagacccttcttttggtgtcacaaacagcaatgggatctcccagtatacatgttcgactcagaaaccgtaacggtaaaaaaattccactgtgaatcggaagacatgcaaagcaaacaacgtagcaattagtcatttcgctctaatttgaaaaacgtgcaaagctcagtaatcagtaaacacgccgtagtatctctcatgcatcacgcacatacaggaatgagatctccggtagacatgcgcgatcag

SEQ ID NO: 31117 - DNA, 1800 bp, Zea Mays
accgccctcctctccacctataaaaatgcggccaccgcccaccgccctccgcctcccacctccacctgacctcccgtcccgcattcgggacgaagccaccaacgacgagctcagcagcgccgacgccgcaacgacaaccagagcaccccgcactgtggagaattcatgtaaattatattaaaaggtagcaatgtggcgccgctgttgctgcaattgccaagtggatgaatccgaccagcatgaaaatgggcatgtcaaggccacaatcaacaacattgatggggcaataatggggttgaaagattctactactggaaaagtcgagccgcaggatgctgctccccaaattgatatccctgttctatccttggatgaactgatagaaaaaactgatgactttggttcaacggctttgataggtgaaggttcttatgggagagtgtactatgcgattcttgataatggaacaaaaatggcagtaaagaaacttgattctactgaaaatgaacccactgctgaattcttgacccaggtttcattggtttcaagattgaaacatgaaaactttgttgacatgttggggtactgtatggagcgtaatcttcgcatagtagcctatgaattcgccaccatgggttctctgcatgatgaagaaaaggagttcaaggtgctcaacctggcctggcgcttgattggatgcagcgagtgcaaattgctgttgatgcggcaaaaggacttgaatatcttcatgagaaagttcagccttccattgtccatagggatattagatcaagtaatatcctcttgtttgaagatttcaaggcaaagatagcagactttaatctctcaaatcaggctccagatatggctgcccggttgcattcaactcgtgtcttgggaacctttggatatcatgctccagagtatgcaatgaccggtcaactaacccagaaaagtgatgtatatagcttcggagtagttcttttggagcttttgacaggtagaaagccagtagaccatacaatgcctagagggcagcagagcctagtaacttgggctaccccaaggttaactgaagacaaggtgaagcagtgtgtagatccacggttgatgggggaatatccggcgaaaggactcgctaagcttgctgctgtagcagctttgtgtgtgcaatatgaagctgaattcgcccaaatatgagcattgtggttaaggctctgtctccactactcgtaacaaagcagactccatcacctgttgttgacagttgacgtacaaaattaacctaagttgcaaatatgagcggcaacagttgggacactacggacatttgatcggttcacctcagtcacagatttcaaacactaactgcatggagatggagggcatctttagtactgcattaacaactttgcatctgcggttctacagcatgtgcaaggcaacaatattccttttcatctctcagtaaatgccagtatcaaggagactactgaaatattcagtgatcaacattgagacttttttttttttgcaaagatgcggaatggtaaaagacccttcttttggtgtcacaaacagcaatgggatctcccagtatacatgttcgactcagaaaccgtaacggtaaaaaaattccactgtgaatcggaagacatgcaaagcaaacaacgtagcaattagtcatttcgctctaatttgaaaaacgtgcaaagctcagtaatcagtaaacacgccgtagtatctctcatgcatcacgcacatacaggaatgagatctccggtagacatgcgcgatcag

SEQ ID NO: 31118 - DNA, 1644 bp, Zea Mays
ctccacctgacctcccgtcccgcattcgggacgaagccaccaacgacgagctcagcagcgccgacgccgcaacgacaaccagagcaccccgcactgtggagaattcatgtaaattatattaaaaggtagcaatgtggcgccgctgttgctgcaattgccaagtggatgaatccgaccagcatgaaaatgggcatgtcaaggccacaatcaacaacattgatggggcaataatggggttgaaagattctactactggaaaagtcgagccgcaggatgctgctccccaaattgatatccctgttctatccttggatgaactgatagaaaaaactgatgactttggttcaacggctttgataggtgaaggttcttatgggagagtgtactatgcgattcttgataatggaacaaaaatggcagtaaagaaacttgattctactgaaaatgaacccactgctgaattcttgacccaggaagaaaaggagttcaaggtgctcaacctggcctggcgcttgattggatgcagcgagtgcaaattgctgttgatgcggcaaaaggacttgaatatcttcatgagaaagttcagccttccattgtccatagggatattagatcaagtaatatcctcttgtttgaagatttcaaggcaaagatagcagactttaatctctcaaatcaggctccagatatggctgcccggttgcattcaactcgtgtcttgggaacctttggatatcatgctccagagtaaaaacccttttcttaaagtatgcaatgaccggtcaactaacccagaaaagtgatgtatatagcttcggagtagttcttttggagcttttgacaggtagaaagccagtagaccatacaatgcctagagggcagcagagcctagtaacttgggctaccccaaggttaactgaagacaaggtgaagcagtgtgtagatccacggttgatgggggaatatccggcgaaaggactcgctaagcttgctgctgtagcagctttgtgtgtgcaatatgaagctgaattcgcccaaatatgagcattgtggttaaggctctgtctccactactcgtaacaaagcagactccatcacctgttgttgacagttgacgtacaaaattaacctaagttgcaaatatgagcggcaacagttgggacactacggacatttgatcggttcacctcagtcacagatttcaaacactaactgcatggagatggagggcatctttagtactgcattaacaactttgcatctgcggttctacagcatgtgcaaggcaacaatattccttttcatctctcagtaaatgccagtatcaaggagactactgaaatattcagtgatcaacattgagacttttttttttttgcaaagatgcggaatggtaaaagacccttcttttggtgtcacaaacagcaatgggatctcccagtatacatgttcgactcagaaaccgtaacggtaaaaaaattccactgtgaatcggaagacatgcaaagcaaacaacgtagcaattagtcatttcgctctaatttgaaaaacgtgcaaagctcagtaatcagtaaacacgccgtagtatctctcatgcatcacgcacatacaggaatgagatctccggtagacatgcgcgatcag

SEQ ID NO: 31119 - DNA, 1148 bp, Zea Mays
gaaaaggagttcaaggtgctcaacctggcctggcgcttgattggatgcagcgagtgcaaattgctgttgatgcggcaaaaggacttgaatatcttcatgagaaagttcagccttccattgtccatagggatattagatcaagtaatatcctcttgtttgaagatttcaaggcaaagatagcagactttaatctctcaaatcaggctccagatatggctgcccggttgcattcaactcgtgtcttgggaacctttggatatcatgctccagagtatgcaatgaccggtcaactaacccagaaaagtgatgtatatagcttcggagtagttcttttggagcttttgacaggtagaaagccagtagaccatacaatgcctagagggcagcagagcctagtaacttgggctaccccaaggttaactgaagacaaggtgaagcagtgtgtagatccacggttgatgggggaatatccggcgaaaggactcgctaagcttgctgctgtagcagctttgtgtgtgcaatatgaagctgaattcgcccaaatatgagcattgtggttaaggctctgtctccactactcgtaacaaagcagactccatcacctgttgttgacagttgacgtacaaaattaacctaagttgcaaatatgagcggcaacagttgggacactacggacatttgatcggttcacctcagtcacagatttcaaacactaactgcatggagatggagggcatctttagtactgcattaacaactttgcatctgcggttctacagcatgtgcaaggcaacaatattccttttcatctctcagtaaatgccagtatcaaggagactactgaaatattcagtgatcaacattgagacttttttttttttgcaaagatgcggaatggtaaaagacccttcttttggtgtcacaaacagcaatgggatctcccagtatacatgttcgactcagaaaccgtaacggtaaaaaaattccactgtgaatcggaagacatgcaaagcaaacaacgtagcaattagtcatttcgctctaatttgaaaaacgtgcaaagctcagtaatcagtaaacacgccgtagtatctctcatgcatcacgcacatacaggaatgagatctccggtagacatgcgcgatcag

SEQ ID NO: 31120 - DNA, 3599 bp, Zea Mays
ctttattcctcactacaggtcacatcagttttaccaaccactggctggaggtatcgtctcatccatccaaagaacattactctactgttgtctacttcaggaagctcgtcagtcgtcactttgccgccgaatatgcatatatcctttattccgtcaacagcatgggagcaatgtggctttatagacaatcaggttaaataccagctaaaaatactctttacctccgtgtcatggagtagccatgttgctagactaggtacgcgcccgtgcgatgttatagaacataaattgcgagcctccagcgagctcagggtcctggcaataggcagcgtgagtacaatgatgactacaaaatagatgattaaacatagatacagaacgatatttataaatacgcctacccaaatagattgaactgatgtcgatcaaacattatcagtatcacacaaataatttctaaagagttaatataaaacgcttaatcataagcaaatatgttggcaccttgtacattaatctaatcttttttagcaatattgttaagccttgtatgtttgtagggatatcatatagtgaattgtcctttatcttaataggtcgataacaaagttcctccaaagaatctttgcgtcctatgcacaagacataagcgtcaatttattattatgtaactggaatgtatgtttgaatatgaagtgaccgtactccgctcaccctaacaaatttaattcgagtgtccatggccatagcttgtagaatgaggtagctggtgttaagcctatagaataatgctttgctacgattgtcattctctactacttattaaggctataggtaagtacctatgtgttgcaacgtgaacatatactaccacgataacttaagtacaaatatgtgttatactgttattagaaaatgatagtgcacaatgattatataaaaatgaacgacacgcatattatcgatctcaatatttcacaaattctttggcaacaatcaatacagaactgaactaatacagatcaaattatactacaatacaaatatcagaaaaaataaagtcaaaagaagtgagtataatgttgaatgggtagattccaatttcattgggttgctcaggtttcaactcacgatatcatcggatgttgaatgggtagtttctaatttgaatttaagctcactgggatacacaaagacaatcactcttgaggctgaaggagtcaatgcagtaggataactgctaagagccagaacacgaactaatgacccaaaaaaacgaaattatgggaatcaacaaggtctccagcgattcttgcatacaatatccctacaaaatcatttgtttaaaacatgtttcattttccataagcctggaatgtgattcacataaagcatattaaacattagcataatcatgtatgaagagcaaagcaatgtttcaattccataagataaagcttatgctggtaagagatgagaacaatgtgtgagtgttgagtgcccctattttagtggtaaaccatggtgtgtgtgcctaaagacacactgcaccaactgaaggtcttatgagggactaggctgttaacatgaacctcagcatatggaattttgtctagggttctcatagaagaaaaagaaatgcacaaggtggtgcattctttaaaagaacacggtcaagttaaataccttgtacacagtggaagtataataattagaacccagttagtgaggagaaggtattttggtaaccccacaaatattacacctattatcacgaaggtgttttcaacatagcacagtccacacccttctcccccaacacacacatgaggctcagatgttatgataggtgctaaattcttcaacttgatgatcgacaaaaacatagtcaaaatatctctttctagataccatacatcaattctctctaatgttaatgagcgtgcccctaaaggagtacaattcacaaacccaaatgattctggtttattattagttcactttgatgttaatgaacatgccctataggagtacaattcacagaattcgtatgctttctagtggtgaagctttatataatccttgtcaaaacaagaagtgggttggctagctggttaaggacgtgaccttttggcggattgtgcaatacactttggcgttatgctaaaaatcatatggtattcttcaccttagctatctggtatccatgggttttgcataatttcaaccttgcatgtagtggaaactgtaaatagaagtaacatgtttgattttttttgtgtttcaacctcacatctacctcttctctaataatttagccaggttgggatcagcaagaagacattgatcctctatggtaccaatattaattttgtttcaacctctatgttgttatatatttatcacctaaagcgtcataacactattaaatatactaagaagaaggacgacattaggccttttgaaagtggcggagaatcttctctagaacttttctccttcaaggcaaactgtagcatggacatgtgaagagctaattggtcccaatgtgattttttatttactgatgttgtgataattctagaagtagaataatctagtgtctacaaactaaatttctgtcaacccagcctaatctatctaatcatgtgaatctgagcatgaactgaactactgaaaagaaataaccattgccatttgatatgataaaccttagctttaggttcaagtaataacactatcatcacattttggtgtccccttcattgctaaaagcaggaaatcaactataattgaactctactgctgagaaaccagtacacactacaaacagaactggattgacttgacatgtggttcgatgtgctggattttttcagcccttagcagtaaacaatgtgatcctttatttactaagggttgtgaaatatctagaagtagaataatctagtgcctataaactgaatttctgtcaacccatcccaatctatctaatcatgtaaatctgagcatgaactgaactactgaaaagaaataaccattgccatttgatatgacaaaccttagctttaggtacaagtaagaacactgtcatcacatatggtaagactaaaggttgttgggagttggaacacacatacctgaaacaacattggtgttggcttccttctcgggcaacagtgcctagaagtagaataatctatgcctacaaactgaatttctgccaaccctgcctaatctatctaatcatgtgaatctgagtaacaactgaactactgaaaagaaataaccattgccatttgatatgataaaccttagctttaggttcaagtaagaacattgtcatcacatatggtaacactaaagggtgttgggagttgggacacatatacctggaacaacaatggtgttggcttccttctcgggcatcagactgaccttcaccttggcatcctcctcattaaattttggtgtccccttcattgctaaaagcaggaaatcaactataattaaaactactgctgcagaaaccagtacacactacaaacagaactggattgacttgacaaacgtgtagaaacaacaaacgtaaaacaaag

SEQ ID NO: 31121 - DNA, 4356 bp, Zea Mays
cagccaacgcaggcgtccaagtccaagcaaagccccgctcctgtcacagacaaatttccacgggagtatctccccccctgcttttttcttcttcccttcaccccccgcgtgcgcgctcagtccctctcgcctgtggcgacgcttgagcgaccgctgctgccgctcgacgccagatcttcgccgtgccgctccggtgacgagcaccctccaggtatgcccttggagcgtaaggaggggagtcggagatgttttactcgcagttcattttggccaaaaagggtcccctcgggaccatatggattgccgcgcacttggagcggaagctgcgcaagaaccaggtcgcggacacggacatcggcgtctccgtagattctatcatattccctgatgttccaattgcacttcggttatcaagtcatcttatgttaggcgtggtcagaatctattctcggaaggtcaactacctattccatgactgcagcgaagctttgctgaagataaaacaagctttcaggtccactgctgttgatcttcctcctgaagagtcaactgctccgtatcactctataactctgcctgagacattcgatcttgatgattttgaactgccagaagctgcgtttcaaggcgacactgatcatcatgtgagcacaaaagaacagatcactttgcaagacaacccagagaaaacagggtattcaacatcccagtttggcctagatgaaagatttggtgatgccagttcatcacatattggctttgacttggaggaggaattaattctgaacaaggaccactcaattcatctccaatctgatgatggcattattattcaaggtcggtcatcagtcccttctactgatatggacattgatgataacaaaagtcaagacataatagctgaaggataccacaacatggatggtgggcattctagtcatggaaagctaggttcactgaatctgaatgcaattgacctaggaggaaacagtatccctaactggactggttacaatgtacatactcctgatttgaatgatatattattgcataatgagggtattgcagggccatcagcttcgtacattcaacctagcccatatacttgtgatgaacctgcatcaccagagttcattagtgctcaggccccagctacacctggtttaatggaagagacagttccttctagagtccatgaaagtcctgttctaagtccacagagaaaaccatcaccgtcaaccaatgatgaaactgcaaagactgacactcctgctgctccagcctcagattttcttcattcggctacaggaaatgccaatgatgttggtgctgaaaggacagaacttggattggcgaagcatgtgcaagttgagtcttctgctttctgggacgctgatgcatcgggacaacagcacacaagtgagggtttaccatcccagggtcaagctgatcacttagaacccgctgctgataaattggtcaattctgatggtatagccgcatctgttgaaactgtaactgtcaatgcaaccattaaagatgtacctttggctgtaaatgattcagagccatgtgttgatggttctactgaaccatctgtggtggagaacctggtacagattaatgggccattaattgatgcacaagattttcaacatgaagcccaagcaatgcaacaagtagtggcatctaatgatagactgaatgaactagcaacttcagaatttgctgagcctgagaaaatgctgtcagttccagattctgaattcaatcatccaattgacttggggctcataactgcggaaaagggaacaactgaatctgatggaagtaacataataggcagccttgctagcagaaaaagacatctggaagatagcttaccagctttagagagtgagaccactgaaaggttgtctagccgaccacatggtatacgaaccaacgattttgttccccatgatgatgatatactggcatctattttagtcggtagaaggacccctggattcacacttgattcaacaccactaccaccgagggaatcgtctctgaaacgccggaggttgggctcgaagatgggcacactcaagaggaaagtgcaaatagacgatgccatggtcctgcatgctgatactatacggcaacagttgatcaacactgaggatatacggcgcattcgtaaaaaagctccatgcactcgttccgaaatatggatgattgagaaaggttcactggaagatgatatattccacgagcccatcttttcctgtaagttttttgtgatgtctttgtttttctgtttactttttctgtacaccatgacatatggtaagttagaaaaaatggaagtcgtaagcagcttgagagatgattggttgatttttatctctctactaggcctatctgaggagctaaacaaattacacaatcggacatatgaggctattgtacatcctgctgtacagaacatggaactgcaaggtcaattagacatgcctgaagcaattacagaagatagcaatattgctgggtttggtgctgctactattgatggcccacttcacataccagatgggattcaatcagatgccatgctgccacgtgccaatgatgcatatggcgctacagctgcttttagtttgcaagttcctcctaacaaccaggttaacggtgcatctaatgattttgttattggcactctgtttcaaggggtgactggaccttttattggtaatgagaaagaagtggcacttgctgacagagagcgtgctcaagtaaatacactgtatagtgaccattttcaagatgtcccatctgatttgcatagtactgatgcaaacatttctagtcaagatgtgactctagataactctggccaagcttgcgctcacgcaacggacggcatgacaagggagcttactcattttgttcatagtaatgctaatattttcgagagtaatgaggtccctgcttctgagattactggggtggaatataatcaaggtgcctctggtttccctcaatcaacggaggatgaaaatgcggtggggtataatcaagatgtctctggttttcctcgaccaacggaggatgaaaatgcggtagattataatcaagatgcctctggtttttctcgaccaacagaagatgttcaagatgcctctggttttcctcgaccaacggaggatgaaaatatggtagattataatcaagatgcctctggttttcctcgaccaacagaagatgtaaatgcggtgggatataatcaagatgcctctggttttgctcgaccaacggaagatgtaaatgcggtgggatgtaatcaagatgcctctggttttcctcgatcaatgaaggatgaaaatgcggtggaatataatcaagatggctctggttttcctcgaccagctgaaaatgaaaatgatgtgtctgctatgggagataattctggcttccatgaaaacaacatgggttctcttacggatctggatatggtgaatgactatgaactgaaggaaagcaatgattttgggagtgcaattaatggtgttgatacagattttctgaactacgacgatgatgacggcggggacttcgacgacgccaacgacgatgagccaaatcccaacgagtttcagtctctcgacaacagtggttggtcttctcgcaccaggggcgttgcaagatacctcaaggctttattcgacgacgagtctggtctggagaggaagagcgttgctatcgaccatctggtgcgcgggaagacgcggaaggaagcgtcgagaatgttcttcgagaccttggtgctgacgacgaaggactacatcagcgtggaccaaccgaaccccttcgacttggtgagaataaagccaggctcaaagctgctgatgtcggaattctagaccgtccaagccagcttttacccctggcgccatacatacgtgttaccaattgtatccatcacaccgacctaccgcaccccctcctttaccccctccaaatccatttttgtttgtttgtttgtttgtttgttgttgttgttgttaagttatcctcctctgtgtagcatctcccgcgcgctagggctcgagtaggatggctgctatgttgtaccgtcggctgtatatatgatttagtgacacatgtgaagcctgccatgtaatctgatagcgctggctccctccctccctcccctccgatccactaaagctattgtataatttgtatttgcttggctaaagcccgtaggaatttgcgtattggtaacaagacgatatgatggtgtacctgttgattatgtcaggatctattgacagctttaactcagctattattggactgacctttcttgtg

SEQ ID NO: 31122 - DNA, 4148 bp, Zea Mays
cagccaacgcaggcgtccaagtccaagcaaagccccgctcctgtcacagacaaatttccacgggagtatctccccccctgcttttttcttcttcccttcaccccccgcgtgcgcgctcagtccctctcgcctgtggcgacgcttgagcgaccgctgctgccgctcgacgccagatcttcgccgtgccgctccggtgacgagcaccctccaggtatgcccttggagcgtaaggaggggagtcggagatgttttactcgcagttcattttggccaaaaagggtcccctcgggaccatatggattgccgcgcacttggagcggaagctgcgcaagaaccaggtcgcggacacggacatcggcgtctccgtagattctatcatattccctgatgttccaattgcacttcggttatcaagtcatcttatgttaggcgtggtcagaatctattctcggaaggtcaactacctattccatgactgcagcgaagctttgctgaagataaaacaagctttcaggtccactgctgttgatcttcctcctgaagagtcaactgctccgtatcactctataactctgcctgagacattcgatcttgatgattttgaactgccagaagctgcgtttcaaggcgacactgatcatcatgtgagcacaaaagaacagatcactttgcaagacaacccagagaaaacagggtattcaacatcccagtttggcctagatgaaagatttggtgatgccagttcatcacatattggctttgacttggaggaggaattaattctgaacaaggaccactcaattcatctccaatctgatgatggcattattattcaaggtcggtcatcagtcccttctactgatatggacattgatgataacaaaagtcaagacataatagctgaaggataccacaacatggatggtgggcattctagtcatggaaagctaggttcactgaatctgaatgcaattgacctaggaggaaacagtatccctaactggactggttacaatgtacatactcctgatttgaatgatatattattgcataatgagggtattgcagggccatcagcttcgtacattcaacctagcccatatacttgtgatgaacctgcatcaccagagttcattagtgctcaggccccagctacacctggtttaatggaagagacagttccttctagagtccatgaaagtcctgttctaagtccacagagaaaaccatcaccgtcaaccaatgatgaaactgcaaagactgacactcctgctgctccagcctcagattttcttcattcggctacaggaaatgccaatgatgttggtgctgaaaggacagaacttggattggcgaagcatgtgcaagttgagtcttctgctttctgggacgctgatgcatcgggacaacagcacacaagtgagggtttaccatcccagggtcaagctgatcacttagaacccgctgctgataaattggtcaattctgatggtatagccgcatctgttgaaactgtaactgtcaatgcaaccattaaagatgtacctttggctgtaaatgattcagagccatgtgttgatggttctactgaaccatctgtggtggagaacctggtacagattaatgggccattaattgatgcacaaggtacaattacacaaattgcagattttcaacatgaagcccaagcaatgcaacaagtagtggcatctaatgatagactgaatgaactagcaacttcagaatttgctgagcctgagaaaatgctgtcagttccagattctgaattcaatcatccaattgacttggggctcataactgcggaaaagggaacaactgaatctgatggaagtaacataataggcagccttgctagcagaaaaagacatctggaagatagcttaccagctttagagagtgagaccactgaaaggttgtctagccgaccacatggtatacgaaccaacgattttgttccccatgatgatgatatactggcatctattttagtcggtagaaggacccctggattcacacttgattcaacaccactaccaccgagggaatcgtctctgaaacgccggaggttgggctcgaagatgggcacactcaagaggaaagtgcaaatagacgatgccatggtcctgcatgctgatactatacggcaacagttgatcaacactgaggatatacggcgcattcgtaaaaaagctccatgcactcgttccgaaatatggatgattgagaaaggttcactggaagatgatatattccacgagcccatcttttcctgcctatctgaggagctaaacaaattacacaatcggacatatgaggctattgtacatcctgctgtacagaacatggaactgcaaggtcaattagacatgcctgaagcaattacagaagatagcaatattgctgggtttggtgctgctactattgatggcccacttcacataccagatgggattcaatcagatgccatgctgccacgtgccaatgatgcatatggcgctacagctgcttttagtttgcaagttcctcctaacaaccaggttaacggtgcatctaatgattttgttattggcactctgtttcaaggggtgactggaccttttattggtaatgagaaagaagtggcacttgctgacagagagcgtgctcaagtaaatacactgtatagtgaccattttcaagatgtcccatctgatttgcatagtactgatgcaaacatttctagtcaagatgtgactctagataactctggccaagcttgcgctcacgcaacggacggcatgacaagggagcttactcattttgttcatagtaatgctaatattttcgagagtaatgaggtccctgcttctgagattactggggtggaatataatcaaggtgcctctggtttccctcaatcaacggaggatgaaaatgcgaagatgttcaagatgcctctggttttcctcgaccaacggaggatgaaaatatggtagattataatcaagatgcctctggttttcctcgaccaacagaagatgtaaatgcggtgggatataatcaagatgcctctggttttgctcgaccaacggaagatgtaaatgcggtgggatgtaatcaagatgcctctggttttcctcgatcaatgaaggatgaaaatgcggtggaatataatcaagatggctctggttttcctcgaccagctgaaaatgaaaatgatgtgtctgctatgggagataattctggcttccatgaaaacaacatgggttctcttacggatctggatatggtgaatgactatgaactgaaggaaagcaatgattttgggagtgcaattaatggtgttgatacagattttctgaactacgacgatgatgacggcggggacttcgacgacgccaacgacgatgagccaaatcccaacgagtttcagtctctcgacaacagtggttggtcttctcgcaccaggggcgttgcaagatacctcaaggctttattcgacgacgagtctggtctggagaggaagagcgttgctatcgaccatctggtgcgcgggaagacgcggaaggaagcgtcgagaatgttcttcgagaccttggtgctgacgacgaaggactacatcagcgtggaccaaccgaaccccttcgacttggtgagaataaagccaggctcaaagctgctgatgtcggaattctagaccgtccaagccagcttttacccctggcgccatacatacgtgttaccaattgtatccatcacaccgacctaccgcaccccctcctttaccccctccaaatccatttttgtttgtttgtttgtttgtttgttgttgttgttgttaagttatcctcctctgtgtagcatctcccgcgcgctagggctcgagtaggatggctgctatgttgtaccgtcggctgtatatatgatttagtgacacatgtgaagcctgccatgtaatctgatagcgctggctccctccctccctcccctccgatccactaaagctattgtataatttgtatttgcttggctaaagcccgtaggaatttgcgtattggtaacaagacgatatgatggtgtacctgttgattatgtcaggatctattgacagctttaactcagctattattggactgacctttcttgtg

SEQ ID NO: 31123 - DNA, 4040 bp, Zea Mays
caacttggctagaggtcctttcgcactaccgtattctatcatattccctgatgttccaattgcacttcggttatcaagtcatcttatgttaggcgtggtcagaatctattctcggaaggtcaactacctattccatgactgcagcgaagctttgctgaagataaaacaagctttcaggtccactgctgttgatcttcctcctgaagagtcaactgctccgtatcactctataactctgcctgagacattcgatcttgatgattttgaactgccagaagctgcgtttcaaggcgacactgatcatcatgtgagcacaaaagaacagatcactttgcaagacaacccagagaaaacagggtattcaacatcccagtttggcctagatgaaagatttggtgatgccagttcatcacatattggctttgacttggaggaggaattaattctgaacaaggaccactcaattcatctccaatctgatgatggcattattattcaaggtcggtcatcagtcccttctactgatatggacattgatgataacaaaagtcaagacataatagctgaaggataccacaacatggatggtgggcattctagtcatggaaagctaggttcactgaatctgaatgcaattgacctaggaggaaacagtatccctaactggactggttacaatgtacatactcctgatttgaatgatatattattgcataatgagggtattgcagggccatcagcttcgtacattcaacctagcccatatacttgtgatgaacctgcatcaccagagttcattagtgctcaggccccagctacacctggtttaatggaagagacagttccttctagagtccatgaaagtcctgttctaagtccacagagaaaaccatcaccgtcaaccaatgatgaaactgcaaagactgacactcctgctgctccagcctcagattttcttcattcggctacaggaaatgccaatgatgttggtgctgaaaggacagaacttggattggcgaagcatgtgcaagttgagtcttctgctttctgggacgctgatgcatcgggacaacagcacacaagtgagggtttaccatcccagggtcaagctgatcacttagaacccgctgctgataaattggtcaattctgatggtatagccgcatctgttgaaactgtaactgtcaatgcaaccattaaagatgtacctttggctgtaaatgattcagagccatgtgttgatggttctactgaaccatctgtggtggagaacctggtacagattaatgggccattaattgatgcacaaggtacaattacacaaattgcagattttcaacatgaagcccaagcaatgcaacaagtagtggcatctaatgatagactgaatgaactagcaacttcagaatttgctgagcctgagaaaatgctgtcagttccagattctgaattcaatcatccaattgacttggggctcataactgcggaaaagggaacaactgaatctgatggaagtaacataataggcagccttgctagcagaaaaagacatctggaagatagcttaccagctttagagagtgagaccactgaaaggttgtctagccgaccacatggtatacgaaccaacgattttgttccccatgatgatgatatactggcatctattttagtcggtagaaggacccctggattcacacttgattcaacaccactaccaccgagggaatcgtctctgaaacgccggaggttgggctcgaagatgggcacactcaagaggaaagtgcaaatagacgatgccatggtcctgcatgctgatactatacggcaacagttgatcaacactgaggatatacggcgcattcgtaaaaaagctccatgcactcgttccgaaatatggatgattgagaaaggttcactggaagatgatatattccacgagcccatcttttcctgtaagttttttgtgatgtctttgtttttctgtttactttttctgtacaccatgacatatggtaagttagaaaaaatggaagtcgtaagcagcttgagagatgattggttgatttttatctctctactaggcctatctgaggagctaaacaaattacacaatcggacatatgaggctattgtacatcctgctgtacagaacatggaactgcaaggtcaattagacatgcctgaagcaattacagaagatagcaatattgctgggtttggtgctgctactattgatggcccacttcacataccagatgggattcaatcagatgccatgctgccacgtgccaatgatgcatatggcgctacagctgcttttagtttgcaagttcctcctaacaaccaggttaacggtgcatctaatgattttgttattggcactctgtttcaaggggtgactggaccttttattggtaatgagaaagaagtggcacttgctgacagagagcgtgctcaagtaaatacactgtatagtgaccattttcaagatgtcccatctgatttgcatagtactgatgcaaacatttctagtcaagatgtgactctagataactctggccaagcttgcgctcacgcaacggacggcatgacaagggagcttactcattttgttcatagtaatgctaatattttcgagagtaatgaggtccctgcttctgagattactggggtggaatataatcaaggtgcctctggtttccctcaatcaacggaggatgaaaatgcggtggggtataatcaagatgtctctggttttcctcgaccaacggaggatgaaaatgcggtagattataatcaagatgcctctggtttttctcgaccaacagaagatgttcaagatgcctctggttttcctcgaccaacggaggatgaaaatatggtagattataatcaagatgcctctggttttcctcgaccaacagaagatgtaaatgcggtgggatataatcaagatgcctctggttttgctcgaccaacggaagatgtaaatgcggtgggatgtaatcaagatgcctctggttttcctcgatcaatgaaggatgaaaatgcggtggaatataatcaagatggctctggttttcctcgaccagctgaaaatgaaaatgatgtgtctgctatgggagataattctggcttccatgaaaacaacatgggttctcttacggatctggatatggtgaatgactatgaactgaaggaaagcaatgattttgggagtgcaattaatggtgttgatacagattttctgaactacgacgatgatgacggcggggacttcgacgacgccaacgacgatgagccaaatcccaacgagtttcagtctctcgacaacagtggttggtcttctcgcaccaggggcgttgcaagatacctcaaggctttattcgacgacgagtctggtctggagaggaagagcgttgctatcgaccatctggtgcgcgggaagacgcggaaggaagcgtcgagaatgttcttcgagaccttggtgctgacgacgaaggactacatcagcgtggaccaaccgaaccccttcgacttggtgagaataaagccaggctcaaagctgctgatgtcggaattctagaccgtccaagccagcttttacccctggcgccatacatacgtgttaccaattgtatccatcacaccgacctaccgcaccccctcctttaccccctccaaatccatttttgtttgtttgtttgtttgtttgttgttgttgttgttaagttatcctcctctgtgtagcatctcccgcgcgctagggctcgagtaggatggctgctatgttgtaccgtcggctgtatatatgatttagtgacacatgtgaagcctgccatgtaatctgatagcgctggctccctccctccctcccctccgatccactaaagctattgtataatttgtatttgcttggctaaagcccgtaggaatttgcgtattggtaacaagacgatatgatggtgtacctgttgattatgtcaggatctattgacagctttaactcagctattattggactgacctttcttgtg

SEQ ID NO: 31124 - DNA, 3395 bp, Zea Mays
agagcggagaggagagggagcgagacagatccaaaatactacacctccatgtaagctgtatccacactacaacacatcacctcacctcccttcctctccctccctccctccctccctctctctctctcctccaagatctgtcgatcacacacaccacaccatacacgcgcagctttttgctgctgcttgctcgtctacttgcccggttgcccctgcttcttcttccatcgcaatgccatcccctcgccaattcttgcagctgctgttacccaccttgctcgccacttgctgcgtcgatggagccaacggcccccacgctcccgccaccgcgaggaggcagctccaccagcccttcttcgtcccggatcagcccgggcagccgtcggcgccgccgccgttctttcccgcgattccggtgacgcccccgcctcctgtgccgacggggcaggaccagccgacgtaccccgctctggtgttccccagcaacggctccagcggtgccacgcctccggccggcaactcgcacgggtccaagaagtcctccaagctcgtcccggccatactgctgccgctgctcacggtggccgtgctcgggctgtccatcgctttcttcttctcgcaccgccggcgcaatgcggcccgcgggggaggcggcgggtgcgttggtggcggggacgccaagttcttgcacccggaaaggacgagcctcttcgcgcgtgacgagttcggtggcagcggcggaggcggcgtcagggaggccgcgccggcgccggcgccggcgtcggctacctctgccgagttcctctacgtggggacgctggcgagcagagccgacgagaggagcagcgacacgacgtcgtccggcgacgaggtgtcccggagctcaggcggatcgcccgagctccgcccgcttccgccgctggcgcggcagtgcgcgccggcgccgtcgaggagccccggcgcggcctccccgtcgtccggagaggaagaattctactcgccgcggggctcatcaacaaagacctcgagctcgcgcaggactctggcgacggcagtgcaggcggcccttgaggcgcgagaccgctctaggactccgtcccctgggtcggtcctgagcacgccgtcgtacccatcttcgccgggggcgacgctgtcgcccgcgcccgcctcgccgcctgccttttccagcccaggcgagtccggccgccgctccgtcaagtcaagatcggaaagcgcgcgcgtcgtcgtcctcccgccggttcctccgactccgcccccgcctcctcccttcgcaccgacactgccaccaccgccacctcctcgccggaaaccaccgtccccatcgcccccgtgctctccactaaacgacaaaccagctctcagatccagcaccgacaccatcgaaagaaacccgttcgcccagccaccgtccctaccgacgagcacacacccgccacggccacctccggctgcaggaccgccgccaccacctcctcctccgccgccgccgccggtgggctactgggagagccgtgtccgcaagcccgacacgtccaaagaaacccgttcgccggcactgtcgccgccaagcttcaggagcgtccctgcgcccaccgacgcgttcccaagctggctgcccgagagctccgagcaaggcgacaagtccgaggacacgacgccacggccgaagctgaagccgctgcactgggacaaggtccgggccagctctgaccgcgtcatggttccgctgaattctcgcagggtgaacgaggagatgatcgagacgctgttcatttgcaatccagccaatgcgccggccaaggaggcgactaggaggcccgtgctgccgacgcccaaggccgagaacaaggtgctagatccgaagaaggcgcagaacattgccatcttgctgcgcgcgctgaatgttaccaaggaagaggtcagcgacgcgctctgtgaaggtaacacggagaactttggagcggatttactggagaccttgctgaagatggctcccactaaggaagaggagattaaactgagagaattcaaagaggagtcttctccagttaagcttaacccagctgagaagttcctcaaggcagtgctcgatgtgccttttgccttcaagagagtcgatgcgatgctttacatagcgaacttcgatgcagaggtcaattacctcaagaagtcgttcgagacccttgaggctgcttgtgatgagctgagaagcagcaggctatttcttaagctactggaagcggttctgaagaccggcaacaggatgaatgttggcacaaaccgtggggacgcacacgcgttcaagctcgacactctgctgaaactggtggatgtcaaaggcaccgatgggcacacgacccttctgcacttcgtggtacaggagatgatccggacggagggcgcccgtgtgtccgccagcacccagacaactccaagaacccaggcgaaccctctacgagaggagctggagtgcaagaggctaggtctccgggtagtgggcggcctcgccagcgagctgggcaacgtgaagaaggcggcggccatggactcggacgtgctgagcagctacgtcgccaaactcgcgggagggatcgagaaggtgaccgaggtgctgcggctgaacgaggaggtcaagtcgagggacgacgcgtggcagttccacgacaggatgcagaggttcctgaagaaggcggacgacgagatcatccgggtgcagtgccaggagagcgtggcgctgtcgctggtgaaggagatcaccgagtacttccacggcgactccgccaaggaggaggcgcaccctttccggatcttcatggtcgtgagggacttcctggcggtgctggaccaggtctgcaaggaggtgggcaggatcaacgagcgcaccatcgccagctccgcgcgccacttcccggtgcccgtgaacccgatgatgccgcagctgttcccgcggctgcacgcgctgagagccgggttctccgacgacgagagctcagccgcttcggtgtcgtcgccatgaccgatcgatcgctggtagtcgttgttagtctgccaacatgattttttgttcgcgcggaccgtcggtggtagaagaacaccgcgccaggcggtagagggggattcgagtggtagcgggctgtcccttttttttttccttcttcttcttcttcttctcaccttttgtacctgtagattatatagaatgtacaatgttttttttttgttgttgttgcaaatatttatttttatatataagaagggatacaaatctagatcagaagaggaaataagcagttcgtatgtgaatgtatgcagcttttcagtctgtacatccatccatctcatagaatgacagaagagtgaagctaacaattcct

SEQ ID NO: 31125 - DNA, 1460 bp, Zea Mays
tgctccatttatgctgaaaatcactggtaacacggagaactttggagcggatttactggagaccttgctgaagatggctcccactaaggaagaggagattaaactgagagaattcaaagaggagtcttctccagttaagcttaacccagctgagaagttcctcaaggcagtgctcgatgtgccttttgccttcaagagagtcgatgcgatgctttacatagcgaacttcgatgcagaggtcaattacctcaagaagtcgttcgagacccttgaggctgcttgtgatgagctgagaagcagcaggctatttcttaagctactggaagcggttctgaagaccggcaacaggatgaatgttggcacaaaccgtggggacgcacacgcgttcaagctcgacactctgctgaaactggtggatgtcaaaggcaccgatgggcacacgacccttctgcacttcgtggtacaggagatgatccggacggagggcgcccgtgtgtccgccagcacccagacaactccaagaacccaggcgaaccctctacgagaggagctggagtgcaagaggctaggtctccgggtagtgggcggcctcgccagcgagctgggcaacgtgaagaaggcggcggccatggactcggacgtgctgagcagctacgtcgccaaactcgcgggagggatcgagaaggtgaccgaggtgctgcggctgaacgaggaggtcaagtcgagggacgacgcgtggcagttccacgacaggatgcagaggttcctgaagaaggcggacgacgagatcatccgggtgcagtgccaggagagcgtggcgctgtcgctggtgaaggagatcaccgagtacttccacggcgactccgccaaggaggaggcgcaccctttccggatcttcatggtcgtgagggacttcctggcggtgctggaccaggtctgcaaggaggtgggcaggatcaacgagcgcaccatcgccagctccgcgcgccacttcccggtgcccgtgaacccgatgatgccgcagctgttcccgcggctgcacgcgctgagagccgggttctccgacgacgagagctcagccgcttcggtgtcgtcgccatgaccgatcgatcgctggtagtcgttgttagtctgccaacatgattttttgttcgcgcggaccgtcggtggtagaagaacaccgcgccaggcggtagagggggattcgagtggtagcgggctgtcccttttttttttccttcttcttcttcttcttctcaccttttgtacctgtagattatatagaatgtacaatgttttttttttgttgttgttgcaaatatttatttttatatataagaagggatacaaatctagatcagaagaggaaataagcagttcgtatgtgaatgtatgcagcttttcagtctgtacatccatccatctcatagaatgacagaagagtgaagctaacaattcct

SEQ ID NO: 31126 - DNA, 390 bp, Zea Mays
atggatcagactgcacattcagaagaacgagcaggcgagcacccacaggctagcactccagcaccagcagagatgaatgggtattgggatttggggactggggacaagaggtggatgcatggagcccaggagctatacctgcagctgcagggcgctaccacgcagggatggagggggacgctgccgctgtatcccatcaccgatggcgcgcctcgtgctagagttcctcagtgcaaagagctcgagcgacgactgctggcaggtggcggctgggtgccttcacgtgtgaaagcctaggcggtgtggcaggtggcagccgtgttgcgtataggcaccagatggtttaccccctgggctgagccgctgggccaaaattggcctaaattttta

SEQ ID NO: 31127 - DNA, 1558 bp, Zea Mays
tgaggttcgtgccagggcgctatggtataacttggctgtcaaatatgcaattccaacatttgaatcctccatgggagaggcaagaggaaagggcaacccaaaagacgatgcaaatgaagcggctgatggattagcaagcaggacaagagactgagatccatcctccagacacgcgcacgccaaggatcgcattcgccaagcaacgtcgggtcggcggcgcgggggcgatggagacgcggcggccgcggcgcggctggaacaaacgcttcgtcctcccgctcgcgctcctctgcctcgccgtgctgctccccggcgcgctgctcccgccgtccgcctcggcgtcgtcttcgtcgccggccgcgggaggtggcagcaggaaacgccggtgggttgggtttgactactatgtactggcgctgcagtggccgggcaccatctgccgcgagaccagcaactgctgcgacaccaatggctgctgccgatcacagcctctcaagtggttcacgattcatggtctttggccacagtataactatgggggctggccatcatgctgcagaccaaccagattcaacataaataagatcttaatgttgatgccgatactcgagaagtattggccgtccttgtactgtggttcttcttcaacctgctttggtggaagggggccattttgggtgcatgagtggggtatgcagtttctgaacttgctgggcacgaataacgttctgttctgttacctcttaattgggtcgaggaatctgtttatgttttgctgtgtagcagtggatgcagtttttgcagatatactcctaagaatctaatgttaagataacccatttactcttttctggcagaaactcatgggacctgtgcttaccctgaaatacaggatgaatatgactacttctccacagcactgtatctctacagcaaatacaatgttacgaaagctctgagaaaagcacgtatccggcctacaagcggcagaaaatacgccgttggccatattgttgccgtcattgaatatgcgtttggggcaatgccgtcactcgtctgtaagaacggctcagttcaagaactcaggctctgcttccacaaggattatcagcctcgtgattgcacgcttgaggccggctctgcaccgaacggcagaagctactgccctcgctacatcacgttcccgtcgtacaaaccgtccgtggtggccaatactacggaggggatcaacaaccaatccaatggcgaggttccgagctacatgcgtacgtctgactctgagtagcgtccaggactccaggttctgtgggcctctgccgagccgagtttgtatcaaatatcaatagagcgagacgccacggcgtgcttgcaaaattaccggcccggtatggtcctgtataattctttcattcacagtatcgaatgactggccaccgcgcaccgggatttggaaatgaaatgtgaatgttaatgtatattatattcacttgactgtaccagattcgtgcacaggatagtttgacaacttcgtttttttccaaattattctcatttcctt

SEQ ID NO: 31128 - DNA, 1174 bp, Zea Mays
gtcaaatatgcaattccaacatttgaatcctccatgggagaggcaagaggaaagggcaacccaaaagacgatgcaaatgaagcggctgatggattagcaagcaggacaagagactgagatccatcctccagacacgcgcacgccaaggatcgcattcgccaagcaacgtcgggtcggcggcgcgggggcgatggagacgcggcggccgcggcgcggctggaacaaacgcttcgtcctcccgctcgcgctcctctgcctcgccgtgctgctccccggcgcgctgctcccgccgtccgcctcggcgtcgtcttcgtcgccggccgcgggaggtggcagcaggaaacgccggtgggttgggtttgactactatgtactggcgctgcagtggccgggcaccatctgccgcgagaccagcaactgctgcgacaccaatggctgctgccgatcacagcctctcaagtggttcacgattcaaactcatgggacctgtgcttaccctgaaatacaggatgaatatgactacttctccacagcactgtatctctacagcaaatacaatgttacgaaagctctgagaaaagcacgtatccggcctacaagcggcagaaaatacgccgttggccatattgttgccgtcattgaatatgcgtttggggcaatgccgtcactcgtctgtaagaacggctcagttcaagaactcaggctctgcttccacaaggattatcagcctcgtgattgcacgcttgaggccggctctgcaccgaacggcagaagctactgccctcgctacatcacgttcccgtcgtacaaaccgtccgtggtggccaatactacggaggggatcaacaaccaatccaatggcgaggttccgagctacatgcgtacgtctgactctgagtagcgtccaggactccaggttctgtgggcctctgccgagccgagtttgtatcaaatatcaatagagcgagacgccacggcgtgcttgcaaaattaccggcccggtatggtcctgtataattctttcattcacagtatcgaatgactggccaccgcgcaccgggatttggaaatgaaatgtgaatgttaatgtatattatattcacttgactgtaccagattcgtgcacaggatagtttgacaacttcgtttttttccaaattattctcatttcctt

SEQ ID NO: 31129 - DNA, 1607 bp, Zea Mays
gtcaaatatgcaattccaacatttgaatcctccatgggagaggcaagaggaaagggcaacccaaaagacgatgcaaatgaaggtaacatttgtaggcgtcgtagcttggttttgcttcacgagcacaacaagccatccatctatgatctatcccgctccctccatccgcaagcaaaagctaatcgatcttcccatgatctccttcaattgctactaataaactactcctataatagaatcagttacctcagttgctcgtatagggcatgttctccaagctactccgtccccagtccccaccatttcaaattgcaaataaaactgcaatctcgcagcggctgatggattagcaagcaggacaagagactgagatccatcctccagacacgcgcacgccaaggatcgcattcgccaagcaacgtcgggtcggcggcgcgggggcgatggagacgcggcggccgcggcgcggctggaacaaacgcttcgtcctcccgctcgcgctcctctgcctcgccgtgctgctccccggcgcgctgctcccgccgtccgcctcggcgtcgtcttcgtcgccggccgcgggaggtggcagcaggaaacgccggtgggttgggtttgactactatgtactggcgctgcagtggccgggcaccatctgccgcgagaccagcaactgctgcgacaccaatggctgctgccgatcacagcctctcaagtggttcacgattcatggtctttggccacagtataactatgggggctggccatcatgctgcagaccaaccagattcaacataaataagatcttaatgttgatgccgatactcgagaagtattggccgtccttgtactgtggttcttcttcaacctgctttggtggaagggggccattttgggtgcatgagtgggaaactcatgggacctgtgcttaccctgaaatacaggatgaatatgactacttctccacagcactgtatctctacagcaaatacaatgttacgaaagctctgagaaaagcacgtatccggcctacaagcggcagaaaatacgccgttggccatattgttgccgtcattgaatatgcgtttggggcaatgccgtcactcgtctgtaagaacggctcagttcaagaactcaggctctgcttccacaaggattatcagcctcgtgattgcacgcttgaggccggctctgcaccgaacggcagaagctactgccctcgctacatcacgttcccgtcgtacaaaccgtccgtggtggccaatactacggaggggatcaacaaccaatccaatggcgaggttccgagctacatgcgtacgtctgactctgagtagcgtccaggactccaggttctgtgggcctctgccgagccgagtttgtatcaaatatcaatagagcgagacgccacggcgtgcttgcaaaattaccggcccggtatggtcctgtataattctttcattcacagtatcgaatgactggccaccgcgcaccgggatttggaaatgaaatgtgaatgttaatgtatattatattcacttgactgtaccagattcgtgcacaggatagtttgacaacttcgtttttttccaaattattctcatttcctt

SEQ ID NO: 31130 - DNA, 1427 bp, Zea Mays
gtcaaatatgcaattccaacatttgaatcctccatgggagaggcaagaggaaagggcaacccaaaagacgatgcaaatgaaggtaacatttgtaggcgtcgtagcttggttttgcttcacgagcacaacaagccatccatctatgatctatcccgctccctccatccgcaagcaaaagctaatcgatcttcccatgatctccttcaattgctactaataaactactcctataatagaatcagttacctcagttgctcgtatagggcatgttctccaagctactccgtccccagtccccaccatttcaaattgcaaataaaactgcaatctcgcagcggctgatggattagcaagcaggacaagagactgagatccatcctccagacacgcgcacgccaaggatcgcattcgccaagcaacgtcgggtcggcggcgcgggggcgatggagacgcggcggccgcggcgcggctggaacaaacgcttcgtcctcccgctcgcgctcctctgcctcgccgtgctgctccccggcgcgctgctcccgccgtccgcctcggcgtcgtcttcgtcgccggccgcgggaggtggcagcaggaaacgccggtgggttgggtttgactactatgtactggcgctgcagtggccgggcaccatctgccgcgagaccagcaactgctgcgacaccaatggctgctgccgatcacagcctctcaagtggttcacgattcaaactcatgggacctgtgcttaccctgaaatacaggatgaatatgactacttctccacagcactgtatctctacagcaaatacaatgttacgaaagctctgagaaaagcacgtatccggcctacaagcggcagaaaatacgccgttggccatattgttgccgtcattgaatatgcgtttggggcaatgccgtcactcgtctgtaagaacggctcagttcaagaactcaggctctgcttccacaaggattatcagcctcgtgattgcacgcttgaggccggctctgcaccgaacggcagaagctactgccctcgctacatcacgttcccgtcgtacaaaccgtccgtggtggccaatactacggaggggatcaacaaccaatccaatggcgaggttccgagctacatgcgtacgtctgactctgagtagcgtccaggactccaggttctgtgggcctctgccgagccgagtttgtatcaaatatcaatagagcgagacgccacggcgtgcttgcaaaattaccggcccggtatggtcctgtataattctttcattcacagtatcgaatgactggccaccgcgcaccgggatttggaaatgaaatgtgaatgttaatgtatattatattcacttgactgtaccagattcgtgcacaggatagtttgacaacttcgtttttttccaaattattctcatttcctt

SEQ ID NO: 31131 - DNA, 1666 bp, Zea Mays
caaatatgcaattccaacatttgaatcctccatgggagaggcaagaggaaagggcaacccaaaagacgatgcaaatgaaggtaacatttgtaggcgtcgtagcttggttttgcttcacgagcacaacaagccatccatctatgatctatcccgctccctccatccgcaagcaaaagctaatcgatcttcccatgatctccttcaattgctactaataaactactcctataatagaatcagttacctcagttgctcgtatagggcatgttctccaagctactccgtccccagtccccaccatttcaaattgcaaataaaactgcaatctcgcagcggctgatggattagcaagcaggacaagagactgagatccatcctccagacacgcgcacgccaaggatcgcattcgccaagcaacgtcgggtcggcggcgcgggggcgatggagacgcggcggccgcggcgcggctggaacaaacgcttcgtcctcccgctcgcgctcctctgcctcgccgtgctgctccccggcgcgctgctcccgccgtccgcctcggcgtcgtcttcgtcgccggccgcgggaggtggcagcaggaaacgccggtgggttgggtttgactactatgtactggcgctgcagtggccgggcaccatctgccgcgagaccagcaactgctgcgacaccaatggctgctgccgatcacagcctctcaagtggttcacgattcatggtctttggccacagtataactatgggggctggccatcatgctgcagaccaaccagattcaacataaataagatcttaatgttgatgccgatactcgagaagtattggccgtccttgtactgtggttcttcttcaacctgctttggtggaagggggccattttgggtgcatgagtggggtatgcagtttctgaacttgctgggcacgaataacgttctgttctgttacctcttaattggaaactcatgggacctgtgcttaccctgaaatacaggatgaatatgactacttctccacagcactgtatctctacagcaaatacaatgttacgaaagctctgagaaaagcacgtatccggcctacaagcggcagaaaatacgccgttggccatattgttgccgtcattgaatatgcgtttggggcaatgccgtcactcgtctgtaagaacggctcagttcaagaactcaggctctgcttccacaaggattatcagcctcgtgattgcacgcttgaggccggctctgcaccgaacggcagaagctactgccctcgctacatcacgttcccgtcgtacaaaccgtccgtggtggccaatactacggaggggatcaacaaccaatccaatggcgaggttccgagctacatgcgtacgtctgactctgagtagcgtccaggactccaggttctgtgggcctctgccgagccgagtttgtatcaaatatcaatagagcgagacgccacggcgtgcttgcaaaattaccggcccggtatggtcctgtataattctttcattcacagtatcgaatgactggccaccgcgcaccgggatttggaaatgaaatgtgaatgttaatgtatattatattcacttgactgtaccagattcgtgcacaggatagtttgacaacttcgtttttttccaaattattctcatttcctt

SEQ ID NO: 31132 - DNA, 1398 bp, Zea Mays
aagaggaaagggcaacccaaaagacgatgcaaatgaaggtaacatttgtaggcgtcgtagcttggttttgcttcacgagcacaacaagccatccatctatgatctatcccgctccctccatccgcaagcaaaagctaatcgatcttcccatgatctccttcaattgctactaataaactactcctataatagaatcagttacctcagttgctcgtatagggcatgttctccaagctactccgtccccagtccccaccatttcaaattgcaaataaaactgcaatctcgcagcggctgatggattagcaagcaggacaagagactgagatccatcctccagacacgcgcacgccaaggatcgcattcgccaagcaacgtcgggtcggcggcgcgggggcgatggagacgcggcggccgcggcgcggctggaacaaacgcttcgtcctcccgctcgcgctcctctgcctcgccgtgctgctccccggcgcgctgctcccgccgtccgcctcggcgtcgtcttcgtcgccggccgcgggaggtggcagcaggaaacgccggtgggttgggtttgactactatgtactggcgctgcagtggccgggcaccatctgccgcgagaccagcaactgctgcgacaccaatggctgctgccgatcacagcctctcaagtggttcacgattcaaactcatgggacctgtgcttaccctgaaatacaggatgaatatgactacttctccacagcactgtatctctacagcaaatacaatgttacgcattttgtcttacagaaagctctgagaaaagcacgtatccggcctacaagcggcagaaaatacgccgttggccatattgttgccgtcattgaatatgcgtttggggcaatgccgtcactcgtctgtaagaacggctcagttcaagaactcaggctctgcttccacaaggattatcagcctcgtgattgcacgcttgaggccggctctgcaccgaacggcagaagctactgccctcgctacatcacgttcccgtcgtacaaaccgtccgtggtggccaatactacggaggggatcaacaaccaatccaatggcgaggttccgagctacatgcgtacgtctgactctgagtagcgtccaggactccaggttctgtgggcctctgccgagccgagtttgtatcaaatatcaatagagcgagacgccacggcgtgcttgcaaaattaccggcccggtatggtcctgtataattctttcattcacagtatcgaatgactggccaccgcgcaccgggatttggaaatgaaatgtgaatgttaatgtatattatattcacttgactgtaccagattcgtgcacaggatagtttgacaacttcgtttttttccaaattattctcatttcctt

SEQ ID NO: 31133 - DNA, 1443 bp, Zea Mays
caacaagccatccatctatgatctatcccgctccctccatccgcaagcaaaagctaatcgatcttcccatgatctccttcaattgctactaataaactactcctataatagaatcagttacctcagttgctcgtatagggcatgttctccaagctactccgtccccagtccccaccatttcaaattgcaaataaaactgcaatctcgcagcggctgatggattagcaagcaggacaagagactgagatccatcctccagacacgcgcacgccaaggatcgcattcgccaagcaacgtcgggtcggcggcgcgggggcgatggagacgcggcggccgcggcgcggctggaacaaacgcttcgtcctcccgctcgcgctcctctgcctcgccgtgctgctccccggcgcgctgctcccgccgtccgcctcggcgtcgtcttcgtcgccggccgcgggaggtggcagcaggaaacgccggtgggttgggtttgactactatgtactggcgctgcagtggccgggcaccatctgccgcgagaccagcaactgctgcgacaccaatggctgctgccgatcacagcctctcaagtggttcacgattcatggtctttggccacagtataactatgggggctggccatcatgctgcagaccaaccagattcaacataaataagatcttaatgttgatgccgatactcgagaagtattggccgtccttgtactgtggttcttcttcaacctgctttggtggaagggggccattttgggtgcatgaggatgaatatgactacttctccacagcactgtatctctacagcaaatacaatgttacgaaagctctgagaaaagcacgtatccggcctacaagcggcagaaaatacgccgttggccatattgttgccgtcattgaatatgcgtttggggcaatgccgtcactcgtctgtaagaacggctcagttcaagaactcaggctctgcttccacaaggattatcagcctcgtgattgcacgcttgaggccggctctgcaccgaacggcagaagctactgccctcgctacatcacgttcccgtcgtacaaaccgtccgtggtggccaatactacggaggggatcaacaaccaatccaatggcgaggttccgagctacatgcgtacgtctgactctgagtagcgtccaggactccaggttctgtgggcctctgccgagccgagtttgtatcaaatatcaatagagcgagacgccacggcgtgcttgcaaaattaccggcccggtatggtcctgtataattctttcattcacagtatcgaatgactggccaccgcgcaccgggatttggaaatgaaatgtgaatgttaatgtatattatattcacttgactgtaccagattcgtgcacaggatagtttgacaacttcgtttttttccaaattattctcatttcctt

SEQ ID NO: 31134 - DNA, 749 bp, Zea Mays
gttttctgctcaattcgcctgttgctcatcttcagtgggagaaacatggaacctgctctgcccctgtggttcaggatgaattacagtatttcacccttgcccttgacctctacttcaagtataacgttacggaaatgctgtcaagtggatggatacaggtttcaaatggtaaggaatatgcactgagcgatgtcatcgataccatcaaacatgcttttgggggatcaccacaaattgtttgcaagaggggttcaatcgaagaacttaggttatgcttcgacaaagaattgaagcctcgtgattgccttaccacttctttggcgaatggaagtgtatcaaaaagcaagcactgcccgcggtacatcaccttgccaacgtatgatccccttgtgcttgccaattcaactgtagagatcatgacacagttcgatgaatttgaggtgcctgcagctctttatacagcctaaaatgcaattgttgcaatagcagaaggtgctcgcgtgagcacctagaaccaggcacatttatcctgggatattcaatcatttgtacatgtacacttgaaagagaactgacatcttttcaacctgaaaatttataagctttatgtaaccgtgaaggtcggatattgcacatgtaattcgctaaatcaaaactgtatcttgaggtagaattttcaagtagtaataatagagatataagaaacttatcgcccatcatgtctgtcattaatcatgattcatggatta

SEQ ID NO: 31135 - DNA, 714 bp, Zea Mays
attcgcctgttgctcatcttcagtgggagaaacatggaacctgctctgcccctgtggttcaggatgaattacagtatttcacccttgcccttgacctctacttcaagtataacgttacggaaatgctgtcaagtggatggatacaggtttcaaatggtaaggaatatgcactgagcgatgtcatcgataccatcaaacatgcttttgggggatcaccacaaattgtttgcaagaggggttcaatcgaagaacttaggttatgcttcgacaaagaattgaagcctcgtgattgccttaccacttctttggcgaatggaagtgtatcaaaaagcaagcactgcccgcggtacatcaccttgccaacgtatgatccccttgatcatgacacagttcgatgaatttgaggtgcctgcagctctttatacagcctaaaatgcaattgttgcaatagcagaaggtgctcgcgtgagcacctagaaccaggcacatttatcctgggatattcaatcatttgtacatgtacacttgaaagagaactgacatcttttcaacctgaaaatttataagctttatgtaaccgtgaaggtcggatattgcacatgtaattcgctaaatcaaaactgtatcttgaggtagaattttcaagtagtaataatagagatataagaaacttatcgcccatcatgtctgtcattaatcatgattcatggatta

SEQ ID NO: 31136 - DNA, 2205 bp, Zea Mays
cgaatctcggtcggtcccagactgcaagtgccaaatgctttcccatctcctcccgcgccaccatcaccgccgcctcctccaaatcctgtccagggccgccgccgccccagatgttgacctccaccagaggctgtgctcttcgtctgcagcgtcgagcacgagcctgtcgatatggtggcggaagaaggagatgggcaaggagggcctcatggcggtggcgctgctcaagcggctcgcagctctgcccccggtggggtgtcacccgcgcctggagcagttcatgcgttcgcacgtgtcgcagctcctccgtaccgacctcctcgccgagctcctccgccaggaccatgccagcctctcaatgaaggagcctgctcgcctgcttctctactgtgtggtggctgcgggcttctcgcgcggaccaggagctgaggcaccgagcaggcgcagggggccgggcaagcaagcagtgcagcaagcaggcgcagcgcaggcggccgggcaagcaagcagcgcaacaagcaggcgcatggggccaggggccacacgtgaccagcagccagcaagcagcgcagtcgcagcccggcagtctatgattgcagattgcagctgcagaagcgaacagatctgccaacctcggctctaatccacgacatctctgcttcgcgccgccgtccagcttcgtcctgccagccgacctcatccccgccggccgtcgccccagccacgacgcctggccgtacctgtatttctcatcccgcggtacaagccccagccgagacgcttgtagccttgtaccgtccccgagcagtttcaccaaatcccggtcggtcccagactgcaagtgccaaatgctttcccgtctcctcccgcgccaccatcaccgccgcctcctccaaaccctgtccagggccgccgccgccgccccagatgttgacctccaccagaggctgtgctcttcgtctgcagcgtcaagcccgagcctgtcgatatggcggcggaagaaggagatgggcaaggagggcctcatggtggtggcgcagctcaagcggctcgcggctctgcccccggcggggggtcacccgcgcctggagcagttcatgcgttcgcacgtgtcgcggctcctccgcaccgacctcctcgccgtcctcgccgagctcctccgccaggaccatgtcagcctctcaatgaagtagaagaatggacttacttgaaaggaacggtgtgcaaggtggcttgctgcgtggttttgaacttcgaattgcaaaatgggatcacaatagttttgacatatcaagaagcggaaaataggatcaataggagggctttttgtgatacacgcccgtggccaacggcggtgagaaccgcggcgtgagggtgctcggcggtgctcaccctctgaccaacttggaacacaagtttgtggagcagatatatggtgttgtgcggaaagaaatctggtaccgccctgacatgtacttctaccgtgacatgctatacatgctagcgaggaacaagaaaattaatgaaacaaggcaggtatgggcggatctcaagtctgaagacgtgctatttgatcagcacacttatggcgacattgtgagggccttctgtgatgctgatttgattgaccttgcaatggaaatctatgatgacatgaggagctcccccgaccctcctctatcattgccgttccgtgttatcctgaaagggttggttccataccctgaactgagggagaagataaagcaggattttctggagcttttcccagatatgattgtgtatgatccaccagataccttatctgatatagatgaagaattcaagttttgatgaatgtacgccttcatccggattcagtgcttctgagttacattccctgcactgcaggcaaacctccatttctcgttcttttggtgggctagatcaattgtaaatgtagctgtctcgatctgcccagtagctgtggtaccaccaattttaacctcttgatgaaccatttttgttaatctatgctttggagaattgtctgcttccgtctgtgtctcgtcctactttgaatcaccttgttctgaagtttggtactgctgctgtgcactgagatttgtgttccgttgatccctgctatataatcatttgtacacttcaaagagaatcatttgtaggtcttagttagcctttaaggtcacataaaactgatccagg

SEQ ID NO: 31137 - DNA, 806 bp, Zea Mays
agacgctcctatgctatcaccattttagaatatatggtgttgtgcggaaagaaatctggtaccgccctgacatgtacttctaccgtgacatgctatacatgctagcgaggaacaagaaaattaatgaaacaaggcaggtatgggcggatctcaagtctgaagacgtgctatttgatcagcacacttatggcgacattgtgagggccttctgtgatgctgatttgattgaccttgcaatggaaatctatgatgacatgaggagctcccccgaccctcctctatcattgccgttccgtgttatcctgaaagggttggttccataccctgaactgagggagaagataaagcaggattttctggagcttttcccagatatgattgtgtatgatccaccagataccttatctgatatagatgaagaattcaagttttgatgaatgtacgccttcatccggattcagtgcttctgagttacattccctgcactgcaggcaaacctccatttctcgttcttttggtgggctagatcaattgtaaatgtagctgtctcgatctgcccagtagctgtggtaccaccaattttaacctcttgatgaaccatttttgttaatctatgctttggagaattgtctgcttccgtctgtgtctcgtcctactttgaatcaccttgttctgaagtttggtactgctgctgtgcactgagatttgtgttccgttgatccctgctatataatcatttgtacacttcaaagagaatcatttgtaggtcttagttagcctttaaggtcacataaaactgatccagg

SEQ ID NO: 31138 - DNA, 3329 bp, Zea Mays
cacatattcggagcgaaccctatggcccacttgtcggccatgtaactcggctgtttcgcacaggcacggcactcgttggaaacttggaatgccctatcagatcgcatcgcacccaaaaatcaagagcctgctggattcaaacggctgattcaaacgaccagagtccggacactcacactcccctgctgcgcctgccgcctgcgtttcggccaccgcactacttccccaatccccttgatatcgcccacccgcgctcgccgccgccgctgggcggcgatggaaaccctaatggtagaccgcgtccacagtagcctccgcctcttcatgtaccgcaacgccatattcctctgcgagcgcctctgcgcacagttcccctccgagaccaatgtgcaattgctagcaacctgctacctacacaacaatcagccatatgctgcatatcacgttttgaaagggaagaagctgccggagtcccggtacttgtttgctacatcatgctttcgaatgaacctcttgcgtgaagcagaagaaattctatgtccagtcaatgagccaaacatggaggttccaagtggagcaacaggacactacctccttggagtgatctacaggtgcacaggcagaatttcagctgcagctgaacaatttacacaagcgttgactctagatcctcttttatgggcggcatatgaggaattgtgtatattaggtattgccgaagataccgatgagtgttttagtgaatcgactgctctacgtctccagcaggaacacacatccacgtccactttggtgaagtcgaactttgccaatgaaaatcgagttctatcatccagtgtctctgcaagttttggggatattattcctaagcaaatcaaacagcttcatgctaacaacataacagaagtatctggttatcctcatgtaagaccaaccgcattgcatgtgcagaacagttcaacttctaatgtatcacagtttgacaccccatcaccagctgcagcacagacttctatcatgccaccaccactatttaggaatgtacatgcttaccagaatacaataagtggcgatgctcccactaagcagaaagctaatggagtaagccagccactcagaaggaaatacatggatgaagcaaggctaaagaaggtttctggaaggttgtttaatagcgatgcaatgcctcgaagaagtcaaagacttaaagatacaacaacaaattcaaatacatctcaaattggaggaaatggaacagatcatttgtcaggtaaattgcgagtaaactcgtccacacaatcaaaattgtgttcaacagccatacgttctgtgcaagttaggaaaggaaaaccacgggctacagaaaattttgatgaaggaacttcatcttctgtaagtacagctgatggaagatcctttgagcaagatagagctgaacgaattctgttgcaagactccaaagtggcacttggtattagggagctattgggacttttccgaacactgggggaaggttttaggctttcttgcttgtttaagtgccaggaagcactggaagtctacagaaaactccctgagtcgcagtttaacactggatgggttctatgccaggttggtaaggcatattttgaattagttgattatttggaagctgatcattattttgagctggcacaccgactatcgccttgtacgcttgatggaatggacatctattctactgttctttatcatctgaatgaggaaatgagactaagctaccttgctcaagagcttatttccattgatcgactatctcctcaagcatggtgtgcagtgggcaattgctttgccttgagaaaagatcatgagactgctttgaagaattttcaacgttcggtacagcttgactcaagatttgcatatgctcacactctatgtggtcatgagtattctgcactggaggattatgagaatagtatcaaattctacagatgtgcactgcaggtagatgaaaggcactacaatgcttggtatggccttggggtggtgtatcttcgccaggaaaagtttgagtttgctgagcatcatttcagaagggcatttcagataaatcctcgctcttctgttctcatgtgctatcttgggatggccttgcattctcttaaggttgatatcattgatcgacaacaatagactactccctctgattccaaatataggttgttgtagtctaaaaattacttacacatggaatccgatggagtacttctccatttctgttttccccttcgaaatcttaagttgacaacgattaaatgaaccttctgtctggattcaaacttgtcagaggaatgaagaggcactggaaatgatggagaaagctatagcagctgataagaagaatccactgcccaagtatcagaagtccttaatccttctaggactaatgaagtatgaagaagctctggatgagttggagcggctaaaggagattgcaccccatgagagtagtatgtatgcactgatgggaaagatttacaagcaactcaatattcttgacaaagctgttttctgcttcggcattgccctggatttgaaaccacctgctgctgatcttgctataattaagtccgcaatggagaaagtacatctccctgatgaactgatggaggatgacctataagttcactcaagcatcgtgagaaatgaacatttacttcgggttcatgatgacccgcctgtgcttcgtgttcctggcctagtggcctgcttgggcttctcaagtggaactcggaagtcggagctgtaccattagccatccagtttggaatgaaaagaaaaaaaaattaaccatccagttttgtagatttagttttagcctgtaatcagagaacacatgcgcagaagctgcggtagtttaggactctgtacaagtgttggcgaaatgacgcctgtaccattatcaaataacggaaataattaaaggatgaggatccagctgattcaagcagattgtttgtcgcatctacaaaccttttaaaggtgtcacattcaaaggttgaaaacatttcagcccaagtaaatcgatttgaagaagagcggaggaaaagaggatgcttccgcgagtcagcctcctactaactactggcttggaggtgggggataaagctaggctcttcatgcaagcaaagtgtaaccatccgttttcttgctagtagcctgtatcattgctgcatatcctggcatcattaagaaaccatccaaaggagagtgtcagtgatgagcaatttctggaaaagttttactttgcattatgcgatgtgatatatatattttatttacatggt

SEQ ID NO: 31139 - DNA, 3106 bp, Zea Mays
aactcggctgtttcgcacaggcacggcactcgttggaaacttggaatgccctatcagatcgcatcgcacccaaaaatcaagagcctgctggattcaaacggctgattcaaacgaccagagtccggacactcacactcccctgctgcgcctgccgcctgcgtttcggccaccgcactacttccccaatccccttgatatcgcccacccgcgctcgccgccgccgctgggcggcgatggaaaccctaatggtagaccgcgtccacagtagcctccgcctcttcatgtaccgcaacgccatattcctctgcgagcgcctctgcgcacagttcccctccgagaccaatgtgcaattgctagcaacctgctacctacacaacaatcagccatatgctgcatatcacgttttgaaagggaagaagctgccggagtcccggtacttgtttgctacatcatgctttcgaatgaacctcttgcgtgaagcagaagaaattctatgtccagtcaatgagccaaacatggaggttccaagtggagcaacaggacactacctccttggagtgatctacaggtgcacaggcagaatttcagctgcagctgaacaatttacacaagcgttgactctagatcctcttttatgggcggcatatgaggaattgtgtatattaggtattgccgaagataccgatgagtgttttagtgaatcgactgctctacgtctccagcaggaacacacatccacgtccactttggtgaagtcgaactttgccaatgaaaatcgagttctatcatccagtgtctctgcaagttttggggatattattcctaagcaaatcaaacagcttcatgctaacaacataacagaagtatctggttatcctcatacttctatcatgccaccaccactatttaggaatgtacatgcttaccagaatacaataagtggcgatgctcccactaagcagaaagctaatggagtaagccagccactcagaaggaaatacatggatgaagcaaggctaaagaaggtttctggaaggttgtttaatagcgatgcaatgcctcgaagaagtcaaagacttaaagatacaacaacaaattcaaatacatctcaaattggaggaaatggaacagatcatttgtcagacaatatgtcaggaacttcatcttctgtaagtacagctgatggaagatcctttgagcaagatagagctgaacgaattctgttgcaagactccaaagtggcacttggtattagggagctattgggacttttccgaacactgggggaaggttttaggctttcttgcttgtttaagtgccaggaagcactggaagtctacagaaaactccctgagtcgcagtttaacactggatgggttctatgccaggttggtaaggcatattttgaattagttgattatttggaagctgatcattattttgagctggcacaccgactatcgccttgtacgcttgatggaatggacatctattctactgttctttatcatctgaatgaggaaatgagactaagctaccttgctcaagagcttatttccattgatcgactatctcctcaagcatggtgtgcagtgggcaattgctttgccttgagaaaagatcatgagactgctttgaagaattttcaacgttcggtacagcttgactcaagatttgcatatgctcacactctatgtggtcatgagtattctgcactggaggattatgagaatagtatcaaattctacagatgtgcactgcaggtagatgaaaggcactacaatgcttggtatggccttggggtggtgtatcttcgccaggaaaagtttgagtttgctgagcatcatttcagaagggcatttcagataaatcctcgctcttctgttctcatgtgctatcttgggatggccttgcattctcttaaggttgatatcattgatcgacaacaatagactactccctctgattccaaatataggttgttgtagtctaaaaattacttacacatggaatccgatggagtacttctccatttctgttttccccttcgaaatcttaagttgacaacgattaaatgaaccttctgtctggattcaaacttgtcagaggaatgaagaggcactggaaatgatggagaaagctatagcagctgataagaagaatccactgcccaagtatcagaagtccttaatccttctaggactaatgaagtatgaagaagctctggatgagttggagcggctaaaggagattgcaccccatgagagtagtatgtatgcactgatgggaaagatttacaagcaactcaatattcttgacaaagctgttttctgcttcggcattgccctggatttgaaaccacctgctgctgatcttgctataattaagtccgcaatggagaaagtacatctccctgatgaactgatggaggatgacctataagttcactcaagcatcgtgagaaatgaacatttacttcgggttcatgatgacccgcctgtgcttcgtgttcctggcctagtggcctgcttgggcttctcaagtggaactcggaagtcggagctgtaccattagccatccagtttggaatgaaaagaaaaaaaaattaaccatccagttttgtagatttagttttagcctgtaatcagagaacacatgcgcagaagctgcggtagtttaggactctgtacaagtgttggcgaaatgacgcctgtaccattatcaaataacggaaataattaaaggatgaggatccagctgattcaagcagattgtttgtcgcatctacaaaccttttaaaggtgtcacattcaaaggttgaaaacatttcagcccaagtaaatcgatttgaagaagagcggaggaaaagaggatgcttccgcgagtcagcctcctactaactactggcttggaggtgggggataaagctaggctcttcatgcaagcaaagtgtaaccatccgttttcttgctagtagcctgtatcattgctgcatatcctggcatcattaagaaaccatccaaaggagagtgtcagtgatgagcaatttctggaaaagttttactttgcattatgcgatgtgatatatatattttatttacatggt

SEQ ID NO: 31140 - DNA, 3151 bp, Zea Mays
ctcggctgtttcgcacaggcacggcactcgttggaaacttggaatgccctatcagatcgcatcgcacccaaaaatcaagagcctgctggattcaaacggctgattcaaacgaccagagtccggacactcacactcccctgctgcgcctgccgcctgcgtttcggccaccgcactacttccccaatccccttgatatcgcccacccgcgctcgccgccgccgctgggcggcgatggaaaccctaatggtagaccgcgtccacagtagcctccgcctcttcatgtaccgcaacgccatattcctctgcgagcgcctctgcgcacagttcccctccgagaccaatgtgcaattgctagcaacctgctacctacacaacaatcagccatatgctgcatatcacgttttgaaagggaagaagctgccggagtcccggtacttgtttgctacatcatgctttcgaatgaacctcttgcgtgaagcagaagaaattctatgtccagtcaatgagccaaacatggaggttccaagtggagcaacaggacactacctccttggagtgatctacaggtgcacaggcagaatttcagctgcagctgaacaatttacacaagcgttgactctagatcctcttttatgggcggcatatgaggaattgtgtatattaggtattgccgaagataccgatgagtgttttagtgaatcgactgctctacgtctccagcaggaacacacatccacgtccactttggtgaagtcgaactttgccaatgaaaatcgagttctatcatccagtgtctctgcaagttttggggatattattcctaagcaaatcaaacagcttcatgctaacaacataacagaagtatctggttatcctcatgtaagaccaaccgcattgcatgtgcagaacagttcaacttctaatgtatcacagtttgacaccccatcaccagctgcagcacagacttctatcatgccaccaccactatttaggaatgtacatgcttaccagaatacaataagtggcgatgctcccactaagcagaaagctaatggagtaagccagccactcagaaggaaatacatggatgaagcaaggctaaagaaggtttctggaaggttgtttaatagcgatgcaatgcctcgaagaagtcaaagacttaaagatacaacaacaaattcaaatacatctcaaattggaggaaatggaacagatcatttgtcaggtaaattgcgagtaaactcgtccacacaatcaaaattgtgttcaacagccatacgttctgtgcaagttaggaaaggaaaaccacgggctacagaaaattttgatgaaggaagtagatatgaagtcattgatgaaatgtggacagacaatatgtcaggaacttcatcttctgtaagtacagctgatggaagatcctttgagcaagatagagctgaacgaattctgttgcaagactccaaagtggcacttggtattagggagctattgggacttttccgaacactgggggaaggttttaggctttcttgcttgtttaagtgccaggaagcactggaagtctacagaaaactccctgagtcgcagtttaacactggatgggttctatgccaggttggtaaggcatattttgaattagttgattatttggaagctgatcattattttgagctggcacaccgactatcgccttgtacgcttgatggaatggacatctattctactgttctttatcatctgaatgaggaaatgagactaagctaccttgctcaagagcttatttccattgatcgactatctcctcaagcatggtgtgcagtgggcaattgctttgccttgagaaaagatcatgagactgctttgaagaattttcaacgttcggtacagcttgactcaagatttgcatatgctcacactctatgtggtcatgagtattctgcactggaggattatgagaatagtatcaaattctacagatgtgcactgcaggtagatgaaaggcactacaatgcttggtatggccttggggtggtgtatcttcgccaggaaaagtttgagtttgctgagcatcatttcagaagggcatttcagataaatcctcgctcttctgttctcatgtgctatcttgggatggccttgcattctcttaagaggaatgaagaggcactggaaatgatggagaaagctatagcagctgataagaagaatccactgcccaagtatcagaagtccttaatccttctaggactaatgaagtatgaagaagctctggatgagttggagcggctaaaggagattgcaccccatgagagtagtatgtatgcactgatgggaaagatttacaagcaactcaatattcttgacaaagctgttttctgcttcggcattgccctggatttgaaaccacctgctgctgatcttgctataattaagtccgcaatggagaaagtacatctccctgatgaactgatggaggatgacctataagttcactcaagcatcgtgagaaatgaacatttacttcgggttcatgatgacccgcctgtgcttcgtgttcctggcctagtggcctgcttgggcttctcaagtggaactcggaagtcggagctgtaccattagccatccagtttggaatgaaaagaaaaaaaaattaaccatccagttttgtagatttagttttagcctgtaatcagagaacacatgcgcagaagctgcggtagtttaggactctgtacaagtgttggcgaaatgacgcctgtaccattatcaaataacggaaataattaaaggatgaggatccagctgattcaagcagattgtttgtcgcatctacaaaccttttaaaggtgtcacattcaaaggttgaaaacatttcagcccaagtaaatcgatttgaagaagagcggaggaaaagaggatgcttccgcgagtcagcctcctactaactactggcttggaggtgggggataaagctaggctcttcatgcaagcaaagtgtaaccatccgttttcttgctagtagcctgtatcattgctgcatatcctggcatcattaagaaaccatccaaaggagagtgtcagtgatgagcaatttctggaaaagttttactttgcattatgcgatgtgatatatatattttatttacatggt

SEQ ID NO: 31141 - DNA, 3100 bp, Zea Mays
caggcacggcactcgttggaaacttggaatgccctatcagatcgcatcgcacccaaaaatcaagagcctgctggattcaaacggctgattcaaacgaccagagtccggacactcacactcccctgctgcgcctgccgcctgcgtttcggccaccgcactacttccccaatccccttgatatcgcccacccgcgctcgccgccgccgctgggcggcgatggaaaccctaatggtagaccgcgtccacagtagcctccgcctcttcatgtaccgcaacgccatattcctctgcgagcgcctctgcgcacagttcccctccgagaccaatgtgcaattgctagcaacctgctacctacacaacaatcagccatatgctgcatatcacgttttgaaagggaagaagctgccggagtcccggtacttgtttgctacatcatgctttcgaatgaacctcttgcgtgaagcagaagaaattctatgtccagtcaatgagccaaacatggaggttccaagtggagcaacaggacactacctccttggagtgatctacaggtgcacaggcagaatttcagctgcagctgaacaatttacacaagcgttgactctagatcctcttttatgggcggcatatgaggaattgtgtatattaggtattgccgaagataccgatgagtgttttagtgaatcgactgctctacgtctccagcaggaacacacatccacgtccactttggtgaagtcgaactttgccaatgaaaatcgagttctatcatccagtgtctctgcaagttttggggatattattcctaagcaaatcaaacagcttcatgctaacaacataacagaagtatctggttatcctcatgtaagaccaaccgcattgcatgtgcagaacagttcaacttctaatgtatcacagtttgacaccccatcaccagctgcagcacagacttctatcatgccaccaccactatttaggaatgtacatgcttaccagaatacaataagtggcgatgctcccactaagcagaaagctaatggagtaagccagccactcagaaggaaatacatggatgaagcaaggctaaagaaggtttctggaaggttgtttaatagcgatgcaatgcctcgaagaagtcaaagacttaaagatacaacaacaaattcaaatacatctcaaattggaggaaatggaacagatcatttgtcaggtaaattgcgagtaaactcgtccacacaatcaaaattgtgttcaacagccatacgttctgtgcaagttaggaaaggaaaaccacgggctacagaaaattttgatgaagacaatatgtcaggaacttcatcttctgtaagtacagctgatggaagatcctttgagcaagatagagctgaacgaattctgttgcaagactccaaagtggcacttggtattagggagctattgggacttttccgaacactgggggaaggttttaggctttcttgcttgtttaagtgccaggaagcactggaagtctacagaaaactccctgagtcgcagtttaacactggatgggttctatgccaggttggtaaggcatattttgaattagttgattatttggaagctgatcattattttgagctggcacaccgactatcgccttgtacgcttgatggaatggacatctattctactgttctttatcatctgaatgaggaaatgagactaagctaccttgctcaagagcttatttccattgatcgactatctcctcaagcatggtgtgcagtgggcaattgctttgccttgagaaaagatcatgagactgctttgaagaattttcaacgttcggtacagcttgactcaagatttgcatatgctcacactctatgtggtcatgagtattctgcactggaggattatgagaatagtatcaaattctacagatgtgcactgcaggtagatgaaaggcactacaatgcttggtatggccttggggtggtgtatcttcgccaggaaaagtttgagtttgctgagcatcatttcagaagggcatttcagataaatcctcgctcttctgttctcatgtgctatcttgggatggccttgcattctcttaagaggaatgaagaggcactggaaatgatggagaaagctatagcagctgataagaagaatccactgcccaagtatcagaagtccttaatccttctaggactaatgaagtatgaagaagctctggatgagttggagcggctaaaggagattgcaccccatgagagtagtatgtatgcactgatgggaaagatttacaagcaactcaatattcttgacaaagctgttttctgcttcggcattgccctggatttgaaaccacctgctgctgatcttgctataattaagtccgcaatggagaaagtacatctccctgatgaactgatggaggatgacctataagttcactcaagcatcgtgagaaatgaacatttacttcgggttcatgatgacccgcctgtgcttcgtgttcctggcctagtggcctgcttgggcttctcaagtggaactcggaagtcggagctgtaccattagccatccagtttggaatgaaaagaaaaaaaaattaaccatccagttttgtagatttagttttagcctgtaatcagagaacacatgcgcagaagctgcggtagtttaggactctgtacaagtgttggcgaaatgacgcctgtaccattatcaaataacggaaataattaaaggatgaggatccagctgattcaagcagattgtttgtcgcatctacaaaccttttaaaggtgtcacattcaaaggttgaaaacatttcagcccaagtaaatcgatttgaagaagagcggaggaaaagaggatgcttccgcgagtcagcctcctactaactactggcttggaggtgggggataaagctaggctcttcatgcaagcaaagtgtaaccatccgttttcttgctagtagcctgtatcattgctgcatatcctggcatcattaagaaaccatccaaaggagagtgtcagtgatgagcaatttctggaaaagttttactttgcattatgcgatgtgatatatatattttatttacatggt

SEQ ID NO: 31142 - DNA, 3029 bp, Zea Mays
atcagatcgcatcgcacccaaaaatcaagagcctgctggattcaaacggctgattcaaacgaccagagtccggacactcacactcccctgctgcgcctgccgcctgcgtttcggccaccgcactacttccccaatccccttgatatcgcccacccgcgctcgccgccgccgctgggcggcgatggaaaccctaatggtagaccgcgtccacagtagcctccgcctcttcatgtaccgcaacgccatattcctctgcgagcgcctctgcgcacagttcccctccgagaccaatgtgcaattgctagcaacctgctacctacacaacaatcagccatatgctgcatatcacgttttgaaagggaagaagctgccggagtcccggtacttgtttgctacatcatgctttcgaatgaacctcttgcgtgaagcagaagaaattctatgtccagtcaatgagccaaacatggaggttccaagtggagcaacaggacactacctccttggagtgatctacaggtgcacaggcagaatttcagctgcagctgaacaatttacacaagcgttgactctagatcctcttttatgggcggcatatgaggaattgtgtatattaggtattgccgaagataccgatgagtgttttagtgaatcgactgctctacgtctccagcaggaacacacatccacgtccactttggtgaagtcgaactttgccaatgaaaatcgagttctatcatccagtgtctctgcaagttttggggatattattcctaagcaaatcaaacagcttcatgctaacaacataacagaagtatctggttatcctcatgtaagaccaaccgcattgcatgtgcagaacagttcaacttctaatgtatcacagtttgacaccccatcaccagctgcagcacagacttctatcatgccaccaccactatttaggaatgtacatgcttaccagaatacaataagtggcgatgctcccactaagcagaaagctaatggagtaagccagccactcagaaggaaatacatggatgaagcaaggctaaagaaggtttctggaaggttgtttaatagcgatgcaatgcctcgaagaagtcaaagacttaaagatacaacaacaaattcaaatacatctcaaattggaggaaatggaacagatcatttgtcaggtaaattgcgagtaaactcgtccacacaatcaaaattgtgttcaacagccatacgttctgtgcaagttaggaaaggaaaaccacgggctacagaaaattttgatgaagctgatggaagatcctttgagcaagatagagctgaacgaattctgttgcaagactccaaagtggcacttggtattagggagctattgggacttttccgaacactgggggaaggttttaggctttcttgcttgtttaagtgccaggaagcactggaagtctacagaaaactccctgagtcgcagtttaacactggatgggttctatgccaggttggtaaggcatattttgaattagttgattatttggaagctgatcattattttgagctggcacaccgactatcgccttgtacgcttgatggaatggacatctattctactgttctttatcatctgaatgaggaaatgagactaagctaccttgctcaagagcttatttccattgatcgactatctcctcaagcatggtgtgcagtgggcaattgctttgccttgagaaaagatcatgagactgctttgaagaattttcaacgttcggtacagcttgactcaagatttgcatatgctcacactctatgtggtcatgagtattctgcactggaggattatgagaatagtatcaaattctacagatgtgcactgcaggtagatgaaaggcactacaatgcttggtatggccttggggtggtgtatcttcgccaggaaaagtttgagtttgctgagcatcatttcagaagggcatttcagataaatcctcgctcttctgttctcatgtgctatcttgggatggccttgcattctcttaagaggaatgaagaggcactggaaatgatggagaaagctatagcagctgataagaagaatccactgcccaagtatcagaagtccttaatccttctaggactaatgaagtatgaagaagctctggatgagttggagcggctaaaggagattgcaccccatgagagtagtatgtatgcactgatgggaaagatttacaagcaactcaatattcttgacaaagctgttttctgcttcggcattgccctggatttgaaaccacctgctgctgatcttgctataattaagtccgcaatggagaaagtacatctccctgatgaactgatggaggatgacctataagttcactcaagcatcgtgagaaatgaacatttacttcgggttcatgatgacccgcctgtgcttcgtgttcctggcctagtggcctgcttgggcttctcaagtggaactcggaagtcggagctgtaccattagccatccagtttggaatgaaaagaaaaaaaaattaaccatccagttttgtagatttagttttagcctgtaatcagagaacacatgcgcagaagctgcggtagtttaggactctgtacaagtgttggcgaaatgacgcctgtaccattatcaaataacggaaataattaaaggatgaggatccagctgattcaagcagattgtttgtcgcatctacaaaccttttaaaggtgtcacattcaaaggttgaaaacatttcagcccaagtaaatcgatttgaagaagagcggaggaaaagaggatgcttccgcgagtcagcctcctactaactactggcttggaggtgggggataaagctaggctcttcatgcaagcaaagtgtaaccatccgttttcttgctagtagcctgtatcattgctgcatatcctggcatcattaagaaaccatccaaaggagagtgtcagtgatgagcaatttctggaaaagttttactttgcattatgcgatgtgatatatatattttatttacatggt

SEQ ID NO: 31143 - DNA, 2957 bp, Zea Mays
atcgcacccaaaaatcaagagcctgctggattcaaacggctgattcaaacgaccagagtccggacactcacactcccctgctgcgcctgccgcctgcgtttcggccaccgcactacttccccaatccccttgatatcgcccacccgcgctcgccgccgccgctgggcggcgatggaaaccctaatggtagaccgcgtccacagtagcctccgcctcttcatgtaccgcaacgccatattcctctgcgagcgcctctgcgcacagttcccctccgagaccaatgtgcaattgctagcaacctgctacctacacaacaatcagccatatgctgcatatcacgttttgaaagggaagaagctgccggagtcccggtacttgtttgctacatcatgctttcgaatgaacctcttgcgtgaagcagaagaaattctatgtccagtcaatgagccaaacatggaggttccaagtggagcaacaggacactacctccttggagtgatctacaggtgcacaggcagaatttcagctgcagctgaacaatttacacaagcgttgactctagatcctcttttatgggcggcatatgaggaattgtgtatattaggtattgccgaagataccgatgagtgttttagtgaatcgactgctctacgtctccagcaggaacacacatccacgtccactttggtgaagtcgaactttgccaatgaaaatcgagttctatcatccagtgtctctgcaagttttggggatattattcctaagcaaatcaaacagcttcatgctaacaacataacagaagtatctggttatcctcatacttctatcatgccaccaccactatttaggaatgtacatgcttaccagaatacaataagtggcgatgctcccactaagcagaaagctaatggagtaagccagccactcagaaggaaatacatggatgaagcaaggctaaagaaggtttctggaaggttgtttaatagcgatgcaatgcctcgaagaagtcaaagacttaaagatacaacaacaaattcaaatacatctcaaattggaggaaatggaacagatcatttgtcaggtaaattgcgagtaaactcgtccacacaatcaaaattgtgttcaacagccatacgttctgtgcaagttaggaaaggaaaaccacgggctacagaaaattttgatgaaggaagtagatatgaagtcattgatgaaatgtggacagacaatatgtcaggaacttcatcttctgtaagtacagctgatggaagatcctttgagcaagatagagctgaacgaattctgttgcaagactccaaagtggcacttggtattagggagctattgggacttttccgaacactgggggaaggttttaggctttcttgcttgtttaagtgccaggaagcactggaagtctacagaaaactccctgagtcgcagtttaacactggatgggttctatgccaggttggtaaggcatattttgaattagttgattatttggaagctgatcattattttgagctggcacaccgactatcgccttgtacgcttgatggaatggacatctattctactgttctttatcatctgaatgaggaaatgagactaagctaccttgctcaagagcttatttccattgatcgactatctcctcaagcatggtgtgcagtgggcaattgctttgccttgagaaaagatcatgagactgctttgaagaattttcaacgttcggtattctgcactggaggattatgagaatagtatcaaattctacagatgtgcactgcaggtagatgaaaggcactacaatgcttggtatggccttggggtggtgtatcttcgccaggaaaagtttgagtttgctgagcatcatttcagaagggcatttcagataaatcctcgctcttctgttctcatgtgctatcttgggatggccttgcattctcttaagaggaatgaagaggcactggaaatgatggagaaagctatagcagctgataagaagaatccactgcccaagtatcagaagtccttaatccttctaggactaatgaagtatgaagaagctctggatgagttggagcggctaaaggagattgcaccccatgagagtagtatgtatgcactgatgggaaagatttacaagcaactcaatattcttgacaaagctgttttctgcttcggcattgccctggatttgaaaccacctgctgctgatcttgctataattaagtccgcaatggagaaagtacatctccctgatgaactgatggaggatgacctataagttcactcaagcatcgtgagaaatgaacatttacttcgggttcatgatgacccgcctgtgcttcgtgttcctggcctagtggcctgcttgggcttctcaagtggaactcggaagtcggagctgtaccattagccatccagtttggaatgaaaagaaaaaaaaattaaccatccagttttgtagatttagttttagcctgtaatcagagaacacatgcgcagaagctgcggtagtttaggactctgtacaagtgttggcgaaatgacgcctgtaccattatcaaataacggaaataattaaaggatgaggatccagctgattcaagcagattgtttgtcgcatctacaaaccttttaaaggtgtcacattcaaaggttgaaaacatttcagcccaagtaaatcgatttgaagaagagcggaggaaaagaggatgcttccgcgagtcagcctcctactaactactggcttggaggtgggggataaagctaggctcttcatgcaagcaaagtgtaaccatccgttttcttgctagtagcctgtatcattgctgcatatcctggcatcattaagaaaccatccaaaggagagtgtcagtgatgagcaatttctggaaaagttttactttgcattatgcgatgtgatatatatattttatttacatggt

SEQ ID NO: 31144 - DNA, 2897 bp, Zea Mays
cgcacccaaaaatcaagagcctgctggattcaaacggctgattcaaacgaccagagtccggacactcacactcccctgctgcgcctgccgcctgcgtttcggccaccgcactacttccccaatccccttgatatcgcccacccgcgctcgccgccgccgctgggcggcgatggaaaccctaatggtagaccgcgtccacagtagcctccgcctcttcatgtaccgcaacgccatattcctctgcgagcgcctctgcgcacagttcccctccgagaccaatgtgcaattgctagcaacctgctacctacacaacaatcagccatatgctgcatatcacgttttgaaagggaagaagctgccggagtcccggtacttgtttgctacatcatgctttcgaatgaacctcttgcgtgaagcagaagaaattctatgtccagtcaatgagccaaacatggaggttccaagtggagcaacaggacactacctccttggagtgatctacaggtgcacaggcagaatttcagctgcagctgaacaatttacacaagcgttgactctagatcctcttttatgggcggcatatgaggaattgtgtatattaggtattgccgaagataccgatgagtgttttagtgaatcgactgctctacgtctccagcaggaacacacatccacgtccactttggtgaagtcgaactttgccaatgaaaatcgagttctatcatccagtgtctctgcaagttttggggatattattcctaagcaaatcaaacagcttcatgctaacaacataacagaagtatctggttatcctcatacttctatcatgccaccaccactatttaggaatgtacatgcttaccagaatacaataagtggcgatgctcccactaagcagaaagctaatggagtaagccagccactcagaaggaaatacatggatgaagcaaggctaaagaaggtttctggaaggttgtttaatagcgatgcaatgcctcgaagaagtcaaagacttaaagatacaacaacaaattcaaatacatctcaaattggaggaaatggaacagatcatttgtcaggaagtagatatgaagtcattgatgaaatgtggacagacaatatgtcaggaacttcatcttctgtaagtacagctgatggaagatcctttgagcaagatagagctgaacgaattctgttgcaagactccaaagtggcacttggtattagggagctattgggacttttccgaacactgggggaaggttttaggctttcttgcttgtttaagtgccaggaagcactggaagtctacagaaaactccctgagtcgcagtttaacactggatgggttctatgccaggttggtaaggcatattttgaattagttgattatttggaagctgatcattattttgagctggcacaccgactatcgccttgtacgcttgatggaatggacatctattctactgttctttatcatctgaatgaggaaatgagactaagctaccttgctcaagagcttatttccattgatcgactatctcctcaagcatggtgtgcagtgggcaattgctttgccttgagaaaagatcatgagactgctttgaagaattttcaacgttcggtacagcttgactcaagatttgcatatgctcacactctatgtggtcatgagtattctgcactggaggattatgagaatagtatcaaattctacagatgtgcactgcaggtagatgaaaggcactacaatgcttggtatggccttggggtggtgtatcttcgccaggaaaagtttgagtttgctgagcatcatttcagaagggcatttcagataaatcctcgctcttctgttctcatgtgctatcttgggatggccttgcattctcttaagaggaatgaagaggcactggaaatgatggagaaagctatagcagctgataagaagaatccactgcccaagtatcagaagtccttaatccttctaggactaatgaagtatgaagaagctctggatgagttggagcggctaaaggagattgcaccccatgagagtagtatgtatgcactgatgggaaagatttacaagcaactcaatattcttgacaaagctgttttctgcttcggcattgccctggatttgaaaccacctgctgctgatcttgctataattaagtccgcaatggagaaagtacatctccctgatgaactgatggaggatgacctataagttcactcaagcatcgtgagaaatgaacatttacttcgggttcatgatgacccgcctgtgcttcgtgttcctggcctagtggcctgcttgggcttctcaagtggaactcggaagtcggagctgtaccattagccatccagtttggaatgaaaagaaaaaaaaattaaccatccagttttgtagatttagttttagcctgtaatcagagaacacatgcgcagaagctgcggtagtttaggactctgtacaagtgttggcgaaatgacgcctgtaccattatcaaataacggaaataattaaaggatgaggatccagctgattcaagcagattgtttgtcgcatctacaaaccttttaaaggtgtcacattcaaaggttgaaaacatttcagcccaagtaaatcgatttgaagaagagcggaggaaaagaggatgcttccgcgagtcagcctcctactaactactggcttggaggtgggggataaagctaggctcttcatgcaagcaaagtgtaaccatccgttttcttgctagtagcctgtatcattgctgcatatcctggcatcattaagaaaccatccaaaggagagtgtcagtgatgagcaatttctggaaaagttttactttgcattatgcgatgtgatatatatattttatttacatggt

SEQ ID NO: 31145 - DNA, 2903 bp, Zea Mays
caaaaatcaagagcctgctggattcaaacggctgattcaaacgaccagagtccggacactcacactcccctgctgcgcctgccgcctgcgtttcggccaccgcactacttccccaatccccttgatatcgcccacccgcgctcgccgccgccgctgggcggcgatggaaaccctaatggtagaccgcgtccacagtagcctccgcctcttcatgtaccgcaacgccatattcctctgcgagcgcctctgcgcacagttcccctccgagaccaatgtgcaattgctagcaacctgctacctacacaacaatcagccatatgctgcatatcacgttttgaaagggaagaagctgccggagtcccggtacttgtttgctacatcatgctttcgaatgaacctcttgcgtgaagcagaagaaattctatgtccagtcaatgagccaaacatggaggttccaagtggagcaacaggacactacctccttggagtgatctacaggtgcacaggcagaatttcagctgcagctgaacaatttacacaagcgttgactctagatcctcttttatgggcggcatatgaggaattgtgtatattaggtattgccgaagataccgatgagtgttttagtgaatcgactgctctacgtctccagcaggaacacacatccacgtccactttggtgaagtcgaactttgccaatgaaaatcgagttctatcatccagtgtctctgcaagttttggggatattattcctaagcaaatcaaacagcttcatgctaacaacataacagaagtatctggttatcctcatgtaagaccaaccgcattgcatgtgcagaacagttcaacttctaatgtatcacagtttgacaccccatcaccagctgcagcacagacttctatcatgccaccaccactatttaggaatgtacatgcttaccagaatacaataagtggcgatgctcccactaagcagaaagctaatggagtaagccagccactcagaaggaaatacatggatgaagcaaggctaaagaaggtttctggaaggttgtttaatagcgatgcaatgcctcgaagaagtcaaagacttaaagatacaacaacaaattcaaatacatctcaaattggaggaaatggaacagatcatttgtcagctgatggaagatcctttgagcaagatagagctgaacgaattctgttgcaagactccaaagtggcacttggtattagggagctattgggacttttccgaacactgggggaaggttttaggctttcttgcttgtttaagtgccaggaagcactggaagtctacagaaaactccctgagtcgcagtttaacactggatgggttctatgccaggttggtaaggcatattttgaattagttgattatttggaagctgatcattattttgagctggcacaccgactatcgccttgtacgcttgatggaatggacatctattctactgttctttatcatctgaatgaggaaatgagactaagctaccttgctcaagagcttatttccattgatcgactatctcctcaagcatggtgtgcagtgggcaattgctttgccttgagaaaagatcatgagactgctttgaagaattttcaacgttcggtacagcttgactcaagatttgcatatgctcacactctatgtggtcatgagtattctgcactggaggattatgagaatagtatcaaattctacagatgtgcactgcaggtagatgaaaggcactacaatgcttggtatggccttggggtggtgtatcttcgccaggaaaagtttgagtttgctgagcatcatttcagaagggcatttcagataaatcctcgctcttctgttctcatgtgctatcttgggatggccttgcattctcttaagaggaatgaagaggcactggaaatgatggagaaagctatagcagctgataagaagaatccactgcccaagtatcagaagtccttaatccttctaggactaatgaagtatgaagaagctctggatgagttggagcggctaaaggagattgcaccccatgagagtagtatgtatgcactgatgggaaagatttacaagcaactcaatattcttgacaaagctgttttctgcttcggcattgccctggatttgaaaccacctgctgctgatcttgctataattaagtccgcaatggagaaagtacatctccctgatgaactgatggaggatgacctataagttcactcaagcatcgtgagaaatgaacatttacttcgggttcatgatgacccgcctgtgcttcgtgttcctggcctagtggcctgcttgggcttctcaagtggaactcggaagtcggagctgtaccattagccatccagtttggaatgaaaagaaaaaaaaattaaccatccagttttgtagatttagttttagcctgtaatcagagaacacatgcgcagaagctgcggtagtttaggactctgtacaagtgttggcgaaatgacgcctgtaccattatcaaataacggaaataattaaaggatgaggatccagctgattcaagcagattgtttgtcgcatctacaaaccttttaaaggtgtcacattcaaaggttgaaaacatttcagcccaagtaaatcgatttgaagaagagcggaggaaaagaggatgcttccgcgagtcagcctcctactaactactggcttggaggtgggggataaagctaggctcttcatgcaagcaaagtgtaaccatccgttttcttgctagtagcctgtatcattgctgcatatcctggcatcattaagaaaccatccaaaggagagtgtcagtgatgagcaatttctggaaaagttttactttgcattatgcgatgtgatatatatattttatttacatggt

SEQ ID NO: 31146 - DNA, 3033 bp, Zea Mays
ggattcaaacggctgattcaaacgaccagagtccggacactcacactcccctgctgcgcctgccgcctgcgtttcggccaccgcactacttccccaatccccttgatatcgcccacccgcgctcgccgccgccgctgggcggcgatggaaaccctaatggtagaccgcgtccacagtagcctccgcctcttcatgtaccgcaacgccatattcctctgcgagcgcctctgcgcacagttcccctccgagaccaatgtgcaattgctagcaacctgctacctacacaacaatcagccatatgctgcatatcacgttttgaaagggaagaagctgccggagtcccggtacttgtttgctacatcatgctttcgaatgaacctcttgcgtgaagcagaagaaattctatgtccagtcaatgagccaaacatggaggttccaagtggagcaacaggacactacctccttggagtgatctacaggtgcacaggcagaatttcagctgcagctgaacaatttacacaagcgttgactctagatcctcttttatgggcggcatatgaggaattgtgtatattaggtattgccgaagataccgatgagtgttttagtgaatcgactgctctacgtctccagcaggaacacacatccacgtccactttggtgaagtcgaactttgccaatgaaaatcgagttctatcatccagtgtctctgcaagttttggggatattattcctaagcaaatcaaacagcttcatgctaacaacataacagaagtatctggttatcctcatacttctatcatgccaccaccactatttaggaatgtacatgcttaccagaatacaataagtggcgatgctcccactaagcagaaagctaatggagtaagccagccactcagaaggaaatacatggatgaagcaaggctaaagaaggtttctggaaggttgtttaatagcgatgcaatgcctcgaagaagtcaaagacttaaagatacaacaacaaattcaaatacatctcaaattggaggaaatggaacagatcatttgtcaggtaaattgcgagtaaactcgtccacacaatcaaaattgtgttcaacagccatacgttctgtgcaagttaggaaaggaaaaccacgggctacagaaaattttgatgaaggaagtagatatgaagtcattgatgaaatgtggacagacaatatgtcaggaacttcatcttctgtaagtacagctgatggaagatcctttgagcaagatagagctgaacgaattctgttgcaagactccaaagtggcacttggtattagggagctattgggacttttccgaacactgggggaaggttttaggctttcttgcttgtttaagtgccaggaagcactggaagtctacagaaaactccctgagtcgcagtttaacactggatgggttctatgccaggttggtaaggcatattttgaattagttgattatttggaagctgatcattattttgagctggcacaccgactatcgccttgtacgcttgatggaatggacatctattctactgttctttatcatctgaatgaggaaatgagactaagctaccttgctcaagagcttatttccattgatcgactatctcctcaagcatggtgtgcagtgggcaattgctttgccttgagaaaagatcatgagactgctttgaagaattttcaacgttcggtacagcttgactcaagatttgcatatgctcacactctatgtggtcatgagtattctgcactggaggattatgagaatagtatcaaattctacagatgtgcactgcaggtagatgaaaggcactacaatgcttggtatggccttggggtggtgtatcttcgccaggaaaagtttgagtttgctgagcatcatttcagaagggcatttcagataaatcctcgctcttctgttctcatgtgctatcttgggatggccttgcattctcttaaggttgatatcattgatcgacaacaatagactactccctctgattccaaatatagaggaatgaagaggcactggaaatgatggagaaagctatagcagctgataagaagaatccactgcccaagtatcagaagtccttaatccttctaggactaatgaagtatgaagaagctctggatgagttggagcggctaaaggagattgcaccccatgagagtagtatgtatgcactgatgggaaagatttacaagcaactcaatattcttgacaaagctgttttctgcttcggcattgccctggatttgaaaccacctgctgctgatcttgctataattaagtccgcaatggagaaagtacatctccctgatgaactgatggaggatgacctataagttcactcaagcatcgtgagaaatgaacatttacttcgggttcatgatgacccgcctgtgcttcgtgttcctggcctagtggcctgcttgggcttctcaagtggaactcggaagtcggagctgtaccattagccatccagtttggaatgaaaagaaaaaaaaattaaccatccagttttgtagatttagttttagcctgtaatcagagaacacatgcgcagaagctgcggtagtttaggactctgtacaagtgttggcgaaatgacgcctgtaccattatcaaataacggaaataattaaaggatgaggatccagctgattcaagcagattgtttgtcgcatctacaaaccttttaaaggtgtcacattcaaaggttgaaaacatttcagcccaagtaaatcgatttgaagaagagcggaggaaaagaggatgcttccgcgagtcagcctcctactaactactggcttggaggtgggggataaagctaggctcttcatgcaagcaaagtgtaaccatccgttttcttgctagtagcctgtatcattgctgcatatcctggcatcattaagaaaccatccaaaggagagtgtcagtgatgagcaatttctggaaaagttttactttgcattatgcgatgtgatatatatattttatttacatggt

SEQ ID NO: 31147 - DNA, 2922 bp, Zea Mays
aaacggctgattcaaacgaccagagtccggacactcacactcccctgctgcgcctgccgcctgcgtttcggccaccgcactacttccccaatccccttgatatcgcccacccgcgctcgccgccgccgctgggcggcgatggaaaccctaatggtagaccgcgtccacagtagcctccgcctcttcatgtaccgcaacgccatattcctctgcgagcgcctctgcgcacagttcccctccgagaccaatgtgcaattgctagcaacctgctacctacacaacaatcagccatatgctgcatatcacgttttgaaagggaagaagctgccggagtcccggtacttgtttgctacatcatgctttcgaatgaacctcttgcgtgaagcagaagaaattctatgtccagtcaatgagccaaacatggaggttccaagtggagcaacaggacactacctccttggagtgatctacaggtgcacaggcagaatttcagctgcagctgaacaatttacacaagcgttgactctagatcctcttttatgggcggcatatgaggaattgtgtatattaggtattgccgaagataccgatgagtgttttagtgaatcgactgctctacgtctccagcaggaacacacatccacgtccactttggtgaagtcgaactttgccaatgaaaatcgagttctatcatccagtgtctctgcaagttttggggatattattcctaagcaaatcaaacagcttcatgctaacaacataacagaagtatctggttatcctcatgtaagaccaaccgcattgcatgtgcagaacagttcaacttctaatgtatcacagtttgacaccccatcaccagctgcagcacagacttctatcatgccaccaccactatttaggaatgtacatgcttaccagaatacaataagtggcgatgctcccactaagcagaaagctaatggagtaagccagccactcagaaggaaatacatggatgaagcaaggctaaagaaggtttctggaaggttgtttaatagcgatgcaatgcctcgaagaagtcaaagacttaaagatacaacaacaaattcaaatacatctcaaattggaggaaatggaacagatcatttgtcaggtaaattgcgagtaaactcgtccacacaatcaaaattgtgttcaacagccatacgttctgtgcaagttaggaaaggaaaaccacgggctacagaaaattttgatgaaggaagtagatatgaagtcattgatgaaatgtggacagacaatatgtcaggaacttcatcttctgtaagtacagctgatggaagatcctttgagcaagatagagctgaacgaattctgttgcaagactccaaagtggcacttggtattagggagctattgggacttttccgaacactgggggaaggttttaggctttcttgcttgtttaagtgccaggaagcactggaagtctacagaaaactccctgagtcgcagtttaacactggatgggttctatgccaggttggtaaggcatattttgaattagttgattatttggaagctgatcattattttgagctggcacaccgactatcgccttgtacgcttgatggaatggacatctattctactgttctttatcatctgaatgaggaaatgagactaagctaccttgctcaagagcttatttccattgatcgactatctcctcaagcatggtgtgcagtgggcaattgctttgccttgagaaaagatcatgagactgctttgaagaattttcaacgttcggtacagcttgactcaagatttgcatatgctcacactctatgtggtcatgagtattctgcactggaggattatgagaatagtatcaaattctacagatgtgcactgcaggtagatgaaaggcactacaatgcttgaggaatgaagaggcactggaaatgatggagaaagctatagcagctgataagaagaatccactgcccaagtatcagaagtccttaatccttctaggactaatgaagtatgaagaagctctggatgagttggagcggctaaaggagattgcaccccatgagagtagtatgtatgcactgatgggaaagatttacaagcaactcaatattcttgacaaagctgttttctgcttcggcattgccctggatttgaaaccacctgctgctgatcttgctataattaagtccgcaatggagaaagtacatctccctgatgaactgatggaggatgacctataagttcactcaagcatcgtgagaaatgaacatttacttcgggttcatgatgacccgcctgtgcttcgtgttcctggcctagtggcctgcttgggcttctcaagtggaactcggaagtcggagctgtaccattagccatccagtttggaatgaaaagaaaaaaaaattaaccatccagttttgtagatttagttttagcctgtaatcagagaacacatgcgcagaagctgcggtagtttaggactctgtacaagtgttggcgaaatgacgcctgtaccattatcaaataacggaaataattaaaggatgaggatccagctgattcaagcagattgtttgtcgcatctacaaaccttttaaaggtgtcacattcaaaggttgaaaacatttcagcccaagtaaatcgatttgaagaagagcggaggaaaagaggatgcttccgcgagtcagcctcctactaactactggcttggaggtgggggataaagctaggctcttcatgcaagcaaagtgtaaccatccgttttcttgctagtagcctgtatcattgctgcatatcctggcatcattaagaaaccatccaaaggagagtgtcagtgatgagcaatttctggaaaagttttactttgcattatgcgatgtgatatatatattttatttacatggt

SEQ ID NO: 31148 - DNA, 4776 bp, Zea Mays
aacgaccagagtccggacactcacactcccctgctgcgcctgccgcctgcgtttcggccaccgcactacttccccaatccccttgatatcgcccacccgcgctcgccgccgccgctgggcggcgatggaaaccctaatggtagaccgcgtccacagtagcctccgcctcttcatgtaccgcaacgccatattcctctgcgagcgcctctgcgcacagttcccctccgagaccaatgtgcaattgctagcaacctgctacctacacaacaatcagccatatgctgcatatcacgttttgaaagggaagaagctgccggagtcccggtacttgtttgctacatcatgctttcgaatgaacctcttgcgtgaagcagaagaaattctatgtccagtcaatgagccaaacatggaggttccaagtggagcaacaggacactacctccttggagtgatctacaggtgcacaggcagaatttcagctgcagctgaacaatttacacaagcgttgactctagatcctcttttatgggcggcatatgaggaattgtgtatattaggtattgccgaagataccgatgagtgttttagtgaatcgactgctctacgtctccagcaggaacacacatccacgtccactttggtgaagtcgaactttgccaatgaaaatcgagttctatcatccagtgtctctgcaagttttggggatattattcctaagcaaatcaaacagcttcatgctaacaacataacagaagtatctggttatcctcatgtaagaccaaccgcattgcatgtgcagaacagttcaacttctaatgtatcacagtttgacaccccatcaccagctgcagcacagacttctatcatgccaccaccactatttaggaatgtacatgcttaccagaatacaataagtggcgatgctcccactaagcagaaagctaatggagtaagccagccactcagaaggaaatacatggatgaagcaaggctaaagaaggttaggttctttcatttgattgctattactggatgccactacttgtaacttctgtacctgcctgtttcccgatctttagaacttccatggtttgctcatgacttttaatggcctgtctatccctagagttcgcatttctcccctgacctttatctgtaaaggatgtcagtgtgacatatgggttggtttatatttattttattttatggcatgttgatattttctatttgctcatactcccttgagcacaaaatgtcttaaatataaattcccttgaaatttctgtaagctaacattgatggtcccttgtatcaggattcatagtgttggattcgttgttatcatattacaatagtaatacatagtgtcaggatcagtcatgtctttcattttttgctgttacatgatttttgttgttcataaacttaataatcttgagtttgtctgcaagtatcttcgttcttgagtactagtgtgccaattgtgtaccagcatcaaacacatggtctcaaaaactcagaatgccttataataccattcgtcttgatgatgtttacataatggttagatcagtgtgtcattcttgttgcatactatctcagcagtgttgcacacaaaaatagtggggtgttttggggttgcctgaaaccaaccattctaaatttttgttaattgctttccatatgtcaactttagatatttggtaatgatacaagtagatatttgaatcaaaatgcagtttcataaaaatactttttccatgtttaataaatattttgtaagaaagtgtttttgtgtgttttttagagaccgtgctgaactgctaatgtcaaaagcatcatttatgttttattggagggagtacaaggcactgaaaacgattgatataatcccaagtctatttttgtattgtttcttgtagtcacaaagttcatcttgtgatataatacacaatggcagtaaaactatttaatctttacttacattgaaggtcttccttttcttattggttttgttggattgacaaaggatgcatttgattgttctgtaggtttaactcatttgagatctgtttgtaaatcctcctttgtactcttttctgttgatattttcttatggtgacaggaacaaatctatattctactctattaagaacctaatgtgggcacctggtgctaccacgacttcaccctccccacacccagcgtccgcaaaaagtagtgcagaacgagcactcgaacccacacacccctctgctccagaaatttggggctaaccaccagaccacacataccttagtatttagaaataaataaaaaatatatttgtagcctaggcgtcactcccctgcttagtggcaacacacgggcacatacctagtatatatgttacaagtattaggattacctgcattacattatggaataaagctacaaagataaagaaaaaggctctcacattgacaccaaatcctctttgcctacgcatttacatggtcctatgcattattgcatatttacattggacaattgtatttatatggaatatccttgatgcatcattctgaagggcaggccttgtgcagtggtgagagctgtctcactgagtcaccaggtcgcagattcacagcagtctctccacatttgcggggaaagattgacttggtttatttttccctagatcccacttgtgggagtctccaacactgggtctgccccctttttaccctgatgcatcattctggctctgccactgttggtgatattagaattgaagacgtttttcaggtttctggaaggttgtttaatagcgatgcaatgcctcgaagaagtcaaagacttaaagatacaacaacaaattcaaatacatctcaaattggaggaaatggaacagatcatttgtcaggaagtagatatgaagtcattgatgaaatgtggacagacaatatgtcaggaacttcatcttctgtaagtacagctgatggaagatcctttgagcaagatagagctgaacgaattctgttgcaagactccaaagtggcacttggtattagggagctattgggacttttccgaacactgggggaaggttttaggctttcttgcttgtttaagtgccaggaagcactggaagtctacagaaaactccctgagtcgcagtttaacactggatgggttctatgccaggttggtaaggcatattttgaattagttgattatttggaagctgatcattattttgagctggcacaccgactatcgccttgtacgcttgatggaatggacatctattctactgttctttatcatctgaatgaggaaatgagactaagctaccttgctcaagagcttatttccattgatcgactatctcctcaagcatggtgtgcagtgggcaattgctttgccttgagaaaagatcatgagactgctttgaagaattttcaacgttcggtacagcttgactcaagatttgcatatgctcacactctatgtggtcatgagtattctgcactggaggattatgagaatagtatcaaattctacagatgtgcactgcaggtagatgaaaggcactacaatgcttggtatggccttggggtggtgtatcttcgccaggaaaagtttgagtttgctgagcatcatttcagaagggcatttcagataaatcctcgctcttctgttctcatgtgctatcttgggatggccttgcattctcttaaggttgatatcattgatcgacaacaatagactactccctctgattccaaatatagaggaatgaagaggcactggaaatgatggagaaagctatagcagctgataagaagaatccactgcccaagtatcagaagtccttaatccttctaggactaatgaagtatgaagaagctctggatgagttggagcggctaaaggagattgcaccccatgagagtagtatgtatgcactgatgggaaagatttacaagcaactcaatattcttgacaaagctgttttctgcttcggcattgccctggatttgaaaccacctgctgctgatcttgctataattaagtccgcaatggagaaagtacatctccctgatgaactgatggaggatgacctataagttcactcaagcatcgtgagaaatgaacatttacttcgggttcatgatgacccgcctgtgcttcgtgttcctggcctagtggcctgcttgggcttctcaagtggaactcggaagtcggagctgtaccattagccatccagtttggaatgaaaagaaaaaaaaattaaccatccagttttgtagatttagttttagcctgtaatcagagaacacatgcgcagaagctgcggtagtttaggactctgtacaagtgttggcgaaatgacgcctgtaccattatcaaataacggaaataattaaaggatgaggatccagctgattcaagcagattgtttgtcgcatctacaaaccttttaaaggtgtcacattcaaaggttgaaaacatttcagcccaagtaaatcgatttgaagaagagcggaggaaaagaggatgcttccgcgagtcagcctcctactaactactggcttggaggtgggggataaagctaggctcttcatgcaagcaaagtgtaaccatccgttttcttgctagtagcctgtatcattgctgcatatcctggcatcattaagaaaccatccaaaggagagtgtcagtgatgagcaatttctggaaaagttttactttgcattatgcgatgtgatatatatattttatttacatggt

SEQ ID NO: 31149 - DNA, 3061 bp, Zea Mays
aacgaccagagtccggacactcacactcccctgctgcgcctgccgcctgcgtttcggccaccgcactacttccccaatccccttgatatcgcccacccgcgctcgccgccgccgctgggcggcgatggaaaccctaatggtagaccgcgtccacagtagcctccgcctcttcatgtaccgcaacgccatattcctctgcgagcgcctctgcgcacagttcccctccgagaccaatgtgcaattgctagcaacctgctacctacacaacaatcagccatatgctgcatatcacgttttgaaagggaagaagctgccggagtcccggtacttgtttgctacatcatgctttcgaatgaacctcttgcgtgaagcagaagaaattctatgtccagtcaatgagccaaacatggaggttccaagtggagcaacaggacactacctccttggagtgatctacaggtgcacaggcagaatttcagctgcagctgaacaatttacacaagcgttgactctagatcctcttttatgggcggcatatgaggaattgtgtatattaggtattgccgaagataccgatgagtgttttagtgaatcgactgctctacgtctccagcaggaacacacatccacgtccactttggtgaagtcgaactttgccaatgaaaatcgagttctatcatccagtgtctctgcaagttttggggatattattcctaagcaaatcaaacagcttcatgctaacaacataacagaagtatctggttatcctcatgtaagaccaaccgcattgcatgtgcagaacagttcaacttctaatgtatcacagtttgacaccccatcaccagctgcagcacagacttctatcatgccaccaccactatttaggaatgtacatgcttaccagaatacaataagtggcgatgctcccactaagcagaaagctaatggagtaagccagccactcagaaggaaatacatggatgaagcaaggctaaagaaggtttctggaaggttgtttaatagcgatgcaatgcctcgaagaagtcaaagacttaaagatacaacaacaaattcaaatacatctcaaattggaggaaatggaacagatcatttgtcaggtaaattgcgagtaaactcgtccacacaatcaaaattgtgttcaacagccatacgttctgtgcaagttaggaaaggaaaaccacgggctacagaaaattttgatgaagacaatatgtcaggaacttcatcttctgtaagtacagctgatggaagatcctttgagcaagatagagctgaacgaattctgttgcaagactccaaagtggcacttggtattagggagctattgggacttttccgaacactgggggaaggttttaggctttcttgcttgtttaagtgccaggaagcactggaagtctacagaaaactccctgagtcgcagtttaacactggatgggttctatgccaggttggtaaggcatattttgaattagttgattatttggaagctgatcattattttgagctggcacaccgactatcgccttgtacgcttgatggaatggacatctattctactgttctttatcatctgaatgaggaaatgagactaagctaccttgctcaagagcttatttccattgatcgactatctcctcaagcatggtgtgcagtgggcaattgctttgccttgagaaaagatcatgagactgctttgaagaattttcaacgttcggtacagcttgactcaagatttgcatatgctcacactctatgtggtcatgagtattctgcactggaggattatgagaatagtatcaaattctacagatgtgcactgcaggtagatgaaaggcactacaatgcttggtatggccttggggtggtgtatcttcgccaggaaaagtttgagtttgctgagcatcatttcagaagggcatttcagataaatcctcgctcttctgttctcatgtgctatcttgggatggccttgcattctcttaaggttgatatcattgatcgacaacaatagactactccctctgattccaaatatagaggaatgaagaggcactggaaatgatggagaaagctatagcagctgataagaagaatccactgcccaagtatcagaagtccttaatccttctaggactaatgaagtatgaagaagctctggatgagttggagcggctaaaggagattgcaccccatgagagtagtatgtatgcactgatgggaaagatttacaagcaactcaatattcttgacaaagctgttttctgcttcggcattgccctggatttgaaaccacctgctgctgatcttgctataattaagtccgcaatggagaaagtacatctccctgatgaactgatggaggatgacctataagttcactcaagcatcgtgagaaatgaacatttacttcgggttcatgatgacccgcctgtgcttcgtgttcctggcctagtggcctgcttgggcttctcaagtggaactcggaagtcggagctgtaccattagccatccagtttggaatgaaaagaaaaaaaaattaaccatccagttttgtagatttagttttagcctgtaatcagagaacacatgcgcagaagctgcggtagtttaggactctgtacaagtgttggcgaaatgacgcctgtaccattatcaaataacggaaataattaaaggatgaggatccagctgattcaagcagattgtttgtcgcatctacaaaccttttaaaggtgtcacattcaaaggttgaaaacatttcagcccaagtaaatcgatttgaagaagagcggaggaaaagaggatgcttccgcgagtcagcctcctactaactactggcttggaggtgggggataaagctaggctcttcatgcaagcaaagtgtaaccatccgttttcttgctagtagcctgtatcattgctgcatatcctggcatcattaagaaaccatccaaaggagagtgtcagtgatgagcaatttctggaaaagttttactttgcattatgcgatgtgatatatatattttatttacatggt

SEQ ID NO: 31150 - DNA, 2905 bp, Zea Mays
ctttccacagctagattgtcggaaaagctggttagaaaaaactgaaccaaacagccaatagacactgagcgatcatgtggcacgtgtagcgctgggacaggcccaccgccgccacctcgacgccgaacggccgaagagccactgccagtgccacaccacacgccgattctctgaacaccaatctgcgcaatcccggcaaaatcccaaaccctgcctcgtcgtcgcaccgcctccactcgtcccggatcaaccacctcctcggtccgcaaccacaaccacacccgccctcccgctcgccgcagccagaaccagctccaacccaaccagaaccagctcgccccggccgccgcgaccgtcccccctcatcgactcgaggcaacgaagcggccggatgggagcagcagcctgaccctgacgcgatgagcccgcccgccatgctgctgcccgtctgctccgccgcgcccagctgctcccccctctgcccggtgacggcctcgcacgtcgtcgcgcgggtggcgcggagggtggacgtcggcgccgcgctcaggtcctacgccgactcgctcgtcgcgcaggtgcccgaccgcccgccgctcgccgactcctccatactctccccctacatcgccgcgccggacgacatcgcgcgagccttcggcgcccccgcctccgagctcccgccgctccccagcgccgaccccagccctgggctatgttgcacgggcaccgaccagccgctggcggcagtcgcggacctggccgcaactgccgtggtcaactcggctcccaccgacgccgcggagcgggccctgtcggacgcgccgttccccagcacgttcccgtctgacgcgtccgaggtcgaggactccgtggccaggctcatcgataaggtcggcaagcaggtcttccaggcggaggacgcgctcaccgaggcctacgacaagctgaggctgtccgcgtacgacgcgctcggtgcgtggaggaagacggtgcgcgacgcgataggtgggctcaaggcgtcggtcgacgccggtaagcaacaggccgccggaggggtcacggatgcttccggcgcgttgcacgagaaggtggccggagctgggactgtggctgttgatgttctcaggaaggcgattgttgcagcagaggattcactgggcagtgctgccacattcgttgtgtattcttatgggtcggcgaaggagtctctaccaccaaatgttagagatctgttgagctcgtctgaggagaaagctagtctagtcttgagaccaatcggaaatgctctgcaacaggtctatgtagttgttgaaggtgttgagaagaatgttggtttggatccaagtgatcctattgttcaattggcagttgtgcttggaggttcagtgacaatagggacaacgtactggctcttcacatacagtggctattctggagacttgtcacctgaatcagcgtttgacttattgaaaaacgatgacaaagccgtactcattgatgttcggcctgaggcaagatattgatttgagggaaaaagatggtgttcctgatctacgcctcggggctaggtctaaatatgcaagtgtagcttcgcctgagatcaaagatccagtaaagagtatgctcaaagatgaaagagagtttgatgatgctttactggcagttgtcatccgaaacttgaaattggtgaagggcgattcaaaagtcatagttatggattctaatggagctcgatcaaaagccattgctaggttactgaagaagctcggtgtgcagcgaccttaccttgttaaaggtggtttccaagcatggtcaaagaaccttcgtgtcaaagaactgaaacctgagactgcattaacgtcaataaatgaggatgttgaggaaatcctagaacaaataaagcccaccccaactcttgtgtttggatctcttctgggcctctcagcactttcctatgctttactggaatgggagatgactttgcaatacatagctgttttaagcgttgggctgactatctacttgcgattctctacatatgaggactccgaggatttggagaaagacctaaagctgttgctgtctccagtaagagtaggcgcagacgccttgtcatgggcagctaagaagatagagccaaacaaggtgggcctgccaacgtctccttccacgacggcggtgaaagaccgggttcttcaggccgcggcgaagcacgagtcgcagccatcggatgccgacgagtcgtcggtccaaacagccgaggcatgacacgcgccgaaagcttgggagccagtcgagcggtcccgccgaatcctcaataagagcactcggtgggcgctccctggtaatttgtgaagtccatgtcgtttatgatgtaaagcactgtaaagcggttgtaaattaattgcgtgagcagcatctgtaagttgacatcaacttggttggttgtgtgtgtgtagattatagagaaagaggtgtcaatgtaacgttaattcctgagcctgtctgcgatcttgcccgtctggtactgctactctgcttgcttgcttgtttggcacgcgatcaaggtgaattaagtaaaaatggtccgtggtccaagtccagccccacaacttggctgtcaggcgtagtgtaacctttgttggtacggaaatgaaatcctggagtacggctgtttttaaccaccatagtgcctgccgaaatgctgctcggtagtaaacgggtacagaatttaatcccgcatcatttggaagctccaccccaatagccacagcccacaggccccagaagacgaaaggaaacgatgcgctcgctgctcgcataggatcaaagggacgggaatcccaatgtcttgttttcaaaattttatcgtattttcttaaaaacagtataaaaaacatagaaa

SEQ ID NO: 31151 - DNA, 3131 bp, Zea Mays
tagaaaaaactgaaccaaacagccaatagacactgagcgatcatgtggcacgtgtagcgctgggacaggcccaccgccgccacctcgacgccgaacggccgaagagccactgccagtgccacaccacacgccgattctctgaacaccaatctgcgcaatcccggcaaaatcccaaaccctgcctcgtcgtcgcaccgcctccactcgtcccggatcaaccacctcctcggtccgcaaccacaaccacacccgccctcccgctcgccgcagccagaaccagctccaacccaaccagaaccagctcgccccggccgccgcgaccgtcccccctcatcgactcgaggcaacgaagcggccggatgggagcagcagcctgaccctgacgcgatgagcccgcccgccatgctgctgcccgtctgctccgccgcgcccagctgctcccccctctgcccggtgacggcctcgcacgtcgtcgcgcgggtggcgcggagggtggacgtcggcgccgcgctcaggtcctacgccgactcgctcgtcgcgcaggtgcccgaccgcccgccgctcgccgactcctccatactctccccctacatcgccgcgccggacgacatcgcgcgagccttcggcgcccccgcctccgagctcccgccgctccccagcgccgaccccagccctgggctatgttgcacgggcaccgaccagccgctggcggcagtcgcggacctggccgcaactgccgtggtcaactcggctcccaccgacgccgcggagcgggccctgtcggacgcgccgttccccagcacgttcccgtctgacgcgtccgaggtcgaggactccgtggccaggctcatcgataaggtcggcaagcaggtcttccaggcggaggacgcgctcaccgaggcctacgacaagctgaggctgtccgcgtacgacgcgctcggtgcgtggaggaagacggtgcgcgacgcgataggtgggctcaaggcgtcggtcgacgccggtaagcaacaggccgccggaggggtcacggatgcttccggcgcgttgcacgagaaggtggccggagctgggactgtggctgttgatgttctcaggaaggcgattgttgcagcagaggattcactgggcagtgctgccacattcgttgtgtattcttatgggtcggcgaaggagtctctaccaccaaatgttagagatctgttgagctcgtctgaggagaaagctagtctagtcttgagaccaatcggaaatgctctgcaacaggtctatgtagttgttgaaggtgttgagaagaatgttggtttggatccaagtgatcctattgttcaattggcagttgtgcttggaggttcagtgacaatagggacaacgtactggctcttcacatacagtggctattctggagacttgtcacctgaatcagcgtttgacttattgaaaaacgatgacaaagccgtactcattgatgttcggcctgaggcaagatattgatttgagggaaaaagatggtgttcctgatctacgcctcggggctaggtctaaatatgcaagtgtagcttcgcctgagatcaaagatccagtaaagagtatgctcaaagatgaaagagagtttgatgatgctttactggcagttgtcatccgaaacttgaaattggtgaagggcgattcaaaagtcatagttatggattctaatggagctcgatcaaaagccattgctaggttactgaagaagctcggtgtgcagcgaccttaccttgttaaaggtggtttccaagcatggtcaaagaaccttcgtgtcaaagaactgaaacctgagactgcattaacgtcaataaatgaggatgttgaggaaatcctagaacaaataaagcccaccccaactcttgtgtttggatctcttctggtaggtcactagtcttattctcatgtattacctttttgctcatgttggcacactgtattgctgcctctgaaaattttgcaactaattttctattatattcggtaagagcttgtgcctttaaaagttcatgtgtacatacaacacaagcttcttttttacctttttgttgttttttagcccatagatgcattattttttcatggaaattgttggatgcattttgtttcttgacagtgttgtccctcttttttgtaacagggcctctcagcactttcctatgctttactggaatgggagatgactttgcaatacatagctgttttaagcgttgggctgactatctacttgcgattctctacatatgaggactccgaggatttggagaaagacctaaagctgttgctgtctccagtaagagtaggcgcagacgccttgtcatgggcagctaagaagatagagccaaacaaggtgggcctgccaacgtctccttccacgacggcggtgaaagaccgggttcttcaggccgcggcgaagcacgagtcgcagccatcggatgccgacgagtcgtcggtccaaacagccgaggcatgacacgcgccgaaagcttgggagccagtcgagcggtcccgccgaatcctcaataagagcactcggtgggcgctccctggtaatttgtgaagtccatgtcgtttatgatgtaaagcactgtaaagcggttgtaaattaattgcgtgagcagcatctgtaagttgacatcaacttggttggttgtgtgtgtgtagattatagagaaagaggtgtcaatgtaacgttaattcctgagcctgtctgcgatcttgcccgtctggtactgctactctgcttgcttgcttgtttggcacgcgatcaaggtgaattaagtaaaaatggtccgtggtccaagtccagccccacaacttggctgtcaggcgtagtgtaacctttgttggtacggaaatgaaatcctggagtacggctgtttttaaccaccatagtgcctgccgaaatgctgctcggtagtaaacgggtacagaatttaatcccgcatcatttggaagctccaccccaatagccacagcccacaggccccagaagacgaaaggaaacgatgcgctcgctgctcgcataggatcaaagggacgggaatcccaatgtcttgttttcaaaattttatcgtattttcttaaaaacagtataaaaaacatagaaa

SEQ ID NO: 31152 - DNA, 2855 bp, Zea Mays
tagaaaaaactgaaccaaacagccaatagacactgagcgatcatgtggcacgtgtagcgctgggacaggcccaccgccgccacctcgacgccgaacggccgaagagccactgccagtgccacaccacacgccgattctctgaacaccaatctgcgcaatcccggcaaaatcccaaaccctgcctcgtcgtcgcaccgcctccactcgtcccggatcaaccacctcctcggtccgcaaccacaaccacacccgccctcccgctcgccgcagccagaaccagctccaacccaaccagaaccagctcgccccggccgccgcgaccgtcccccctcatcgactcgaggcaacgaagcggccggatgggagcagcagcctgaccctgacgcgatgagcccgcccgccatgctgctgcccgtctgctccgccgcgcccagctgctcccccctctgcccggtgacggcctcgcacgtcgtcgcgcgggtggcgcggagggtggacgtcggcgccgcgctcaggtcctacgccgactcgctcgtcgcgcaggtgcccgaccgcccgccgctcgccgactcctccatactctccccctacatcgccgcgccggacgacatcgcgcgagccttcggcgcccccgcctccgagctcccgccgctccccagcgccgaccccagccctgggctatgttgcacgggcaccgaccagccgctggcggcagtcgcggacctggccgcaactgccgtggtcaactcggctcccaccgacgccgcggagcgggccctgtcggacgcgccgttccccagcacgttcccgtctgacgcgtccgaggtcgaggactccgtggccaggctcatcgataaggtcggcaagcaggtcttccaggcggaggacgcgctcaccgaggcctacgacaagctgaggctgtccgcgtacgacgcgctcggtgcgtggaggaagacggtgcgcgacgcgataggtgggctcaaggcgtcggtcgacgccggtaagcaacaggccgccggaggggtcacggatgcttccggcgcgttgcacgagaaggtggccggagctgggactgtggctgttgatgttctcaggaaggcgattgttgcagcagaggattcactgggcagtgctgccacattcgttgtgtattcttatgggtcggcgaaggagtctctaccaccaaatgttagagatctgttgagctcgtctgaggagaaagctagtctagtcttgagaccaatcggaaatgctctgcaacaggtctatgtagttgttgaaggtgttgagaagaatgttggtttggatccaagtgatcctattgttcaattggcagttgtgcttggaggttcagtgacaatagggacaacgtactggctcttcacatacagtggctattctggagacttgtcacctgaatcagcgtttgacttattgaaaaacgatgacaaagccgtactcattgatgttcggcctgaggatttgagggaaaaagatggtgttcctgatctacgcctcggggctaggtctaaatatgcaagtgtagcttcgcctgagatcaaagatccagtaaagagtatgctcaaagatgaaagagagtttgatgatgctttactggcagttgtcatccgaaacttgaaattggtgaagggcgattcaaaagtcatagttatggattctaatggagctcgatcaaaagccattgctaggttactgaagaagctcgcgaccttaccttgttaaaggtggtttccaagcatggtcaaagaaccttcgtgtcaaagaactgaaacctgagactgcattaacgtcaataaatgaggatgttgaggaaatcctagaacaaataaagcccaccccaactcttgtgtttggatctcttctgggcctctcagcactttcctatgctttactggaatgggagatgactttgcaatacatagctgttttaagcgttgggctgactatctacttgcgattctctacatatgaggactccgaggatttggagaaagacctaaagctgttgctgtctccagtaagagtaggcgcagacgccttgtcatgggcagctaagaagatagagccaaacaaggtgggcctgccaacgtctccttccacgacggcggtgaaagaccgggttcttcaggccgcggcgaagcacgagtcgcagccatcggatgccgacgagtcgtcggtccaaacagccgaggcatgacacgcgccgaaagcttgggagccagtcgagcggtcccgccgaatcctcaataagagcactcggtgggcgctccctggtaatttgtgaagtccatgtcgtttatgatgtaaagcactgtaaagcggttgtaaattaattgcgtgagcagcatctgtaagttgacatcaacttggttggttgtgtgtgtgtagattatagagaaagaggtgtcaatgtaacgttaattcctgagcctgtctgcgatcttgcccgtctggtactgctactctgcttgcttgcttgtttggcacgcgatcaaggtgaattaagtaaaaatggtccgtggtccaagtccagccccacaacttggctgtcaggcgtagtgtaacctttgttggtacggaaatgaaatcctggagtacggctgtttttaaccaccatagtgcctgccgaaatgctgctcggtagtaaacgggtacagaatttaatcccgcatcatttggaagctccaccccaatagccacagcccacaggccccagaagacgaaaggaaacgatgcgctcgctgctcgcataggatcaaagggacgggaatcccaatgtcttgttttcaaaattttatcgtattttcttaaaaacagtataaaaaacatagaaa

SEQ ID NO: 31153 - DNA, 2836 bp, Zea Mays
tagaaaaaactgaaccaaacagccaatagacactgagcgatcatgtggcacgtgtagcgctgggacaggcccaccgccgccacctcgacgccgaacggccgaagagccactgccagtgccacaccacacgccgattctctgaacaccaatctgcgcaatcccggcaaaatcccaaaccctgcctcgtcgtcgcaccgcctccactcgtcccggatcaaccacctcctcggtccgcaaccacaaccacacccgccctcccgctcgccgcagccagaaccagctccaacccaaccagaaccagctcgccccggccgccgcgaccgtcccccctcatcgactcgaggcaacgaagcggccggatgggagcagcagcctgaccctgacgcgatgagcccgcccgccatgctgctgcccgtctgctccgccgcgcccagctgctcccccctctgcccggtgacggcctcgcacgtcgtcgcgcgggtggcgcggagggtggacgtcggcgccgcgctcaggtcctacgccgactcgctcgtcgcgcaggtgcccgaccgcccgccgctcgccgactcctccatactctccccctacatcgccgcgccggacgacatcgcgcgagccttcggcgcccccgcctccgagctcccgccgctccccagcgccgaccccagccctgggctatgttgcacgggcaccgaccagccgctggcggcagtcgcggacctggccgcaactgccgtggtcaactcggctcccaccgacgccgcggagcgggccctgtcggacgcgccgttccccagcacgttcccgtctgacgcgtccgaggtcgaggactccgtggccaggctcatcgataaggtcggcaagcaggtcttccaggcggaggacgcgctcaccgaggcctacgacaagctgaggctgtccgcgtacgacgcgctcggtgcgtggaggaagacggtgcgcgacgcgataggtgggctcaaggcgtcggtcgacgccggtaagcaacaggccgccggaggggtcacggatgcttccggcgcgttgcacgagaaggtggccggagctgggactgtggctgttgatgttctcaggaaggcgattgttgcagcagaggattcactgggcagtgctgccacattcgttgtgtattcttatgggtcggcgaaggagtctctaccaccaaatgttagagatctgttgagctcgtctgaggagaaagctagtctagtcttgagaccaatcggaaatgctctgcaacaggtctatgtagttgttgaaggtgttgagaagaatgttggtttggatccaagtgatcctattgttcaattggcagttgtgcttggaggttcagtgacaatagggacaacgtactggctcttcacatacagtggctattctggagacttgtcacctgaatcagcgtttgacttattgaaaaacgatgacaaagccgtactcattgatgttcggcctgaggatttgagggaaaaagatggtgttcctgatctacgcctcggggctaggtctaaatatgcaagtgtagcttcgcctgagatcaaagatccagtaaagagtatgctcaaagatgaaagagagtttgatgatgctttactggcagttgtcatccgaaacttgaaattggtgaagggcgattcaaaagtcatagttatggattctaatggagctcgatcaaaagccattgctaggttactgaagaagctcggtggtttccaagcatggtcaaagaaccttcgtgtcaaagaactgaaacctgagactgcattaacgtcaataaatgaggatgttgaggaaatcctagaacaaataaagcccaccccaactcttgtgtttggatctcttctgggcctctcagcactttcctatgctttactggaatgggagatgactttgcaatacatagctgttttaagcgttgggctgactatctacttgcgattctctacatatgaggactccgaggatttggagaaagacctaaagctgttgctgtctccagtaagagtaggcgcagacgccttgtcatgggcagctaagaagatagagccaaacaaggtgggcctgccaacgtctccttccacgacggcggtgaaagaccgggttcttcaggccgcggcgaagcacgagtcgcagccatcggatgccgacgagtcgtcggtccaaacagccgaggcatgacacgcgccgaaagcttgggagccagtcgagcggtcccgccgaatcctcaataagagcactcggtgggcgctccctggtaatttgtgaagtccatgtcgtttatgatgtaaagcactgtaaagcggttgtaaattaattgcgtgagcagcatctgtaagttgacatcaacttggttggttgtgtgtgtgtagattatagagaaagaggtgtcaatgtaacgttaattcctgagcctgtctgcgatcttgcccgtctggtactgctactctgcttgcttgcttgtttggcacgcgatcaaggtgaattaagtaaaaatggtccgtggtccaagtccagccccacaacttggctgtcaggcgtagtgtaacctttgttggtacggaaatgaaatcctggagtacggctgtttttaaccaccatagtgcctgccgaaatgctgctcggtagtaaacgggtacagaatttaatcccgcatcatttggaagctccaccccaatagccacagcccacaggccccagaagacgaaaggaaacgatgcgctcgctgctcgcataggatcaaagggacgggaatcccaatgtcttgttttcaaaattttatcgtattttcttaaaaacagtataaaaaacatagaaa

SEQ ID NO: 31154 - DNA, 569 bp, Zea Mays
gcaagatattgatttgagggaaaaagatggtgttcctgatctacgcctcggggctaggtctaaatatgcaagtgtagcttcgcctgagatcaaagatccagtaaagagtatgctcaaagatgaaagagagtttgatgatgctttactggcagttgtcatccgaaacttgaaattggtgaagggcgattcaaaagtcatagttatggattctaatggagctcgatcaaaagccattgctaggttactgaagaagctcggtgtgcagcgaccttaccttgttaaaggtggtttccaagcatggtcaaagaaccttcgtgtcaaagaactgaaacctgagactgcattaacgtcaataaatgaggatgttgaggaaatcctagaacaaataaagcccaccccaactcttgtgtttggatctcttctgggcctctcagcactttcctatgctttactggaatgggagatgactttgcaatacatagctgttttaagcgttgggctgactatctacttgcgattctctacatatgaggactccgaggatttggagaaagacctaaatttctctc

SEQ ID NO: 31155 - DNA, 1331 bp, Zea Mays
gcaagatattgatttgagggaaaaagatggtgttcctgatctacgcctcggggctaggtctaaatatgcaagtgtagcttcgcctgagatcaaagatccagtaaagagtatgctcaaagatgaaagagagtttgatgatgctttactggcagttgtcatccgaaacttgaaattggtgaagggcgattcaaaagtcatagttatggattctaatggagctcgatcaaaagccattgctaggttactgaagaagctcggtgtgcagcgaccttaccttgttaaaggtggtttccaagcatggtcaaagaaccttcgtgtcaaagaactgaaacctgagactgcattaacgtcaataaatgagggcctctcagcactttcctatgctttactggaatgggagatgactttgcaatacatagctgttttaagcgttgggctgactatctacttgcgattctctacatatgaggactccgaggatttggagaaagacctaaagctgttgctgtctccagtaagagtaggcgcagacgccttgtcatgggcagctaagaagatagagccaaacaaggtgggcctgccaacgtctccttccacgacggcggtgaaagaccgggttcttcaggccgcggcgaagcacgagtcgcagccatcggatgccgacgagtcgtcggtccaaacagccgaggcatgacacgcgccgaaagcttgggagccagtcgagcggtcccgccgaatcctcaataagagcactcggtgggcgctccctggtaatttgtgaagtccatgtcgtttatgatgtaaagcactgtaaagcggttgtaaattaattgcgtgagcagcatctgtaagttgacatcaacttggttggttgtgtgtgtgtagattatagagaaagaggtgtcaatgtaacgttaattcctgagcctgtctgcgatcttgcccgtctggtactgctactctgcttgcttgcttgtttggcacgcgatcaaggtgaattaagtaaaaatggtccgtggtccaagtccagccccacaacttggctgtcaggcgtagtgtaacctttgttggtacggaaatgaaatcctggagtacggctgtttttaaccaccatagtgcctgccgaaatgctgctcggtagtaaacgggtacagaatttaatcccgcatcatttggaagctccaccccaatagccacagcccacaggccccagaagacgaaaggaaacgatgcgctcgctgctcgcataggatcaaagggacgggaatcccaatgtcttgttttcaaaattttatcgtattttcttaaaaacagtataaaaaacatagaaa

SEQ ID NO: 31156 - DNA, 1281 bp, Zea Mays
attgatttgagggaaaaagatggtgttcctgatctacgcctcggggctaggtctaaatatgcaagtgtagcttcgcctgagatcaaagatccagtaaagagtatgctcaaagatgaaagagagtttgatgatgctttactggcagttgtcatccgaaacttgaaattggtgaagggcgattcaaaagtcatagttatggattctaatggagctcgatcaaaagccattgctaggttactgaagaagctcggtgtgcagcgaccttaccttgttaaaggtggtttccaagcatggtcaaagaaccttcgtgtcaaagaactgaaacctgagactgcattaacgtcaataaatgaggatgttgaggaaatcctagaacaaataaagcccaccccaactcttgtgtttggatctcttctgggcctctcagcactttcctatgctttactgggctgttgctgtctccagtaagagtaggcgcagacgccttgtcatgggcagctaagaagatagagccaaacaaggtgggcctgccaacgtctccttccacgacggcggtgaaagaccgggttcttcaggccgcggcgaagcacgagtcgcagccatcggatgccgacgagtcgtcggtccaaacagccgaggcatgacacgcgccgaaagcttgggagccagtcgagcggtcccgccgaatcctcaataagagcactcggtgggcgctccctggtaatttgtgaagtccatgtcgtttatgatgtaaagcactgtaaagcggttgtaaattaattgcgtgagcagcatctgtaagttgacatcaacttggttggttgtgtgtgtgtagattatagagaaagaggtgtcaatgtaacgttaattcctgagcctgtctgcgatcttgcccgtctggtactgctactctgcttgcttgcttgtttggcacgcgatcaaggtgaattaagtaaaaatggtccgtggtccaagtccagccccacaacttggctgtcaggcgtagtgtaacctttgttggtacggaaatgaaatcctggagtacggctgtttttaaccaccatagtgcctgccgaaatgctgctcggtagtaaacgggtacagaatttaatcccgcatcatttggaagctccaccccaatagccacagcccacaggccccagaagacgaaaggaaacgatgcgctcgctgctcgcataggatcaaagggacgggaatcccaatgtcttgttttcaaaattttatcgtattttcttaaaaacagtataaaaaacatagaaa

SEQ ID NO: 31157 - DNA, 1337 bp, Zea Mays
agcaggctaacatggactttgtccaccgaatatctgactgtagacgacacacagtgacgtttaaaatagtagtggatgagataggggagctgccggagacggccttacatactaggtgtttgcttctaaggactaaagtatgaactcaaaaggaataaattctaaaggtgaactccacctcatggggattgaccaaaacagcaaaagtaactctgaatcaatggggactatagcagatgaatagagtaaaatattgtggaaggacaaaaaaattgctggctgtctacagattgtacttcatactctgtacatttaatcaatgtcttttttagaacaaaaatatatccagtaaatgtgcaccaaaataacatcatgttgttctatttcgtgaacaagcagatatcgcattagcttcaattgttaactgttactgaaataaatcatcagatgaaaggtcagcagctagaatgaacatttactgaaataaatagacagcaggtatctcattagcttcaatcgttagaattctaatttgataacccagataagaatacataccaaagagcttccagacaattcctttttcagttgtgaaagatcatcatcaacagatgaagtctcaagcagtgcaaactgttcaccaataaatagagacagtcatgtgatattagcacaaggcaagtatttatattggtttgtaaatgtttatttttacctttccttctaaatcatcagttgctaactggccgagtgcctctgcttgggattccatcgccataactaagcattaaatgtgtaattattgcattatttgtttgaaaacaacattctgacattctaccatggaataaagcatgttgctgacaaacacatgaagcaagcaaagatacagtaagacaccattcctggctaaagaaagacatatggtatgtgcaagtcacagcagatacattgccgttaaaattaagtttttgagtatgttgttatgctttgccaagatcatactcaactaactcaaatgcatagcgagagatccaatagatgacttgaggatgtagttatgccttgtcaagatcatacttataacaacaatagggcatagtgaaatatcccacgatcaagcaatatcatgatactaaaatagaaaatcctgttctaaaggcttggacaagaggccaaaaaaaaatgacagacccagtgttggcggctcccacatgagtagggtctggggaagaagaaaaatcgaggcaagccttacccctgcatttttgcagggaggcagcgtcaaaccaggacctttggctcagtgaaaagacttctcaccactgcgctgggct

SEQ ID NO: 31158 - DNA, 4122 bp, Zea Mays
caaatcgccgccccggatcgaggaggggaggagccggcggaggctcctgtggtggctgtgggggcgagagcgggagcgccatgaggggcggtggccgtggcggcggcgggaggtagccttcgtatgcggcgtcggatggggcggatgcggcggcgatcccggtcgcctcaaggaagatggtgcagagcctcaaggggatcctggccgaccgctcggagggagagatctacgccacgctctgcgactgcggaatggaccccgacatagccgtcgagaggctcatctcccagacccctgcacaactaaggtggagccttacaaagcaagagtggttgcttgcaaccggcctcacagagttttgaagctttgaaccccagagccgttgctgttgtgatagaccccatccagaagaggacgatcgattttcgattttgtaggagagctgttaaacctctccggctccgccactttcgtttccgtttctgcgctttgtttggtgccgaattttctgcacgttttaccaattctgaacgaaaattccctttctgttttgccgactgtagggctgttgaatccgtatgggctatggtcgccgaggcactcgcagtcggacgtgtcttcatcggagatggagtttggtacagcgcgccagtacgacaccaccgaccttgatgaagcacttcaaagagagagttttgaagctttgaaccccagagccgttgctgttgtgatagaccccatccagaagaggacgatcgattttcgattttggctgttgaatccgtatgggctatggtcgccgaggcactcgcagtcggacgtgtcttcatcggagatggagtttggtacagcgcgccagtacgacaccaccgaccttgatgaagcacttcaaagagaggtaatttgcttagatatttttaataaaacttatttttagtttttcagtgcttagttaaaatcaagtggcattgatactatcaaaggaccatttgtttttcgttggcatttcttgtggatatcgtggtcagatgtacaatacagattaatagtatgagcaaagtcctttgatgaatattttaatgggtcttttttttctgggcacaataggggactggcgaataatatccaaacaatgttcctacattgtatatttatctttcgataaagttgtttaagtcttggaacttagccatgttgatgccaaataggcagtagaacatgagtttgatttcctatatatcaaccaaaaaatacatttaataagttctaataaaaagaacagataagtgaaaaagagagagagagaaggaattaggctaataaaatagatttattcatgactacccttaagatctcaaaagaaagatcttcaaagcttgagaaaaggagtaaaggacctcctgctgttgcagggcatatgtcactcacggcctgtaagtttttccaagtctttagtgccattactaggtttcacaaatatggtttagtaaagttattcaagtgggctaagtaaaaaaataacaaaagacaaaaaaggaataccaaaaacaaattaggcgatgttttaccaagacaaaataaataatttcggtgaaggaaaatgttatttcattaattaatgtcaaatggcaataaagagataaagtggacaacaagactgtcgtttctctgatctgtttgtagtccacagactcaagcagaaaaaggctttattttctgtagcagcaggagcacagtgccccaaggtcgtagttaaggggtttttgttttaacttgtaataacctgttaaggggtttttgtattaaatatgaattgcatgtagaacataaaatccattgtgtcataatctggtaggtaagtgcttgaggctggctgcataatagcaggtttgttttcatttttcaaacacaaacatgtatcctttttgaagcaaacacatttgatcgatgtcttgtgtgggtatcatgcactttttgcgtgggttccacctccactgcgcgggctgtatatagagccgcccacctgccccacaccatgtcgtcaccgagttgtgagtggggcatccgtcgcctctaatccaaataaggaggagctgcggccagacatgggcggcagagtagtatctggatccgctgaacacccaccggtggtatctagctttcctatcaatcagtggctttcaaaggtactctgtgttatctcgtctactcatgaacttcctgggactgaaatagtgggtcgtattgatgcctttattgctgtgatggcacatacacatgtaattgcaaatggccctatcagctgatgttcttgctgctgccaacacaacaacagaagttgcaatgaggcttgtgagacctgagacgaagtgtctaggatgaagtttcagatatgtcagctgatttcagtttcagagctgcggattttagtttcaaagctgcagatttcaggctgcaagatttctacagaatgtgaagactatgctatcaaaaaaagcttttctaatttacctaggatgaagttcaggattgtttaggatgaatcatgtgtttatctatcttcaataatatttttttaccccatttaactcggaagcggatggaaagaagattcagatccagctgacagggttcatggaaaagaacacagtgaagttcatgaaggagctctggagccttctcctcagtgcgcagcagaatgccagtggggtgcctcaacagtttctggatgaaaaggaggctgagatacatcagaaaaaggatggggatgttggtaactcaagatcctatggtgatccagttgcctctgctttaaacagtacaaatttcaatatcgaggaagaaaaggacaatgatttcaagcgcacctcaagaccaaaaaataggttgtaaggatgccacaaaaatgatgcttgatgttaaggagatattcacatgccaaattcaggttgtaaggatgccacaaaaatgaagacctttgttgtagtgacataaggagtttcgaaactgcaaggaattttaaatttgaatatttttcagtgagatgttaaggtagataaagttgttgagttagatgaaacaaaaaaaaagaggcactgatcgttaagacgacaatacatgatatcatgaaccaaatgattcgggaacttccaaaaaccaatccagtatacctcatgctacgcacatcatttggtttctcagctaaaggaaccgggcttaaagctcttgaatttgccctctccatctgtgacagttttgatatgtatggcttcaccgtagacccaggttacaaggaatgttctgtgcttacagctgaagttatctttcaggacaaggtacttctcagagaaaatcatgtgcagctggtgaaaatccattcaccgatgcaaggagatcctggcaggacagtgaggtggctgcctaccaaggctaccatcgaggctgctagagttgcttccgagaagttgttgaagagacctggtgctggaagtgatgatcctctggggacttgcaccatgataaagaagcgcaggaaagggaaggcgccaaacagatctggtctacgagatgctgccatgaagcacctcgaggacatgaaaggtgccaccaggtatcccttggagcgaaatgcagggggtggttacctctgcatgatcaatgatagatacgaccgcggctgattatggcatcagtgccccctccgcccctcccctccacttgagtcgaagaaaggaatgcttgtgataaacttgcagtttgagggaacgaaaaggtcgattctttgatttatgcagctggtgtacaacgtttgagtgtagtgaaagttaggtgtaatgttttgagtgtagagaaagctatatgttgtggatggatacgaatggtcaaattgtagcacttttggtgcttataatactaataggtgagcgcccgtacgttgcaacgaagacatataatatacacattttatatataagtcactgtgatattatatgtccccgttgcaacgcacgggcactcacctagttgattgaatattcctattcctattctttatagtagaccccacgttgaattaggttttataaataaatataaaaagaaaaaaaaaccattaatctatta

SEQ ID NO: 31159 - DNA, 3907 bp, Zea Mays
gtggcggcggcgggaggtagccttcgtatgcggcgtcggatggggcggatgcggcggcgatcccggtcgcctcaaggaagatggtgcagagcctcaaggggatcctggccgaccgctcggagggagagatctacgccacgctctgcgactgcggaatggaccccgacatagccgtcgagaggctcatctcccagacccctgcacaactaaggtggagccttacaaagcaagagtggttgcttgcaaccggcctcacaggtattttgttattttgctcatcgaattcattggctgtctgatttatgcttacctgattcctacacagtcgaattcattagctgtctgatttttgcacaatccactttattttgctcattgagtacagtagggcataagcgaagtgaaatagggtgaatgaaataaataaaaaggacaagttgttttgttgtattatgagtgtgatccttggctcctaatgtctcatcatgcctaagacaatcagtaagtgctgggggcagaggagttccagctcggtgcctctccattaaataaagagcaacacaaaactctctcaaagaaagcatgccatcattgccttggtcagacaaatcccacctcttggaagcctccaactgaggaacagattgcgagcttctacgccagttattttgccatctctgtccctatcaacatcgtcaaatactttcatgtacttatggatgtcagactgagtagtttttggccattggagagatggattagaaatcccagcagagacaacaggtgcagctggagcaggactgggctttacgacatgctgagtgtgttgatcccaactcactggagttgttcttctcttatctaccttttgtgcttctgttctatatcttatatcctatatagtgccaaacactgcactcgtaggcctaaatttgttcaatatataaatgtgcagagttttgaagctttgaaccccagagccgttgctgttgtgatagaccccatccagaagaggacgatcgattttcgattttgtaggagagctgttaaacctctccggctccgccactttcgtttccgtttctgcgctttgtttggtgccgaattttctgcacgttttaccaattctgaacgaaaattccctttctgttttgccgactgtagggctgttgaatccgtatgggctatggtcgccgaggcactcgcagtcggacgtgtcttcatcggagatggagtttggtacagcgcgccagtacgacaccaccgaccttgatgaagcacttcaaagagagagttttgaagctttgaaccccagagccgttgctgttgtgatagaccccatccagaagaggacgatcgattttcgattttggctgttgaatccgtatgggctatggtcgccgaggcactcgcagtcggacgtgtcttcatcggagatggagtttggtacagcgcgccagtacgacaccaccgaccttgatgaagcacttcaaagagagatctcaaaagaaagatcttcaaagcttgagaaaaggagtaaaggacctcctgctgttgcagggcatatgtcactcacggccttccacagactcaagcagaaaaaggctttattttctgtagcagcaggagcacagtgccccaaggtcgtagttaaggggtttttgttttaacttgtaataacctgttaaggggtttttgtattaaatatgaattgcatgtagaacataaaatccattgtgtcataatctggtaggtaagtgcttgaggctggctgcataatagcagagccgcccacctgccccacaccatgtcgtcaccgagttgtgagtggggcatccgtcgcctctaatccaaataaggaggagctgcggccagacatgggcggcagagtagtatctggatccgctgaacacccaccggtggtatctagctttcctatcaatcagtggctttcaaagctgatgttcttgctgctgccaacacaacaacagaagttgcaatgaggcttgtgagacctgagacgaagtgtctaggatgaagtttcagatatgtcagctgatttcagtttcagagctgcggattttagtttcaaagctgcagatttcaggctgcaagatttctacagaatgtgaagactatgctatcaaaaaaagcttttctaatttacctaggatgaagttcaggattgtttaggatgaatcatgtgtttatctatcttcaataatatttttttaccccatttaactcggaagcggatggaaagaagattcagatccagctgacagggttcatggaaaagaacacagtgaagttcatgaaggagctctggagccttctcctcagtgcgcagcagaatgccagtggggtgcctcaacagtttctggatgaaaaggaggctgagatacatcagaaaaaggatggggatgttggtaactcaagatcctatggtgatccagttgcctctgctttaaacagtacaaatttcaatatcgaggaagaaaaggacaatgatttcaagcgcacctcaagaccaaaaaataggttgtaaggatgccacaaaaatgatgcttgatgttaaggagatattcacatgccaaattcaggttgtaaggatgccacaaaaatgaagacctttgttgtagtgacataaggagtttcgaaactgcaaggaattttaaatttgaatatttttcagtgagatgttaaggtagataaagttgttgagttagatggtaagtctgccatctatattttgtcccctatcagtgagatacaaatatgaaaaggcatgctgattttatggttgcagaaacaaaaaaaaagaggcactgatcgttaagacgacaatacatgatatcatgaaccaaatgattcgggaacttccaaaaaccaatccagtatacctcatgctacgcacatcatttggtttctcagctaaaggaaccgggcttaaagctcttgaatttgccctctccatctgtgacagttttgatatgtatggcttcaccgtagacccaggttacaaggaatggttagtgcatgtcgatctccacgtagtgacaataaagaattctggtctacagttctgtgcttacagctgaagttatctttcaggacaaggtacttctcagagaaaatcatgtgcagctggtgaaaatccattcaccgatgcaaggagatcctggcaggacagtgaggtggctgcctaccaaggctaccatcgaggctgctagagttgcttccgagaagttgttgaagagacctggtgctggaagtgatgatcctctggggacttgcaccatgataaagaagcgcaggaaagggaaggcgccaaacagatctggtctacgagatgctgccatgaagcacctcgaggacatgaaaggtgccaccaggtatcccttggagcgaaatgcagggggtggttacctctgcatgatcaatgatagatacgaccgcggctgattatggcatcagtgccccctccgcccctcccctccacttgagtcgaagaaaggaatgcttgtgataaacttgcagtttgagggaacgaaaaggtcgattctttgatttatgcagctggtgtacaacgtttgagtgtagtgaaagttaggtgtaatgttttgagtgtagagaaagctatatgttgtggatggatacgaatggtcaaattgtagcacttttggtgcttataatactaataggtgagcgcccgtacgttgcaacgaagacatataatatacacattttatatataagtcactgtgatattatatgtccccgttgcaacgcacgggcactcacctagttgattgaatattcctattcctattctttatagtagaccccacgttgaattaggttttataaataaatataaaaagaaaaaaaaaccattaatctatta

SEQ ID NO: 31160 - DNA, 3068 bp, Zea Mays
cgggaggtagccttcgtatgcggcgtcggatggggcggatgcggcggcgatcccggtcgcctcaaggaagatggtgcagagcctcaaggggatcctggccgaccgctcggagggagagatctacgccacgctctgcgactgcggaatggaccccgacatagccgtcgagaggctcatctcccagacccctgcacaactaaggtggagccttacaaagcaagagtggttgcttgcaaccggcctcacagagttttgaagctttgaaccccagagccgttgctgttgtgatagaccccatccagaagaggacgatcgattttcgattttgtaggagagctgttaaacctctccggctccgccactttcgtttccgtttctgcgctttgtttggtgccgaattttctgcacgttttaccaattctgaacgaaaattccctttctgttttgccgactgtagggctgttgaatccgtatgggctatggtcgccgaggcactcgcagtcggacgtgtcttcatcggagatggagtttggtacagcgcgccagtacgacaccaccgaccttgatgaagcacttcaaagagagagttttgaagctttgaaccccagagccgttgctgttgtgatagaccccatccagaagaggacgatcgattttcgattttgtaggagagctgttaaacctctccggcttcgccactttcgtttccgtttctgcgctttgtttggtgccgaattttctgcacattttaccaattctgaacgaaaattccctttctgttttgccgactgtagggctgttgaatccgtatgggctatggtcgccgaggcactcgcagtcggacgtgtcttcatcggagatggagtttggtacagcgcgccagtacgacaccaccgaccttgatgaagcacttcaaagagagagccgcccacctgccccacaccatgtcgtcaccgagttgtgagtggggcatccgtcgcctctaatccaaataaggaggagctgcggccagacatgggcggcagagtagtatctggatccgctgaacacccaccggtggtatctagctttcctatcaatcagtggctttcaaagctgatgttcttgctgctgccaacacaacaacagaagttgcaatgaggcttgtgagacctgagacgaagtgtctaggatgaagtttcagatatgtcagctgatttcagtttcagagctgcggattttagtttcaaagctgcagatttcagtactagagctgccaaatttcagttttagagttgcaaattccatttttagagctacactatgaatccacacttgattctattttcttttcaatttcagggctgcaagatttctacagaatgtgaagactatgctatcaaaaaaagcttttctaatttacctaggatgaagttcaggattgtttaggatgaatcatgtgtttatctatcttcaataatatttttttaccccatttaactcggaagcggatggaaagaagattcagatccagctgacagggttcatggaaaagaacacagtgaagttcatgaaggagctctggagccttctcctcagtgcgcagcagaatgccagtggggtgcctcaacagtttctggatgaaaaggaggctgagatacatcagaaaaaggcataggatgacaggagtgcgcaggagatccaaaagaagccagaaaaggagggaatggactcagaactggaaaagaacaaaacgatgtacaaatttcaatatcgaggaagaaaaggacaatgatttcaagcgcacctcaagaccaaaaaataggttgtaaggatgccacaaaaatgatgcttgatgttaaggagatattcacatgccaaattcaggttgtaaggatgccacaaaaatgaagacctttgttgtagtgacataaggagtttcgaaactgcaaggaattttaaatttgaatatttttcagtgagatgttaagaaacaaaaaaaaagaggcactgatcgttaagacgacaatacatgatatcatgaaccaaatgattcgggaacttccaaaaaccaatccagtatacctcatgctacgcacatcatttggtttctcagctaaaggaaccgggcttaaagctcttgaatttgccctctccatctgtgacagttttgatatgtatggcttcaccgtagacccaggttacaaggaatggttagtgcatgtcgatctccacgtagtgacaataaagaattctggtctacagttctgtgcttacagctgaagttatctttcaggacaaggtacttctcagagaaaatcatgtgcagctggtgaaaatccattcaccgatgcaaggagatcctggcaggacagtgaggtggctgcctaccaaggctaccatcgaggctgctagagttgcttccgagaagttgttgaagagacctggtgctggaagtgatgatcctctggggacttgcaccatgataaagaagcgcaggaaagggaaggcgccaaacagatctggtctacgagatgctgccatgaagcacctcgaggacatgaaaggtgccaccaggtatcccttggagcgaaatgcagggggtggttacctctgcatgatcaatgatagatacgaccgcggctgattatggcatcagtgccccctccgcccctcccctccacttgagtcgaagaaaggaatgcttgtgataaacttgcagtttgagggaacgaaaaggtcgattctttgatttatgcagctggtgtacaacgtttgagtgtagtgaaagttaggtgtaatgttttgagtgtagagaaagctatatgttgtggatggatacgaatggtcaaattgtagcacttttggtgcttataatactaataggtgagcgcccgtacgttgcaacgaagacatataatatacacattttatatataagtcactgtgatattatatgtccccgttgcaacgcacgggcactcacctagttgattgaatattcctattcctattctttatagtagaccccacgttgaattaggttttataaataaatataaaaagaaaaaaaaaccattaatctatta

SEQ ID NO: 31161 - DNA, 3539 bp, Zea Mays
tagccttcgtatgcggcgtcggatggggcggatgcggcggcgatcccggtcgcctcaaggaagatggtgcagagcctcaaggggatcctggccgaccgctcggagggagagatctacgccacgctctgcgactgcggaatggaccccgacatagccgtcgagaggctcatctcccagacccctgcacaactaaggtggagccttacaaagcaagagtggttgcttgcaaccggcctcacagagttttgaagctttgaaccccagagccgttgctgttgtgatagaccccatccagaagaggacgatcgattttcgattttggctgttgaatccgtatgggctatggtcgccgaggcactcgcagtcggacgtgtcttcatcggagatggagtttggtacagcgcgccagtacgacaccaccgaccttgatgaagcacttcaaagagagagccgcccacctgccccacaccatgtcgtcaccgagttgtgagtggggcatccgtcgcctctaatccaaataaggaggagctgcggccagacatgggcggcagagtagtatctggatccgctgaacacccaccggtggtatctagctttcctatcaatcagtggctttcaaaggtacactcctattgtgtgcgtactaatttttaatttattattgttcactctcgctttgttttcttgttgttgatgcatctcctctcgtactctactgcattcattgaagcactttgcactttcatcaggacgactcagagagtgtctcgctcctgtgtttataatggccaaatagtctcgaatgtctggccatgtttgacgcattcatgtattttgggcattttgtcaaacgagttcacatcattaggcattgtgtcttgggtattactccattatgaaatcgtgtttgtaccgaaaattacaatttgtaggctgcatcatttactcatttctggagtgggaacctgtgagagtaatttgttctgacaatgttgctattcctatttgctaattaaggctactagggttaaatattatggatcacatttattttcttttttaggtaccctgaagacttcatttatgtttttaatgaacgataactaattcactgcgccatttgcacacaatgttttgctatcattgtcacatactagctccctgttttgggatatttcttaaaagttttaggtgttaacatttctccaacatagaaaaagttttaggtgttagcattacctaaatatggatttaggtaattcttcatgtcgctattacaatcattggtcaaacttattgttctgaattcctcgtgagtcatctgtatctacagaaaagttctgtccatagatgaatatgcatcatattataaagatatagaccccgtggctcctttcaagacttgaaaagttgggcaaacagatagttacatgtctaccaaagtgcacccatcatatgatgtttatgtagagcgagttaatagagtatttgttgtcagcgatcctgttgactggggaagagatctacatgtacttcttttcatgcccgggcctcactaatagaaaactttcttgggttgcatttgtttgatattcatcgaatatcttaatgagtgacccataaacaccttttcctctaaagtgcatttgtttcatgtgaaattgtgattacttcctattgatatacataagttcaataatctgatttttttaaaacaatacgaaaggtactctgtgttatctcgtctactcatgaacttcctgggactgaaatagtgggtcgtattgatgcctttattgctgtgatggcacatacacatgtaattgcaaatggccctatcagctgatgttcttgctgctgccaacacaacaacagaagttgcaatgaggcttgtgagacctgagacgaaggaagcggatggaaagaagattcagatccagctgacagggttcatggaaaagaacacagtgaagttcatgaaggagctctggagccttctcctcagtgcgcagcagaatgccagtggggtgcctcaacagtttctggatgaaaaggaggctgagatacatcagaaaaaggatgacaggagtgcgcaggagatccaaaagaagccagaaaaggagggaatggactcagaactggaaaagaacaaaacgatgtacaaatttcaatatcgaggaagaaaaggacaatgatttcaagcgcacctcaagaccaaaaaataggttgtaaggatgccacaaaaatgatgcttgatgttaaggagatattcacatgccaaattcaggttgtaaggatgccacaaaaatgaagacctttgttgtagtgacataaggagtttcgaaactgcaaggaattttaaatttgaatatttttcagtgagatgttaaggtagataaagttgttgagttagatggtaagtctgccatctatattttgtcccctatcagtgagatacaaatatgaaaaggcatgctgattttatggttgcagaaacaaaaaaaaagaggcactgatcgttaagacgacaatacatgatatcatgaaccaaatgattcgggaacttccaaaaaccaatccagtatacctcatgctacgcacatcatttggtttctcagctaaaggaaccgggcttaaagctcttgaatttgccctctccatctgtgacagttttgatatgtatggcttcaccgtagacccaggttacaaggaatgttctgtgcttacagctgaagttatctttcaggacaaggtacttctcagagaaaatcatgtgcagctggtgaaaatccattcaccgatgcaaggagatcctggcaggacagtgaggtggctgcctaccaaggctaccatcgaggctgctagagttgcttccgagaagttgttgaagagacctggtgctggaagtgatgatcctctggggacttgcaccatgataaagaagcgcaggaaagggaaggcgccaaacagatctggtctacgagatgctgccatgaagcacctcgaggacatgaaaggtgccaccaggtatcccttggagcgaaatgcagggggtggttacctctgcatgatcaatgatagatacgaccgcggctgattatggcatcagtgccccctccgcccctcccctccacttgagtcgaagaaaggaatgcttgtgataaacttgcagtttgagggaacgaaaaggtcgattctttgatttatgcagctggtgtacaacgtttgagtgtagtgaaagttaggtgtaatgttttgagtgtagagaaagctatatgttgtggatggatacgaatggtcaaattgtagcacttttggtgcttataatactaataggtgagcgcccgtacgttgcaacgaagacatataatatacacattttatatataagtcactgtgatattatatgtccccgttgcaacgcacgggcactcacctagttgattgaatattcctattcctattctttatagtagaccccacgttgaattaggttttataaataaatataaaaagaaaaaaaaaccattaatctatta

SEQ ID NO: 31162 - DNA, 3838 bp, Zea Mays
cttcgtatgcggcgtcggatggggcggatgcggcggcgatcccggtcgcctcaaggaagatggtgcagagcctcaaggggatcctggccgaccgctcggagggagagatctacgccacgctctgcgactgcggaatggaccccgacatagccgtcgagaggctcatctcccagacccctgcacaactaaggtggagccttacaaagcaagagtggttgcttgcaaccggcctcacagggctgttgaatccgtatgggctatggtcgccgaggcactcgcagtcggacgtgtcttcatcggagatggagtttggtacagcgcgccagtacgacaccaccgaccttgatgaagcacttcaaagagagagttttgaagctttgaaccccagagccgttgctgttgtgatagaccccatccagaagaggacgatcgattttcgattttgtaggagagctgttaaacctctccggcttcgccactttcgtttccgtttctgcgctttgtttggtgccgaattttctgcacattttaccaattctgaacgaaaattccctttctgttttgccgactgtagggctgttgaatccgtatgggctatggtcgccgaggcactcgcagtcggacgtgtcttcatcggagatggagtttggtacagcgcgccagtacgacaccaccgaccttgatgaagcacttcaaagagaggtaatttgcttagatatttttaataaaacttatttttagtttttcagtgcttagttaaaatcaagtggcattgatactatcaaaggaccatttgtttttcgttggcatttcttgtggatatcgtggtcagatgtacaatacagattaatagtatgagcaaagtcctttgatgaatattttaatgggtcttttttttctgggcacaataggggactggcgaataatatccaaacaatgttcctacattgtatatttatctttcgataaagttgtttaagtcttggaacttagccatgttgatgccaaataggcagtagaacatgagtttgatttcctatatatcaaccaaaaaatacatttaataagttctaataaaaagaacagataagtgaaaaagagagagagagaaggaattaggctaataaaatagatttattcatgactacccttaagatctcaaaagaaagatcttcaaagcttgagaaaaggagtaaaggacctcctgctgttgcagggcatatgtcactcacggcctgtaagtttttccaagtctttagtgccattactaggtttcacaaatatggtttagtaaagttattcaagtgggctaagtaaaaaaataacaaaagacaaaaaaggaataccaaaaacaaattaggcgatgttttaccaagacaaaataaataatttcggtgaaggaaaatgttatttcattaattaatgtcaaatggcaataaagagataaagtggacaacaagactgtcgtttctctgatctgtttgtagtccacagactcaagcagaaaaaggctttattttctgtagcagcaggagcacagtgccccaaggtcgtagttaaggggtttttgttttaacttgtaataacctgttaaggggtttttgtattaaatatgaattgcatgtagaacataaaatccattgtgtcataatctggtaggtaagtgcttgaggctggctgcataatagcaggtttgttttcatttttcaaacacaaacatgtatcctttttgaagcaaacacatttgatcgatgtcttgtgtgggtatcatgcactttttgcgtgggttccacctccactgcgcgggctgtatatagagccgcccacctgccccacaccatgtcgtcaccgagttgtgagtggggcatccgtcgcctctaatccaaataaggaggagctgcggccagacatgggcggcagagtagtatctggatccgctgaacacccaccggtggtatctagctttcctatcaatcagtggctttcaaagctgatgttcttgctgctgccaacacaacaacagaagttgcaatgaggcttgtgagacctgagacgaagtgtctaggatgaagtttcagatatgtcagctgatttcagtttcagagctgcggattttagtttcaaagctgcagatttcaggctgcaagatttctacagaatgtgaagactatgctatcaaaaaaagcttttctaatttacctaggatgaagttcaggattgtttaggatgaatcatgtgtttatctatcttcaataatatttttttaccccatttaactcggaagcggatggaaagaagattcagatccagctgacagggttcatggaaaagaacacagtgaagttcatgaaggagctctggagccttctcctcagtgcgcagcagaatgccagtggggtgcctcaacagtttctggatgaaaaggaggctgagatacatcagaaaaaggcataggatgacaggagtgcgcaggagatccaaaagaagccagaaaaggagggaatggactcagaactggaaaagaacaaaacgatgtacaaatttcaatatcgaggaagaaaaggacaatgatttcaagcgcacctcaagaccaaaaaataggttgtaaggatgccacaaaaatgatgcttgatgttaaggagatattcacatgccaaattcaggttgtaaggatgccacaaaaatgaagacctttgttgtagtgacataaggagtttcgaaactgcaaggaattttaaatttgaatatttttcagtgagatgttaaggtagataaagttgttgagttagatgaaacaaaaaaaaagaggcactgatcgttaagacgacaatacatgatatcatgaaccaaatgattcgggaacttccaaaaaccaatccagtatacctcatgctacgcacatcatttggtttctcagctaaaggaaccgggcttaaagctcttgaatttgccctctccatctgtgacagttttgatatgtatggcttcaccgtagacccaggttacaaggaatgttctgtgcttacagctgaagttatctttcaggacaaggtacttctcagagaaaatcatgtgcagctggtgaaaatccattcaccgatgcaaggagatcctggcaggacagtgaggtggctgcctaccaaggctaccatcgaggctgctagagttgcttccgagaagttgttgaagagacctggtgctggaagtgatgatcctctggggacttgcaccatgataaagaagcgcaggaaagggaaggcgccaaacagatctggtctacgagatgctgccatgaagcacctcgaggacatgaaaggtgccaccaggtatcccttggagcgaaatgcagggggtggttacctctgcatgatcaatgatagatacgaccgcggctgattatggcatcagtgccccctccgcccctcccctccacttgagtcgaagaaaggaatgcttgtgataaacttgcagtttgagggaacgaaaaggtcgattctttgatttatgcagctggtgtacaacgtttgagtgtagtgaaagttaggtgtaatgttttgagtgtagagaaagctatatgttgtggatggatacgaatggtcaaattgtagcacttttggtgcttataatactaataggtgagcgcccgtacgttgcaacgaagacatataatatacacattttatatataagtcactgtgatattatatgtccccgttgcaacgcacgggcactcacctagttgattgaatattcctattcctattctttatagtagaccccacgttgaattaggttttataaataaatataaaaagaaaaaaaaaccattaatctatta

SEQ ID NO: 31163 - DNA, 3312 bp, Zea Mays
gtcggatggggcggatgcggcggcgatcccggtcgcctcaaggaagatggtgcagagcctcaaggggatcctggccgaccgctcggagggagagatctacgccacgctctgcgactgcggaatggaccccgacatagccgtcgagaggctcatctcccagacccctgcacaactaaggtggagccttacaaagcaagagtggttgcttgcaaccggcctcacagagttttgaagctttgaaccccagagccgttgctgttgtgatagaccccatccagaagaggacgatcgattttcgattttgtaggagagctgttaaacctctccggctccgccactttcgtttccgtttctgcgctttgtttggtgccgaattttctgcacgttttaccaattctgaacgaaaattccctttctgttttgccgactgtagggctgttgaatccgtatgggctatggtcgccgaggcactcgcagtcggacgtgtcttcatcggagatggagtttggtacagcgcgccagtacgacaccaccgaccttgatgaagcacttcaaagagagagttttgaagctttgaaccccagagccgttgctgttgtgatagaccccatccagaagaggacgatcgattttcgattttggctgttgaatccgtatgggctatggtcgccgaggcactcgcagtcggacgtgtcttcatcggagatggagtttggtacagcgcgccagtacgacaccaccgaccttgatgaagcacttcaaagagagatctcaaaagaaagatcttcaaagcttgagaaaaggagtaaaggacctcctgctgttgcagggcatatgtcactcacggccttccacagactcaagcagaaaaaggctttattttctgtagcagcaggagcacagtgccccaaggtcgtagttaaggggtttttgttttaacttgtaataacctgttaaggggtttttgtattaaatatgaattgcatgtagaacataaaatccattgtgtcataatctggtaggtaagtgcttgaggctggctgcataatagcaggtttgttttcatttttcaaacacaaacatgtatcctttttgaagcaaacacatttgatcgatgtcttgtgtgggtatcatgcactttttgcgtgggttccacctccactgcgcgggctgtatatagagccgcccacctgccccacaccatgtcgtcaccgagttgtgagtggggcatccgtcgcctctaatccaaataaggaggagctgcggccagacatgggcggcagagtagtatctggatccgctgaacacccaccggtggtatctagctttcctatcaatcagtggctttcaaagctgatgttcttgctgctgccaacacaacaacagaagttgcaatgaggcttgtgagacctgagacgaagtgtctaggatgaagtttcagatatgtcagctgatttcagtttcagagctgcggattttagtttcaaagctgcagatttcagtactagagctgccaaatttcagttttagagttgcaaattccatttttagagctacactatgaatccacacttgattctattttcttttcaatttcagggctgcaagatttctacagaatgtgaagactatgctatcaaaaaaagcttttctaatttacctaggatgaagttcaggattgtttaggatgaatcatgtgtttatctatcttcaataatatttttttaccccatttaactcggaagcggatggaaagaagattcagatccagctgacagggttcatggaaaagaacacagtgaagttcatgaaggagctctggagccttctcctcagtgcgcagcagaatgccagtggggtgcctcaacagtttctggatgaaaaggaggctgagatacatcagaaaaaggcataggatgacaggagtgcgcaggagatccaaaagaagccagaaaaggagggaatggactcagaactggaaaagaacaaaacgatgtacaaatttcaatatcgaggaagaaaaggacaatgatttcaagcgcacctcaagaccaaaaaataggttgtaaggatgccacaaaaatgatgcttgatgttaaggagatattcacatgccaaattcaggttgtaaggatgccacaaaaatgaagacctttgttgtagtgacataaggagtttcgaaactgcaaggaattttaaatttgaatatttttcagtgagatgttaaggtagataaagttgttgagttagatggtaagtctgccatctatattttgtcccctatcagtgagatacaaatatgaaaaggcatgctgattttatggttgcagaaacaaaaaaaaagaggcactgatcgttaagacgacaatacatgatatcatgaaccaaatgattcgggaacttccaaaaaccaatccagtatacctcatgctacgcacatcatttggtttctcagctaaaggaaccgggcttaaagctcttgaatttgccctctccatctgtgacagttttgatatgtatggcttcaccgtagacccaggttacaaggaatgctggtgaaaatccattcaccgatgcaaggagatcctggcaggacagtgaggtggctgcctaccaaggctaccatcgaggctgctagagttgcttccgagaagttgttgaagagacctggtgctggaagtgatgatcctctggggacttgcaccatgataaagaagcgcaggaaagggaaggcgccaaacagatctggtctacgagatgctgccatgaagcacctcgaggacatgaaaggtgccaccaggtatcccttggagcgaaatgcagggggtggttacctctgcatgatcaatgatagatacgaccgcggctgattatggcatcagtgccccctccgcccctcccctccacttgagtcgaagaaaggaatgcttgtgataaacttgcagtttgagggaacgaaaaggtcgattctttgatttatgcagctggtgtacaacgtttgagtgtagtgaaagttaggtgtaatgttttgagtgtagagaaagctatatgttgtggatggatacgaatggtcaaattgtagcacttttggtgcttataatactaataggtgagcgcccgtacgttgcaacgaagacatataatatacacattttatatataagtcactgtgatattatatgtccccgttgcaacgcacgggcactcacctagttgattgaatattcctattcctattctttatagtagaccccacgttgaattaggttttataaataaatataaaaagaaaaaaaaaccattaatctatta

SEQ ID NO: 31164 - DNA, 2966 bp, Zea Mays
ctcggagggagagatctacgccacgctctgcgactgcggaatggaccccgacatagccgtcgagaggctcatctcccagacccctgcacaactaaggtggagccttacaaagcaagagtggttgcttgcaaccggcctcacagagttttgaagctttgaaccccagagccgttgctgttgtgatagaccccatccagaagaggacgatcgattttcgattttgtaggagagctgttaaacctctccggctccgccactttcgtttccgtttctgcgctttgtttggtgccgaattttctgcacgttttaccaattctgaacgaaaattccctttctgttttgccgactgtagggctgttgaatccgtatgggctatggtcgccgaggcactcgcagtcggacgtgtcttcatcggagatggagtttggtacagcgcgccagtacgacaccaccgaccttgatgaagcacttcaaagagagagttttgaagctttgaaccccagagccgttgctgttgtgatagaccccatccagaagaggacgatcgattttcgattttggctgttgaatccgtatgggctatggtcgccgaggcactcgcagtcggacgtgtcttcatcggagatggagtttggtacagcgcgccagtacgacaccaccgaccttgatgaagcacttcaaagagagagccgcccacctgccccacaccatgtcgtcaccgagttgtgagtggggcatccgtcgcctctaatccaaataaggaggagctgcggccagacatgggcggcagagtagtatctggatccgctgaacacccaccggtggtatctagctttcctatcaatcagtggctttcaaaggtactctgtgttatctcgtctactcatgaacttcctgggactgaaatagtgggtcgtattgatgcctttattgctgtgatggcacatacacatgtaattgcaaatggccctatcagctgatgttcttgctgctgccaacacaacaacagaagttgcaatgaggcttgtgagacctgagacgaagtgtctaggatgaagtttcagatatgtcagctgatttcagtttcagagctgcggattttagtttcaaagctgcagatttcaggctgcaagatttctacagaatgtgaagactatgctatcaaaaaaagcttttctaatttacctaggatgaagttcaggattgtttaggatgaatcatgtgtttatctatcttcaataatatttttttaccccatttaactcggtgcggactgtatctgcaatttgctggagctgtttttttctttgaggcaccccacgtttcttctgattttagacattaattgtctgtatcaaagatggtagcttatggcaatgaggtgtgtttatgtttttggtttgttaatggcaggaagcggatggaaagaagattcagatccagctgacagggttcatggaaaagaacacagtgaagttcatgaaggagctctggagccttctcctcagtgcgcagcagaatgccagtggggtgcctcaacagtttctggatgaaaaggaggctgagatacatcagaaaaaggcataggatgacaggagtgcgcaggagatccaaaagaagccagaaaaggagggaatggactcagaactggaaaagaacaaaacgatggatggggatgttggtaactcaagatcctatggtgatccagttgcctctgctttaaacagtacaaatttcaatatcgaggaagaaaaggacaatgatttcaagcgcacctcaagaccaaaaaataggttgtaaggatgccacaaaaatgatgcttgatgttaaggagatattcacatgccaaattcaggttgtaaggatgccacaaaaatgaagacctttgttgtagtgacataaggagtttcgaaactgcaaggaattttaaatttgaatatttttcagtgagatgttaaggtagataaagttgttgagttagatgaaacaaaaaaaaagaggcactgatcgttaagacgacaatacatgatatcatgaaccaaatgattcgggaacttccaaaaaccaatccagtatacctcatgctacgcacatcatttggtttctcagctaaaggaaccgggcttaaagctcttgaatttgccctctccatctgtgacagttttgatatgtatggcttcaccgtagacccaggttacaaggaatgctggtgaaaatccattcaccgatgcaaggagatcctggcaggacagtgaggtggctgcctaccaaggctaccatcgaggctgctagagttgcttccgagaagttgttgaagagacctggtgctggaagtgatgatcctctggggacttgcaccatgataaagaagcgcaggaaagggaaggcgccaaacagatctggtctacgagatgctgccatgaagcacctcgaggacatgaaaggtgccaccaggtatcccttggagcgaaatgcagggggtggttacctctgcatgatcaatgatagatacgaccgcggctgattatggcatcagtgccccctccgcccctcccctccacttgagtcgaagaaaggaatgcttgtgataaacttgcagtttgagggaacgaaaaggtcgattctttgatttatgcagctggtgtacaacgtttgagtgtagtgaaagttaggtgtaatgttttgagtgtagagaaagctatatgttgtggatggatacgaatggtcaaattgtagcacttttggtgcttataatactaataggtgagcgcccgtacgttgcaacgaagacatataatatacacattttatatataagtcactgtgatattatatgtccccgttgcaacgcacgggcactcacctagttgattgaatattcctattcctattctttatagtagaccccacgttgaattaggttttataaataaatataaaaagaaaaaaaaaccattaatctatta

SEQ ID NO: 31165 - DNA, 2356 bp, Zea Mays
ccgacatagccgtcgagaggctcatctcccagacccctgcacaactaaggtggagccttacaaagcaagagtggttgcttgcaaccggcctcacagagttttgaagctttgaaccccagagccgttgctgttgtgatagaccccatccagaagaggacgatcgattttcgattttggctgttgaatccgtatgggctatggtcgccgaggcactcgcagtcggacgtgtcttcatcggagatggagtttggtacagcgcgccagtacgacaccaccgaccttgatgaagcacttcaaagagaggtaagtgcttgaggctggctgcataatagcagagccgcccacctgccccacaccatgtcgtcaccgagttgtgagtggggcatccgtcgcctctaatccaaataaggaggagctgcggccagacatgggcggcagagtagtatctggatccgctgaacacccaccggtggtatctagctttcctatcaatcagtggctttcaaagctgatgttcttgctgctgccaacacaacaacagaagttgcaatgaggcttgtgagacctgagacgaagtgtctaggatgaagtttcagatatgtcagctgatttcagtttcagagctgcggattttagtttcaaagctgcagatttcaggctgcaagatttctacagaatgtgaagactatgctatcaaaaaaagcttttctaatttacctaggatgaagttcaggattgtttaggatgaatcatgtgtttatctatcttcaataatatttttttaccccatttaactcggaagcggatggaaagaagattcagatccagctgacagggttcatggaaaagaacacagtgaagttcatgaaggagctctggagccttctcctcagtgcgcagcagaatgccagtggggtgcctcaacagtttctggatgaaaaggaggctgagatacatcagaaaaaggcataggatgacaggagtgcgcaggagatccaaaagaagccagaaaaggagggaatggactcagaactggaaaagaacaaaacgatgtacaaatttcaatatcgaggaagaaaaggacaatgatttcaagcgcacctcaagaccaaaaaataggttgtaaggatgccacaaaaatgatgcttgatgttaaggagatattcacatgccaaattcaggttgtaaggatgccacaaaaatgaagacctttgttgtagtgacataaggagtttcgaaactgcaaggaattttaaatttgaatatttttcagtgagatgttaaggtagataaagttgttgagttagatgaaacaaaaaaaaagaggcactgatcgttaagacgacaatacatgatatcatgaaccaaatgattcgggaacttccaaaaaccaatccagtatacctcatgctacgcacatcatttggtttctcagctaaaggaaccgggcttaaagctcttgaatttgccctctccatctgtgacagttttgatatgtatggcttcaccgtagacccaggttacaaggaatgttctgtgcttacagctgaagttatctttcaggacaaggtacttctcagagaaaatcatgtgcagctggtgaaaatccattcaccgatgcaaggagatcctggcaggacagtgaggtggctgcctaccaaggctaccatcgaggctgctagagttgcttccgagaagttgttgaagagacctggtgctggaagtgatgatcctctggggacttgcaccatgataaagaagcgcaggaaagggaaggcgccaaacagatctggtctacgagatgctgccatgaagcacctcgaggacatgaaaggtgccaccaggtatcccttggagcgaaatgcagggggtggttacctctgcatgatcaatgatagatacgaccgcggctgattatggcatcagtgccccctccgcccctcccctccacttgagtcgaagaaaggaatgcttgtgataaacttgcagtttgagggaacgaaaaggtcgattctttgatttatgcagctggtgtacaacgtttgagtgtagtgaaagttaggtgtaatgttttgagtgtagagaaagctatatgttgtggatggatacgaatggtcaaattgtagcacttttggtgcttataatactaataggtgagcgcccgtacgttgcaacgaagacatataatatacacattttatatataagtcactgtgatattatatgtccccgttgcaacgcacgggcactcacctagttgattgaatattcctattcctattctttatagtagaccccacgttgaattaggttttataaataaatataaaaagaaaaaaaaaccattaatctatta

SEQ ID NO: 31166 - DNA, 4682 bp, Zea Mays
cgacatagccgtcgagaggctcatctcccagacccctgcacaactaaggtggagccttacaaagcaagagtggttgcttgcaaccggcctcacagagttttgaagctttgaaccccagagccgttgctgttgtgatagaccccatccagaagaggacgatcgattttcgattttgtaggagagctgttaaacctctccggctccgccactttcgtttccgtttctgcgctttgtttggtgccgaattttctgcacgttttaccaattctgaacgaaaattccctttctgttttgccgactgtagggctgttgaatccgtatgggctatggtcgccgaggcactcgcagtcggacgtgtcttcatcggagatggagtttggtacagcgcgccagtacgacaccaccgaccttgatgaagcacttcaaagagagagttttgaagctttgaaccccagagccgttgctgttgtgatagaccccatccagaagaggacgatcgattttcgattttggctgttgaatccgtatgggctatggtcgccgaggcactcgcagtcggacgtgtcttcatcggagatggagtttggtacagcgcgccagtacgacaccaccgaccttgatgaagcacttcaaagagagatctcaaaagaaagatcttcaaagcttgagaaaaggagtaaaggacctcctgctgttgcagggcatatgtcactcacggccttccacagactcaagcagaaaaaggctttattttctgtagcagcaggagcacagtgccccaaggtcgtagttaaggggtttttgttttaacttgtaataacctgttaaggggtttttgtattaaatatgaattgcatgtagaacataaaatccattgtgtcataatctggtaggtaagtgcttgaggctggctgcataatagcaggtttgttttcatttttcaaacacaaacatgtatcctttttgaagcaaacacatttgatcgatgtcttgtgtgggtatcatgcactttttgcgtgggttccacctccactgcgcgggctgtatatagagccgcccacctgccccacaccatgtcgtcaccgagttgtgagtggggcatccgtcgcctctaatccaaataaggaggagctgcggccagacatgggcggcagagtagtatctggatccgctgaacacccaccggtggtatctagctttcctatcaatcagtggctttcaaaggtacactcctattgtgtgcgtactaatttttaatttattattgttcactctcgctttgttttcttgttgttgatgcatctcctctcgtactctactgcattcattgaagcactttgcactttcatcaggacgactcagagagtgtctcgctcctgtgtttataatggccaaatagtctcgaatgtctggccatgtttgacgcattcatgtattttgggcattttgtcaaacgagttcacatcattaggcattgtgtcttgggtattactccattatgaaatcgtgtttgtaccgaaaattacaatttgtaggctgcatcatttactcatttctggagtgggaacctgtgagagtaatttgttctgacaatgttgctattcctatttgctaattaaggctactagggttaaatattatggatcacatttattttcttttttaggtaccctgaagacttcatttatgtttttaatgaacgataactaattcactgcgccatttgcacacaatgttttgctatcattgtcacatactagctccctgttttgggatatttcttaaaagttttaggtgttaacatttctccaacatagaaaaagttttaggtgttagcattacctaaatatggatttaggtaattcttcatgtcgctattacaatcattggtcaaacttattgttctgaattcctcgtgagtcatctgtatctacagaaaagttctgtccatagatgaatatgcatcatattataaagatatagaccccgtggctcctttcaagacttgaaaagttgggcaaacagatagttacatgtctaccaaagtgcacccatcatatgatgtttatgtagagcgagttaatagagtatttgttgtcagcgatcctgttgactggggaagagatctacatgtacttcttttcatgcccgggcctcactaatagaaaactttcttgggttgcatttgtttgatattcatcgaatatcttaatgagtgacccataaacaccttttcctctaaagtgcatttgtttcatgtgaaattgtgattacttcctattgatatacataagttcaataatctgatttttttaaaacaatacgaaaggtactctgtgttatctcgtctactcatgaacttcctgggactgaaatagtgggtcgtattgatgcctttattgctgtgatggcacatacacatgtaattgcaaatggccctatcagctgatgttcttgctgctgccaacacaacaacagaagttgcaatgaggcttgtgagacctgagacgaagtgtctaggatgaagtttcagatatgtcagctgatttcagtttcagagctgcggattttagtttcaaagctgcagatttcagtactagagctgccaaatttcagttttagagttgcaaattccatttttagagctacactatgaatccacacttgattctattttcttttcaatttcagggctgcaagatttctacagaatgtgaagactatgctatcaaaaaaagcttttctaatttacctaggatgaagttcaggattgtttaggatgaatcatgtgtttatctatcttcaataatatttttttaccccatttaactcggtgcggactgtatctgcaatttgctggagctgtttttttctttgaggcaccccacgtttcttctgattttagacattaattgtctgtatcaaagatggtagcttatggcaatgaggtgtgtttatgtttttggtttgttaatggcaggaagcggatggaaagaagattcagatccagctgacagggttcatggaaaagaacacagtgaagttcatgaaggagctctggagccttctcctcagtgcgcagcagaatgccagtggggtgcctcaacagtttctggatgaaaaggaggctgagatacatcagaaaaaggatggggatgttggtaactcaagatcctatggtgatccagttgcctctgctttaaacagtacaaatttcaatatcgaggaagaaaaggacaatgatttcaagcgcacctcaagaccaaaaaataggttcgttatcactttcttgcataatcttgtagggttttactacaacttagatgcatgctttgcattagatgctgttactaggtgcccatatttaggttgtaaggatgccacaaaaatgatgcttgatgttaaggagatattcacatgccaaattcaggttgtaaggatgccacaaaaatgaagacctttgttgtagtgacataaggagtttcgaaactgcaaggaattttaaatttgaatatttttcagtgagatgttaaggtagataaagttgttgagttagatggtaagtctgccatctatattttgtcccctatcagtgagatacaaatatgaaaaggcatgctgattttatggttgcagaaacaaaaaaaaagaggcactgatcgttaagacgacaatacatgatatcatgaaccaaatgattcgggaacttccaaaaaccaatccagtatacctcatgctacgcacatcatttggtttctcagctaaaggaaccgggcttaaagctcttgaatttgccctctccatctgtgacagttttgatatgtatggcttcaccgtagacccaggttacaaggaatgttctgtgcttacagctgaagttatctttcaggacaaggtacttctcagagaaaatcatgtgcagctggtgaaaatccattcaccgatgcaaggagatcctggcaggacagtgaggtggctgcctaccaaggctaccatcgaggctgctagagttgcttccgagaagttgttgaagagacctggtgctggaagtgatgatcctctggggacttgcaccatgataaagaagcgcaggaaagggaaggcgccaaacagatctggtctacgagatgctgccatgaagcacctcgaggacatgaaaggtgccaccaggtatcccttggagcgaaatgcagggggtggttacctctgcatgatcaatgatagatacgaccgcggctgattatggcatcagtgccccctccgcccctcccctccacttgagtcgaagaaaggaatgcttgtgataaacttgcagtttgagggaacgaaaaggtcgattctttgatttatgcagctggtgtacaacgtttgagtgtagtgaaagttaggtgtaatgttttgagtgtagagaaagctatatgttgtggatggatacgaatggtcaaattgtagcacttttggtgcttataatactaataggtgagcgcccgtacgttgcaacgaagacatataatatacacattttatatataagtcactgtgatattatatgtccccgttgcaacgcacgggcactcacctagttgattgaatattcctattcctattctttatagtagaccccacgttgaattaggttttataaataaatataaaaagaaaaaaaaaccattaatctatta

SEQ ID NO: 31167 - DNA, 2283 bp, Zea Mays
catctcccagacccctgcacaactaaggtggagccttacaaagcaagagtggttgcttgcaaccggcctcacagggctgttgaatccgtatgggctatggtcgccgaggcactcgcagtcggacgtgtcttcatcggagatggagtttggtacagcgcgccagtacgacaccaccgaccttgatgaagcacttcaaagagaggagccgcccacctgccccacaccatgtcgtcaccgagttgtgagtggggcatccgtcgcctctaatccaaataaggaggagctgcggccagacatgggcggcagagtagtatctggatccgctgaacacccaccggtggtatctagctttcctatcaatcagtggctttcaaagctgatgttcttgctgctgccaacacaacaacagaagttgcaatgaggcttgtgagacctgagacgaagtgtctaggatgaagtttcagatatgtcagctgatttcagtttcagagctgcggattttagtttcaaagctgcagatttcaggctgcaagatttctacagaatgtgaagactatgctatcaaaaaaagcttttctaatttacctaggatgaagttcaggattgtttaggatgaatcatgtgtttatctatcttcaataatatttttttaccccatttaactcggaagcggatggaaagaagattcagatccagctgacagggttcatggaaaagaacacagtgaagttcatgaaggagctctggagccttctcctcagtgcgcagcagaatgccagtggggtgcctcaacagtttctggatgaaaaggaggctgagatacatcagaaaaaggcataggatgacaggagtgcgcaggagatccaaaagaagccagaaaaggagggaatggactcagaactggaaaagaacaaaacgatggatggggatgttggtaactcaagatcctatggtgatccagttgcctctgctttaaacagtacaaatttcaatatcgaggaagaaaaggacaatgatttcaagcgcacctcaagaccaaaaaataggttgtaaggatgccacaaaaatgatgcttgatgttaaggagatattcacatgccaaattcaggttgtaaggatgccacaaaaatgaagacctttgttgtagtgacataaggagtttcgaaactgcaaggaattttaaatttgaatatttttcagtgagatgttaaggtagataaagttgttgagttagatgaaacaaaaaaaaagaggcactgatcgttaagacgacaatacatgatatcatgaaccaaatgattcgggaacttccaaaaaccaatccagtatacctcatgctacgcacatcatttggtttctcagctaaaggaaccgggcttaaagctcttgaatttgccctctccatctgtgacagttttgatatgtatggcttcaccgtagacccaggttacaaggaatgttctgtgcttacagctgaagttatctttcaggacaaggtacttctcagagaaaatcatgtgcagctggtgaaaatccattcaccgatgcaaggagatcctggcaggacagtgaggtggctgcctaccaaggctaccatcgaggctgctagagttgcttccgagaagttgttgaagagacctggtgctggaagtgatgatcctctggggacttgcaccatgataaagaagcgcaggaaagggaaggcgccaaacagatctggtctacgagatgctgccatgaagcacctcgaggacatgaaaggtgccaccaggtatcccttggagcgaaatgcagggggtggttacctctgcatgatcaatgatagatacgaccgcggctgattatggcatcagtgccccctccgcccctcccctccacttgagtcgaagaaaggaatgcttgtgataaacttgcagtttgagggaacgaaaaggtcgattctttgatttatgcagctggtgtacaacgtttgagtgtagtgaaagttaggtgtaatgttttgagtgtagagaaagctatatgttgtggatggatacgaatggtcaaattgtagcacttttggtgcttataatactaataggtgagcgcccgtacgttgcaacgaagacatataatatacacattttatatataagtcactgtgatattatatgtccccgttgcaacgcacgggcactcacctagttgattgaatattcctattcctattctttatagtagaccccacgttgaattaggttttataaataaatataaaaagaaaaaaaaaccattaatctatta

SEQ ID NO: 31168 - DNA, 2535 bp, Zea Mays
tacaaagcaagagtggttgcttgcaaccggcctcacagggctgttgaatccgtatgggctatggtcgccgaggcactcgcagtcggacgtgtcttcatcggagatggagtttggtacagcgcgccagtacgacaccaccgaccttgatgaagcacttcaaagagagagttttgaagctttgaaccccagagccgttgctgttgtgatagaccccatccagaagaggacgatcgattttcgattttggctgttgaatccgtatgggctatggtcgccgaggcactcgcagtcggacgtgtcttcatcggagatggagtttggtacagcgcgccagtacgacaccaccgaccttgatgaagcacttcaaagagagagccgcccacctgccccacaccatgtcgtcaccgagttgtgagtggggcatccgtcgcctctaatccaaataaggaggagctgcggccagacatgggcggcagagtagtatctggatccgctgaacacccaccggtggtatctagctttcctatcaatcagtggctttcaaaggtactctgtgttatctcgtctactcatgaacttcctgggactgaaatagtgggtcgtattgatgcctttattgctgtgatggcacatacacatgtaattgcaaatggccctatcagctgatgttcttgctgctgccaacacaacaacagaagttgcaatgaggcttgtgagacctgagacgaagtgtctaggatgaagtttcagatatgtcagctgatttcagtttcagagctgcggattttagtttcaaagctgcagatttcagtactagagctgccaaatttcagttttagagttgcaaattccatttttagagctacactatgaatccacacttgattctattttcttttcaatttcagggctgcaagatttctacagaatgtgaagactatgctatcaaaaaaagcttttctaatttacctaggatgaagttcaggattgtttaggatgaatcatgaagcggatggaaagaagattcagatccagctgacagggttcatggaaaagaacacagtgaagttcatgaaggagctctggagccttctcctcagtgcgcagcagaatgccagtggggtgcctcaacagtttctggatgaaaaggaggctgagatacatcagaaaaaggatggggatgttggtaactcaagatcctatggtgatccagttgcctctgctttaaacagtacaaatttcaatatcgaggaagaaaaggacaatgatttcaagcgcacctcaagaccaaaaaataggttgtaaggatgccacaaaaatgatgcttgatgttaaggagatattcacatgccaaattcaggttgtaaggatgccacaaaaatgaagacctttgttgtagtgacataaggagtttcgaaactgcaaggaattttaaatttgaatatttttcagtgagatgttaaggtagataaagttgttgagttagatgaaacaaaaaaaaagaggcactgatcgttaagacgacaatacatgatatcatgaaccaaatgattcgggaacttccaaaaaccaatccagtatacctcatgctacgcacatcatttggtttctcagctaaaggaaccgggcttaaagctcttgaatttgccctctccatctgtgacagttttgatatgtatggcttcaccgtagacccaggttacaaggaatgttctgtgcttacagctgaagttatctttcaggacaaggtacttctcagagaaaatcatgtgcagctggtgaaaatccattcaccgatgcaaggagatcctggcaggacagtgaggtggctgcctaccaaggctaccatcgaggctgctagagttgcttccgagaagttgttgaagagacctggtgctggaagtgatgatcctctggggacttgcaccatgataaagaagcgcaggaaagggaaggcgccaaacagatctggtctacgagatgctgccatgaagcacctcgaggacatgaaaggtgccaccaggtatcccttggagcgaaatgcagggggtggttacctctgcatgatcaatgatagatacgaccgcggctgattatggcatcagtgccccctccgcccctcccctccacttgagtcgaagaaaggaatgcttgtgataaacttgcagtttgagggaacgaaaaggtcgattctttgatttatgcagctggtgtacaacgtttgagtgtagtgaaagttaggtgtaatgttttgagtgtagagaaagctatatgttgtggatggatacgaatggtcaaattgtagcacttttggtgcttataatactaataggtgagcgcccgtacgttgcaacgaagacatataatatacacattttatatataagtcactgtgatattatatgtccccgttgcaacgcacgggcactcacctagttgattgaatattcctattcctattctttatagtagaccccacgttgaattaggttttataaataaatataaaaagaaaaaaaaaccattaatctatta

SEQ ID NO: 31169 - DNA, 2507 bp, Zea Mays
caaagcaagagtggttgcttgcaaccggcctcacagggctgttgaatccgtatgggctatggtcgccgaggcactcgcagtcggacgtgtcttcatcggagatggagtttggtacagcgcgccagtacgacaccaccgaccttgatgaagcacttcaaagagagagccgcccacctgccccacaccatgtcgtcaccgagttgtgagtggggcatccgtcgcctctaatccaaataaggaggagctgcggccagacatgggcggcagagtagtatctggatccgctgaacacccaccggtggtatctagctttcctatcaatcagtggctttcaaaggtactctgtgttatctcgtctactcatgaacttcctgggactgaaatagtgggtcgtattgatgcctttattgctgtgatggcacatacacatgtaattgcaaatggccctatcagctgatgttcttgctgctgccaacacaacaacagaagttgcaatgaggcttgtgagacctgagacgaagtgtctaggatgaagtttcagatatgtcagctgatttcagtttcagagctgcggattttagtttcaaagctgcagatttcaggctgcaagatttctacagaatgtgaagactatgctatcaaaaaaagcttttctaatttacctaggatgaagttcaggattgtttaggatgaatcatgtgtttatctatcttcaataatatttttttaccccatttaactcggtgcggactgtatctgcaatttgctggagctgtttttttctttgaggcaccccacgtttcttctgattttagacattaattgtctgtatcaaagatggtagcttatggcaatgaggtgtgtttatgtttttggtttgttaatggcaggaagcggatggaaagaagattcagatccagctgacagggttcatggaaaagaacacagtgaagttcatgaaggagctctggagccttctcctcagtgcgcagcagaatgccagtggggtgcctcaacagtttctggatgaaaaggaggctgagatacatcagaaaaaggcataggatgacaggagtgcgcaggagatccaaaagaagccagaaaaggagggaatggactcagaactggaaaagaacaaaacgatggatggggatgttggtaactcaagatcctatggtgatccagttgcctctgctttaaacagtacaaatttcaatatcgaggaagaaaaggacaatgatttcaagcgcacctcaagaccaaaaaataggttgtaaggatgccacaaaaatgatgcttgatgttaaggagatattcacatgccaaattcaggttgtaaggatgccacaaaaatgaagacctttgttgtagtgacataaggagtttcgaaactgcaaggaattttaaatttgaatatttttcagtgagatgttaaggtagataaagttgttgagttagatgaaacaaaaaaaaagaggcactgatcgttaagacgacaatacatgatatcatgaaccaaatgattcgggaacttccaaaaaccaatccagtatacctcatgctacgcacatcatttggtttctcagctaaaggaaccgggcttaaagctcttgaatttgccctctccatctgtgacagttttgatatgtatggcttcaccgtagacccaggttacaaggaatgttctgtgcttacagctgaagttatctttcaggacaaggtacttctcagagaaaatcatgtgcagctggtgaaaatccattcaccgatgcaaggagatcctggcaggacagtgaggtggctgcctaccaaggctaccatcgaggctgctagagttgcttccgagaagttgttgaagagacctggtgctggaagtgatgatcctctggggacttgcaccatgataaagaagcgcaggaaagggaaggcgccaaacagatctggtctacgagatgctgccatgaagcacctcgaggacatgaaaggtgccaccaggtatcccttggagcgaaatgcagggggtggttacctctgcatgatcaatgatagatacgaccgcggctgattatggcatcagtgccccctccgcccctcccctccacttgagtcgaagaaaggaatgcttgtgataaacttgcagtttgagggaacgaaaaggtcgattctttgatttatgcagctggtgtacaacgtttgagtgtagtgaaagttaggtgtaatgttttgagtgtagagaaagctatatgttgtggatggatacgaatggtcaaattgtagcacttttggtgcttataatactaataggtgagcgcccgtacgttgcaacgaagacatataatatacacattttatatataagtcactgtgatattatatgtccccgttgcaacgcacgggcactcacctagttgattgaatattcctattcctattctttatagtagaccccacgttgaattaggttttataaataaatataaaaagaaaaaaaaaccattaatctatta

SEQ ID NO: 31170 - DNA, 2261 bp, Zea Mays
agcaagagtggttgcttgcaaccggcctcacagagttttgaagctttgaaccccagagccgttgctgttgtgatagaccccatccagaagaggacgatcgattttcgattttggctgttgaatccgtatgggctatggtcgccgaggcactcgcagtcggacgtgtcttcatcggagatggagtttggtacagcgcgccagtacgacaccaccgaccttgatgaagcacttcaaagagagagccgcccacctgccccacaccatgtcgtcaccgagttgtgagtggggcatccgtcgcctctaatccaaataaggaggagctgcggccagacatgggcggcagagtagtatctggatccgctgaacacccaccggtggtatctagctttcctatcaatcagtggctttcaaagctgatgttcttgctgctgccaacacaacaacagaagttgcaatgaggcttgtgagacctgagacgaagtgtctaggatgaagtttcagatatgtcagctgatttcagtttcagagctgcggattttagtttcaaagctgcagatttcaggctgcaagatttctacagaatgtgaagactatgctatcaaaaaaagcttttctaatttacctaggatgaagttcaggattgtttaggatgaatcatgtgtttatctatcttcaataatatttttttaccccatttaactcggaagcggatggaaagaagattcagatccagctgacagggttcatggaaaagaacacagtgaagttcatgaaggagctctggagccttctcctcagtgcgcagcagaatgccagtggggtgcctcaacagtttctggatgaaaaggaggctgagatacatcagaaaaaggcataggatgacaggagtgcgcaggagatccaaaagaagccagaaaaggagggaatggactcagaactggaaaagaacaaaacgatgtacaaatttcaatatcgaggaagaaaaggacaatgatttcaagcgcacctcaagaccaaaaaataggttgtaaggatgccacaaaaatgatgcttgatgttaaggagatattcacatgccaaattcaggttgtaaggatgccacaaaaatgaagacctttgttgtagtgacataaggagtttcgaaactgcaaggaattttaaatttgaatatttttcagtgagatgttaaggtagataaagttgttgagttagatgaaacaaaaaaaaagaggcactgatcgttaagacgacaatacatgatatcatgaaccaaatgattcgggaacttccaaaaaccaatccagtatacctcatgctacgcacatcatttggtttctcagctaaaggaaccgggcttaaagctcttgaatttgccctctccatctgtgacagttttgatatgtatggcttcaccgtagacccaggttacaaggaatgttctgtgcttacagctgaagttatctttcaggacaaggtacttctcagagaaaatcatgtgcagctggtgaaaatccattcaccgatgcaaggagatcctggcaggacagtgaggtggctgcctaccaaggctaccatcgaggctgctagagttgcttccgagaagttgttgaagagacctggtgctggaagtgatgatcctctggggacttgcaccatgataaagaagcgcaggaaagggaaggcgccaaacagatctggtctacgagatgctgccatgaagcacctcgaggacatgaaaggtgccaccaggtatcccttggagcgaaatgcagggggtggttacctctgcatgatcaatgatagatacgaccgcggctgattatggcatcagtgccccctccgcccctcccctccacttgagtcgaagaaaggaatgcttgtgataaacttgcagtttgagggaacgaaaaggtcgattctttgatttatgcagctggtgtacaacgtttgagtgtagtgaaagttaggtgtaatgttttgagtgtagagaaagctatatgttgtggatggatacgaatggtcaaattgtagcacttttggtgcttataatactaataggtgagcgcccgtacgttgcaacgaagacatataatatacacattttatatataagtcactgtgatattatatgtccccgttgcaacgcacgggcactcacctagttgattgaatattcctattcctattctttatagtagaccccacgttgaattaggttttataaataaatataaaaagaaaaaaaaaccattaatctatta

SEQ ID NO: 31171 - DNA, 3833 bp, Zea Mays
gttgcttgcaaccggcctcacagagttttgaagctttgaaccccagagccgttgctgttgtgatagaccccatccagaagaggacgatcgattttcgattttgtaggagagctgttaaacctctccggctccgccactttcgtttccgtttctgcgctttgtttggtgccgaattttctgcacgttttaccaattctgaacgaaaattccctttctgttttgccgactgtagggctgttgaatccgtatgggctatggtcgccgaggcactcgcagtcggacgtgtcttcatcggagatggagtttggtacagcgcgccagtacgacaccaccgaccttgatgaagcacttcaaagagagagttttgaagctttgaaccccagagccgttgctgttgtgatagaccccatccagaagaggacgatcgattttcgattttgtaggagagctgttaaacctctccggcttcgccactttcgtttccgtttctgcgctttgtttggtgccgaattttctgcacattttaccaattctgaacgaaaattccctttctgttttgccgactgtagggctgttgaatccgtatgggctatggtcgccgaggcactcgcagtcggacgtgtcttcatcggagatggagtttggtacagcgcgccagtacgacaccaccgaccttgatgaagcacttcaaagagaggtaatttgcttagatatttttaataaaacttatttttagtttttcagtgcttagttaaaatcaagtggcattgatactatcaaaggaccatttgtttttcgttggcatttcttgtggatatcgtggtcagatgtacaatacagattaatagtatgagcaaagtcctttgatgaatattttaatgggtcttttttttctgggcacaataggggactggcgaataatatccaaacaatgttcctacattgtatatttatctttcgataaagttgtttaagtcttggaacttagccatgttgatgccaaataggcagtagaacatgagtttgatttcctatatatcaaccaaaaaatacatttaataagttctaataaaaagaacagataagtgaaaaagagagagagagaaggaattaggctaataaaatagatttattcatgactacccttaagatctcaaaagaaagatcttcaaagcttgagaaaaggagtaaaggacctcctgctgttgcagggcatatgtcactcacggcctgtaagtttttccaagtctttagtgccattactaggtttcacaaatatggtttagtaaagttattcaagtgggctaagtaaaaaaataacaaaagacaaaaaaggaataccaaaaacaaattaggcgatgttttaccaagacaaaataaataatttcggtgaaggaaaatgttatttcattaattaatgtcaaatggcaataaagagataaagtggacaacaagactgtcgtttctctgatctgtttgtagtccacagactcaagcagaaaaaggctttattttctgtagcagcaggagcacagtgccccaaggtcgtagttaaggggtttttgttttaacttgtaataacctgttaaggggtttttgtattaaatatgaattgcatgtagaacataaaatccattgtgtcataatctggtaggtaagtgcttgaggctggctgcataatagcaggtttgttttcatttttcaaacacaaacatgtatcctttttgaagcaaacacatttgatcgatgtcttgtgtgggtatcatgcactttttgcgtgggttccacctccactgcgcgggctgtatatagagccgcccacctgccccacaccatgtcgtcaccgagttgtgagtggggcatccgtcgcctctaatccaaataaggaggagctgcggccagacatgggcggcagagtagtatctggatccgctgaacacccaccggtggtatctagctttcctatcaatcagtggctttcaaagctgatgttcttgctgctgccaacacaacaacagaagttgcaatgaggcttgtgagacctgagacgaagtgtctaggatgaagtttcagatatgtcagctgatttcagtttcagagctgcggattttagtttcaaagctgcagatttcaggctgcaagatttctacagaatgtgaagactatgctatcaaaaaaagcttttctaatttacctaggatgaagttcaggattgtttaggatgaatcatgtgtttatctatcttcaataatatttttttaccccatttaactcggaagcggatggaaagaagattcagatccagctgacagggttcatggaaaagaacacagtgaagttcatgaaggagctctggagccttctcctcagtgcgcagcagaatgccagtggggtgcctcaacagtttctggatgaaaaggaggctgagatacatcagaaaaaggcataggatgacaggagtgcgcaggagatccaaaagaagccagaaaaggagggaatggactcagaactggaaaagaacaaaacgatgtacaaatttcaatatcgaggaagaaaaggacaatgatttcaagcgcacctcaagaccaaaaaataggttgtaaggatgccacaaaaatgatgcttgatgttaaggagatattcacatgccaaattcaggttgtaaggatgccacaaaaatgaagacctttgttgtagtgacataaggagtttcgaaactgcaaggaattttaaatttgaatatttttcagtgagatgttaaggtagataaagttgttgagttagatgaaacaaaaaaaaagaggcactgatcgttaagacgacaatacatgatatcatgaaccaaatgattcgggaacttccaaaaaccaatccagtatacctcatgctacgcacatcatttggtttctcagctaaaggaaccgggcttaaagctcttgaatttgccctctccatctgtgacagttttgatatgtatggcttcaccgtagacccaggttacaaggaatgttctgtgcttacagctgaagttatctttcaggacaaggtacttctcagagaaaatcatgtgcagctggtgaaaatccattcaccgatgcaaggagatcctggcaggacagtgaggtggctgcctaccaaggctaccatcgaggctgctagagttgcttccgagaagttgttgaagagacctggtgctggaagtgatgatcctctggggacttgcaccatgataaagaagcgcaggaaagggaaggcgccaaacagatctggtctacgagatgctgccatgaagcacctcgaggacatgaaaggtgccaccaggtatcccttggagcgaaatgcagggggtggttacctctgcatgatcaatgatagatacgaccgcggctgattatggcatcagtgccccctccgcccctcccctccacttgagtcgaagaaaggaatgcttgtgataaacttgcagtttgagggaacgaaaaggtcgattctttgatttatgcagctggtgtacaacgtttgagtgtagtgaaagttaggtgtaatgttttgagtgtagagaaagctatatgttgtggatggatacgaatggtcaaattgtagcacttttggtgcttataatactaataggtgagcgcccgtacgttgcaacgaagacatataatatacacattttatatataagtcactgtgatattatatgtccccgttgcaacgcacgggcactcacctagttgattgaatattcctattcctattctttatagtagaccccacgttgaattaggttttataaataaatataaaaagaaaaaaaaaccattaatctatta

SEQ ID NO: 31172 - DNA, 3790 bp, Zea Mays
gtattttgttattttgctcatcgaattcattggctgtctgatttatgcttacctgattcctacacagtcgaattcattagctgtctgatttttgcacaatccactttattttgctcattgagtacagtagggcataagcgaagtgaaatagggtgaatgaaataaataaaaaggacaagttgttttgttgtattatgagtgtgatccttggctcctaatgtctcatcatgcctaagacaatcagtaagtgctgggggcagaggagttccagctcggtgcctctccattaaataaagagcaacacaaaactctctcaaagaaagcatgccatcattgccttggtcagacaaatcccacctcttggaagcctccaactgaggaacagattgcgagcttctacgccagttattttgccatctctgtccctatcaacatcgtcaaatactttcatgtacttatggatgtcagactgagtagtttttggccattggagagatggattagaaatcccagcagagacaacaggtgcagctggagcaggactgggctttacgacatgctgagtgtgttgatcccaactcactggagttgttcttctcttatctaccttttgtgcttctgttctatatcttatatcctatatagtgccaaacactgcactcgtaggcctaaatttgttcaatatataaatgtgcagagttttgaagctttgaaccccagagccgttgctgttgtgatagaccccatccagaagaggacgatcgattttcgattttgtaggagagctgttaaacctctccggctccgccactttcgtttccgtttctgcgctttgtttggtgccgaattttctgcacgttttaccaattctgaacgaaaattccctttctgttttgccgactgtagggctgttgaatccgtatgggctatggtcgccgaggcactcgcagtcggacgtgtcttcatcggagatggagtttggtacagcgcgccagtacgacaccaccgaccttgatgaagcacttcaaagagagagttttgaagctttgaaccccagagccgttgctgttgtgatagaccccatccagaagaggacgatcgattttcgattttggctgttgaatccgtatgggctatggtcgccgaggcactcgcagtcggacgtgtcttcatcggagatggagtttggtacagcgcgccagtacgacaccaccgaccttgatgaagcacttcaaagagagatctcaaaagaaagatcttcaaagcttgagaaaaggagtaaaggacctcctgctgttgcagggcatatgtcactcacggcctgtaagtttttccaagtctttagtgccattactaggtttcacaaatatggtttagtaaagttattcaagtgggctaagtaaaaaaataacaaaagacaaaaaaggaataccaaaaacaaattaggcgatgttttaccaagacaaaataaataatttcggtgaaggaaaatgttatttcattaattaatgtcaaatggcaataaagagataaagtggacaacaagactgtcgtttctctgatctgtttgtagtccacagactcaagcagaaaaaggctttattttctgtagcagcaggagcacagtgccccaaggtcgtagttaaggggtttttgttttaacttgtaataacctgttaaggggtttttgtattaaatatgaattgcatgtagaacataaaatccattgtgtcataatctggtaggtaagtgcttgaggctggctgcataatagcaggtttgttttcatttttcaaacacaaacatgtatcctttttgaagcaaacacatttgatcgatgtcttgtgtgggtatcatgcactttttgcgtgggttccacctccactgcgcgggctgtatatagagccgcccacctgccccacaccatgtcgtcaccgagttgtgagtggggcatccgtcgcctctaatccaaataaggaggagctgcggccagacatgggcggcagagtagtatctggatccgctgaacacccaccggtggtatctagctttcctatcaatcagtggctttcaaaggtactctgtgttatctcgtctactcatgaacttcctgggactgaaatagtgggtcgtattgatgcctttattgctgtgatggcacatacacatgtaattgcaaatggccctatcagctgatgttcttgctgctgccaacacaacaacagaagttgcaatgaggcttgtgagacctgagacgaaggaagcggatggaaagaagattcagatccagctgacagggttcatggaaaagaacacagtgaagttcatgaaggagctctggagccttctcctcagtgcgcagcagaatgccagtggggtgcctcaacagtttctggatgaaaaggaggctgagatacatcagaaaaaggatggggatgttggtaactcaagatcctatggtgatccagttgcctctgctttaaacagtacaaatttcaatatcgaggaagaaaaggacaatgatttcaagcgcacctcaagaccaaaaaataggttgtaaggatgccacaaaaatgatgcttgatgttaaggagatattcacatgccaaattcaggttgtaaggatgccacaaaaatgaagacctttgttgtagtgacataaggagtttcgaaactgcaaggaattttaaatttgaatatttttcagtgagatgttaaggtagataaagttgttgagttagatgaaacaaaaaaaaagaggcactgatcgttaagacgacaatacatgatatcatgaaccaaatgattcgggaacttccaaaaaccaatccagtatacctcatgctacgcacatcatttggtttctcagctaaaggaaccgggcttaaagctcttgaatttgccctctccatctgtgacagttttgatatgtatggcttcaccgtagacccaggttacaaggaatgttctgtgcttacagctgaagttatctttcaggacaaggtacttctcagagaaaatcatgtgcagctggtgaaaatccattcaccgatgcaaggagatcctggcaggacagtgaggtggctgcctaccaaggctaccatcgaggctgctagagttgcttccgagaagttgttgaagagacctggtgctggaagtgatgatcctctggggacttgcaccatgataaagaagcgcaggaaagggaaggcgccaaacagatctggtctacgagatgctgccatgaagcacctcgaggacatgaaaggtgccaccaggtatcccttggagcgaaatgcagggggtggttacctctgcatgatcaatgatagatacgaccgcggctgattatggcatcagtgccccctccgcccctcccctccacttgagtcgaagaaaggaatgcttgtgataaacttgcagtttgagggaacgaaaaggtcgattctttgatttatgcagctggtgtacaacgtttgagtgtagtgaaagttaggtgtaatgttttgagtgtagagaaagctatatgttgtggatggatacgaatggtcaaattgtagcacttttggtgcttataatactaataggtgagcgcccgtacgttgcaacgaagacatataatatacacattttatatataagtcactgtgatattatatgtccccgttgcaacgcacgggcactcacctagttgattgaatattcctattcctattctttatagtagaccccacgttgaattaggttttataaataaatataaaaagaaaaaaaaaccattaatctatta

SEQ ID NO: 31173 - DNA, 3312 bp, Zea Mays
gttattttgctcatcgaattcattggctgtctgatttatgcttacctgattcctacacagtcgaattcattagctgtctgatttttgcacaatccactttattttgctcattgagtacagtagggcataagcgaagtgaaatagggtgaatgaaataaataaaaaggacaagttgttttgttgtattatgagtgtgatccttggctcctaatgtctcatcatgcctaagacaatcagtaagtgctgggggcagaggagttccagctcggtgcctctccattaaataaagagcaacacaaaactctctcaaagaaagcatgccatcattgccttggtcagacaaatcccacctcttggaagcctccaactgaggaacagattgcgagcttctacgccaaaatcccagcagagacaacaggtgcagctggagcaggactgggctttacgacatgctgagtgtgttgatcccaactcactggagttgttcttctcttatctaccttttgtgcttctgttctatatcttatatcctatatagtgccaaacactgcactcgtaggcctaaatttgttcaatatataaatgtgcagagttttgaagctttgaaccccagagccgttgctgttgtgatagaccccatccagaagaggacgatcgattttcgattttgtaggagagctgttaaacctctccggctccgccactttcgtttccgtttctgcgctttgtttggtgccgaattttctgcacgttttaccaattctgaacgaaaattccctttctgttttgccgactgtagggctgttgaatccgtatgggctatggtcgccgaggcactcgcagtcggacgtgtcttcatcggagatggagtttggtacagcgcgccagtacgacaccaccgaccttgatgaagcacttcaaagagagagttttgaagctttgaaccccagagccgttgctgttgtgatagaccccatccagaagaggacgatcgattttcgattttgtaggagagctgttaaacctctccggcttcgccactttcgtttccgtttctgcgctttgtttggtgccgaattttctgcacattttaccaattctgaacgaaaattccctttctgttttgccgactgtagggctgttgaatccgtatgggctatggtcgccgaggcactcgcagtcggacgtgtcttcatcggagatggagtttggtacagcgcgccagtacgacaccaccgaccttgatgaagcacttcaaagagaggtaagtgcttgaggctggctgcataatagcagagtagtatctggatccgctgaacacccaccggtggtatctagctttcctatcaatcagtggctttcaaagctgatgttcttgctgctgccaacacaacaacagaagttgcaatgaggcttgtgagacctgagacgaagtgtctaggatgaagtttcagatatgtcagctgatttcagtttcagagctgcggattttagtttcaaagctgcagatttcagtactagagctgccaaatttcagttttagagttgcaaattccatttttagagctacactatgaatccacacttgattctattttcttttcaatttcagggctgcaagatttctacagaatgtgaagactatgctatcaaaaaaagcttttctaatttacctaggatgaagttcaggattgtttaggatgaatcatgtgtttatctatcttcaataatatttttttaccccatttaactcggaagcggatggaaagaagattcagatccagctgacagggttcatggaaaagaacacagtgaagttcatgaaggagctctggagccttctcctcagtgcgcagcagaatgccagtggggtgcctcaacagtttctggatgaaaaggaggctgagatacatcagaaaaaggcataggatgacaggagtgcgcaggagatccaaaagaagccagaaaaggagggaatggactcagaactggaaaagaacaaaacgatgtacaaatttcaatatcgaggaagaaaaggacaatgatttcaagcgcacctcaagaccaaaaaataggttgtaaggatgccacaaaaatgatgcttgatgttaaggagatattcacatgccaaattcaggttgtaaggatgccacaaaaatgaagacctttgttgtagtgacataaggagtttcgaaactgcaaggaattttaaatttgaatatttttcagtgagatgttaaggtagataaagttgttgagttagatgaaacaaaaaaaaagaggcactgatcgttaagacgacaatacatgatatcatgaaccaaatgattcgggaacttccaaaaaccaatccagtatacctcatgctacgcacatcatttggtttctcagctaaaggaaccgggcttaaagctcttgaatttgccctctccatctgtgacagttttgatatgtatggcttcaccgtagacccaggttacaaggaatgttctgtgcttacagctgaagttatctttcaggacaaggtacttctcagagaaaatcatgtgcagctggtgaaaatccattcaccgatgcaaggagatcctggcaggacagtgaggtggctgcctaccaaggctaccatcgaggctgctagagttgcttccgagaagttgttgaagagacctggtgctggaagtgatgatcctctggggacttgcaccatgataaagaagcgcaggaaagggaaggcgccaaacagatctggtctacgagatgctgccatgaagcacctcgaggacatgaaaggtgccaccaggtatcccttggagcgaaatgcagggggtggttacctctgcatgatcaatgatagatacgaccgcggctgattatggcatcagtgccccctccgcccctcccctccacttgagtcgaagaaaggaatgcttgtgataaacttgcagtttgagggaacgaaaaggtcgattctttgatttatgcagctggtgtacaacgtttgagtgtagtgaaagttaggtgtaatgttttgagtgtagagaaagctatatgttgtggatggatacgaatggtcaaattgtagcacttttggtgcttataatactaataggtgagcgcccgtacgttgcaacgaagacatataatatacacattttatatataagtcactgtgatattatatgtccccgttgcaacgcacgggcactcacctagttgattgaatattcctattcctattctttatagtagaccccacgttgaattaggttttataaataaatataaaaagaaaaaaaaaccattaatctatta

SEQ ID NO: 31174 - DNA, 3353 bp, Zea Mays
cgcagtcggacgtgtcttcatcggagatggagtttggtacagcgcgccagtacgacaccaccgaccttgatgaagcacttcaaagagagggctgttgaatccgtatgggctatggtcgccgaggcactcgcagtcggacgtgtcttcatcggagatggagtttggtacagcgcgccagtacgacaccaccgaccttgatgaagcacttcaaagagaggtaatttgcttagatatttttaataaaacttatttttagtttttcagtgcttagttaaaatcaagtggcattgatactatcaaaggaccatttgtttttcgttggcatttcttgtggatatcgtggtcagatgtacaatacagattaatagtatgagcaaagtcctttgatgaatattttaatgggtcttttttttctgggcacaataggggactggcgaataatatccaaacaatgttcctacattgtatatttatctttcgataaagttgtttaagtcttggaacttagccatgttgatgccaaataggcagtagaacatgagtttgatttcctatatatcaaccaaaaaatacatttaataagttctaataaaaagaacagataagtgaaaaagagagagagagaaggaattaggctaataaaatagatttattcatgactacccttaagatctcaaaagaaagatcttcaaagcttgagaaaaggagtaaaggacctcctgctgttgcagggcatatgtcactcacggcctgtaagtttttccaagtctttagtgccattactaggtttcacaaatatggtttagtaaagttattcaagtgggctaagtaaaaaaataacaaaagacaaaaaaggaataccaaaaacaaattaggcgatgttttaccaagacaaaataaataatttcggtgaaggaaaatgttatttcattaattaatgtcaaatggcaataaagagataaagtggacaacaagactgtcgtttctctgatctgtttgtagtccacagactcaagcagaaaaaggctttattttctgtagcagcaggagcacagtgccccaaggtcgtagttaaggggtttttgttttaacttgtaataacctgttaaggggtttttgtattaaatatgaattgcatgtagaacataaaatccattgtgtcataatctggtaggtaagtgcttgaggctggctgcataatagcaggtttgttttcatttttcaaacacaaacatgtatcctttttgaagcaaacacatttgatcgatgtcttgtgtgggtatcatgcactttttgcgtgggttccacctccactgcgcgggctgtatatagagccgcccacctgccccacaccatgtcgtcaccgagttgtgagtggggcatccgtcgcctctaatccaaataaggaggagctgcggccagacatgggcggcagagtagtatctggatccgctgaacacccaccggtggtatctagctttcctatcaatcagtggctttcaaagctgatgttcttgctgctgccaacacaacaacagaagttgcaatgaggcttgtgagacctgagacgaagtgtctaggatgaagtttcagatatgtcagctgatttcagtttcagagctgcggattttagtttcaaagctgcagatttcaggctgcaagatttctacagaatgtgaagactatgctatcaaaaaaagcttttctaatttacctaggatgaagttcaggattgtttaggatgaatcatgtgtttatctatcttcaataatatttttttaccccatttaactcggaagcggatggaaagaagattcagatccagctgacagggttcatggaaaagaacacagtgaagttcatgaaggagctctggagccttctcctcagtgcgcagcagaatgccagtggggtgcctcaacagtttctggatgaaaaggaggctgagatacatcagaaaaaggcataggatgacaggagtgcgcaggagatccaaaagaagccagaaaaggagggaatggactcagaactggaaaagaacaaaacgatgtacaaatttcaatatcgaggaagaaaaggacaatgatttcaagcgcacctcaagaccaaaaaataggttgtaaggatgccacaaaaatgatgcttgatgttaaggagatattcacatgccaaattcaggttgtaaggatgccacaaaaatgaagacctttgttgtagtgacataaggagtttcgaaactgcaaggaattttaaatttgaatatttttcagtgagatgttaaggtagataaagttgttgagttagatgaaacaaaaaaaaagaggcactgatcgttaagacgacaatacatgatatcatgaaccaaatgattcgggaacttccaaaaaccaatccagtatacctcatgctacgcacatcatttggtttctcagctaaaggaaccgggcttaaagctcttgaatttgccctctccatctgtgacagttttgatatgtatggcttcaccgtagacccaggttacaaggaatgttctgtgcttacagctgaagttatctttcaggacaaggtacttctcagagaaaatcatgtgcagctggtgaaaatccattcaccgatgcaaggagatcctggcaggacagtgaggtggctgcctaccaaggctaccatcgaggctgctagagttgcttccgagaagttgttgaagagacctggtgctggaagtgatgatcctctggggacttgcaccatgataaagaagcgcaggaaagggaaggcgccaaacagatctggtctacgagatgctgccatgaagcacctcgaggacatgaaaggtgccaccaggtatcccttggagcgaaatgcagggggtggttacctctgcatgatcaatgatagatacgaccgcggctgattatggcatcagtgccccctccgcccctcccctccacttgagtcgaagaaaggaatgcttgtgataaacttgcagtttgagggaacgaaaaggtcgattctttgatttatgcagctggtgtacaacgtttgagtgtagtgaaagttaggtgtaatgttttgagtgtagagaaagctatatgttgtggatggatacgaatggtcaaattgtagcacttttggtgcttataatactaataggtgagcgcccgtacgttgcaacgaagacatataatatacacattttatatataagtcactgtgatattatatgtccccgttgcaacgcacgggcactcacctagttgattgaatattcctattcctattctttatagtagaccccacgttgaattaggttttataaataaatataaaaagaaaaaaaaaccattaatctatta

SEQ ID NO: 31175 - DNA, 3397 bp, Zea Mays
cttagatatttttaataaaacttatttttagtttttcagtgcttagttaaaatcaagtggcattgatactatcaaaggaccatttgtttttcgttggcatttcttgtggatatcgtggtcagatgtacaatacagattaatagtatgagcaaagtcctttgatgaatattttaatgggtcttttttttctgggcacaataggggactggcgaataatatccaaacaatgttcctacattgtatatttatctttcgataaagttgtttaagtcttggaacttagccatgttgatgccaaataggcagtagaacatgagtttgatttcctatatatcaaccaaaaaatacatttaataagttctaataaaaagaacagataagtgaaaaagagagagagagaaggaattaggctaataaaatagatttattcatgactacccttaagatctcaaaagaaagatcttcaaagcttgagaaaaggagtaaaggacctcctgctgttgcagggcatatgtcactcacggcctgtaagtttttccaagtctttagtgccattactaggtttcacaaatatggtttagtaaagttattcaagtgggctaagtaaaaaaataacaaaagacaaaaaaggaataccaaaaacaaattaggcgatgttttaccaagacaaaataaataatttcggtgaaggaaaatgttatttcattaattaatgtcaaatggcaataaagagataaagtggacaacaagactgtcgtttctctgatctgtttgtagtccacagactcaagcagaaaaaggctttattttctgtagcagcaggagcacagtgccccaaggtcgtagttaaggggtttttgttttaacttgtaataacctgttaaggggtttttgtattaaatatgaattgcatgtagaacataaaatccattgtgtcataatctggtaggtaagtgcttgaggctggctgcataatagcaggtttgttttcatttttcaaacacaaacatgtatcctttttgaagcaaacacatttgatcgatgtcttgtgtgggtatcatgcactttttgcgtgggttccacctccactgcgcgggctgtatatagagccgcccacctgccccacaccatgtcgtcaccgagttgtgagtggggcatccgtcgcctctaatccaaataaggaggagctgcggccagacatgggcggcagagtagtatctggatccgctgaacacccaccggtggtatctagctttcctatcaatcagtggctttcaaaggtactctgtgttatctcgtctactcatgaacttcctgggactgaaatagtgggtcgtattgatgcctttattgctgtgatggcacatacacatgtaattgcaaatggccctatcagctgatgttcttgctgctgccaacacaacaacagaagttgcaatgaggcttgtgagacctgagacgaagtgtctaggatgaagtttcagatatgtcagctgatttcagtttcagagctgcggattttagtttcaaagctgcagatttcagtactagagctgccaaatttcagttttagagttgcaaattccatttttagagctacactatgaatccacacttgattctattttcttttcaatttcagggctgcaagatttctacagaatgtgaagactatgctatcaaaaaaagcttttctaatttacctaggatgaagttcaggattgtttaggatgaatcatgtgtttatctatcttcaataatatttttttaccccatttaactcggtgcggactgtatctgcaatttgctggagctgtttttttctttgaggcaccccacgtttcttctgattttagacattaattgtctgtatcaaagatggtagcttatggcaatgaggtgtgtttatgtttttggtttgttaatggcaggaagcggatggaaagaagattcagatccagctgacagggttcatggaaaagaacacagtgaagttcatgaaggagctctggagccttctcctcagtgcgcagcagaatgccagtggggtgcctcaacagtttctggatgaaaaggaggctgagatacatcagaaaaaggatggggatgttggtaactcaagatcctatggtgatccagttgcctctgctttaaacagtacaaatttcaatatcgaggaagaaaaggacaatgatttcaagcgcacctcaagaccaaaaaataggttgtaaggatgccacaaaaatgatgcttgatgttaaggagatattcacatgccaaattcaggttgtaaggatgccacaaaaatgaagacctttgttgtagtgacataaggagtttcgaaactgcaaggaattttaaatttgaatatttttcagtgagatgttaaggtagataaagttgttgagttagatgaaacaaaaaaaaagaggcactgatcgttaagacgacaatacatgatatcatgaaccaaatgattcgggaacttccaaaaaccaatccagtatacctcatgctacgcacatcatttggtttctcagctaaaggaaccgggcttaaagctcttgaatttgccctctccatctgtgacagttttgatatgtatggcttcaccgtagacccaggttacaaggaatgctggtgaaaatccattcaccgatgcaaggagatcctggcaggacagtgaggtggctgcctaccaaggctaccatcgaggctgctagagttgcttccgagaagttgttgaagagacctggtgctggaagtgatgatcctctggggacttgcaccatgataaagaagcgcaggaaagggaaggcgccaaacagatctggtctacgagatgctgccatgaagcacctcgaggacatgaaaggtgccaccaggtatcccttggagcgaaatgcagggggtggttacctctgcatgatcaatgatagatacgaccgcggctgattatggcatcagtgccccctccgcccctcccctccacttgagtcgaagaaaggaatgcttgtgataaacttgcagtttgagggaacgaaaaggtcgattctttgatttatgcagctggtgtacaacgtttgagtgtagtgaaagttaggtgtaatgttttgagtgtagagaaagctatatgttgtggatggatacgaatggtcaaattgtagcacttttggtgcttataatactaataggtgagcgcccgtacgttgcaacgaagacatataatatacacattttatatataagtcactgtgatattatatgtccccgttgcaacgcacgggcactcacctagttgattgaatattcctattcctattctttatagtagaccccacgttgaattaggttttataaataaatataaaaagaaaaaaaaaccattaatctatta

SEQ ID NO: 31176 - DNA, 3224 bp, Zea Mays
cttatttttagtttttcagtgcttagttaaaatcaagtggcattgatactatcaaaggaccatttgtttttcgttggcatttcttgtggatatcgtggtcagatgtacaatacagattaatagtatgagcaaagtcctttgatgaatattttaatgggtcttttttttctgggcacaataggggactggcgaataatatccaaacaatgttcctacattgtatatttatctttcgataaagttgtttaagtcttggaacttagccatgttgatgccaaataggcagtagaacatgagtttgatttcctatatatcaaccaaaaaatacatttaataagttctaataaaaagaacagataagtgaaaaagagagagagagaaggaattaggctaataaaatagatttattcatgactacccttaagatctcaaaagaaagatcttcaaagcttgagaaaaggagtaaaggacctcctgctgttgcagggcatatgtcactcacggcctgtaagtttttccaagtctttagtgccattactaggtttcacaaatatggtttagtaaagttattcaagtgggctaagtaaaaaaataacaaaagacaaaaaaggaataccaaaaacaaattaggcgatgttttaccaagacaaaataaataatttcggtgaaggaaaatgttatttcattaattaatgtcaaatggcaataaagagataaagtggacaacaagactgtcgtttctctgatctgtttgtagtccacagactcaagcagaaaaaggctttattttctgtagcagcaggagcacagtgccccaaggtcgtagttaaggggtttttgttttaacttgtaataacctgttaaggggtttttgtattaaatatgaattgcatgtagaacataaaatccattgtgtcataatctggtaggtaagtgcttgaggctggctgcataatagcaggtttgttttcatttttcaaacacaaacatgtatcctttttgaagcaaacacatttgatcgatgtcttgtgtgggtatcatgcactttttgcgtgggttccacctccactgcgcgggctgtatatagagccgcccacctgccccacaccatgtcgtcaccgagttgtgagtggggcatccgtcgcctctaatccaaataaggaggagctgcggccagacatgggcggcagagtagtatctggatccgctgaacacccaccggtggtatctagctttcctatcaatcagtggctttcaaaggtactctgtgttatctcgtctactcatgaacttcctgggactgaaatagtgggtcgtattgatgcctttattgctgtgatggcacatacacatgtaattgcaaatggccctatcagctgatgttcttgctgctgccaacacaacaacagaagttgcaatgaggcttgtgagacctgagacgaagtgtctaggatgaagtttcagatatgtcagctgatttcagtttcagagctgcggattttagtttcaaagctgcagatttcaggctgcaagatttctacagaatgtgaagactatgctatcaaaaaaagcttttctaatttacctaggatgaagttcaggattgtttaggatgaatcatgtgtttatctatcttcaataatatttttttaccccatttaactcggaagcggatggaaagaagattcagatccagctgacagggttcatggaaaagaacacagtgaagttcatgaaggagctctggagccttctcctcagtgcgcagcagaatgccagtggggtgcctcaacagtttctggatgaaaaggaggctgagatacatcagaaaaaggcataggatgacaggagtgcgcaggagatccaaaagaagccagaaaaggagggaatggactcagaactggaaaagaacaaaacgatgtacaaatttcaatatcgaggaagaaaaggacaatgatttcaagcgcacctcaagaccaaaaaataggttgtaaggatgccacaaaaatgatgcttgatgttaaggagatattcacatgccaaattcaggttgtaaggatgccacaaaaatgaagacctttgttgtagtgacataaggagtttcgaaactgcaaggaattttaaatttgaatatttttcagtgagatgttaaggtagataaagttgttgagttagatgaaacaaaaaaaaagaggcactgatcgttaagacgacaatacatgatatcatgaaccaaatgattcgggaacttccaaaaaccaatccagtatacctcatgctacgcacatcatttggtttctcagctaaaggaaccgggcttaaagctcttgaatttgccctctccatctgtgacagttttgatatgtatggcttcaccgtagacccaggttacaaggaatgttctgtgcttacagctgaagttatctttcaggacaaggtacttctcagagaaaatcatgtgcagctggtgaaaatccattcaccgatgcaaggagatcctggcaggacagtgaggtggctgcctaccaaggctaccatcgaggctgctagagttgcttccgagaagttgttgaagagacctggtgctggaagtgatgatcctctggggacttgcaccatgataaagaagcgcaggaaagggaaggcgccaaacagatctggtctacgagatgctgccatgaagcacctcgaggacatgaaaggtgccaccaggtatcccttggagcgaaatgcagggggtggttacctctgcatgatcaatgatagatacgaccgcggctgattatggcatcagtgccccctccgcccctcccctccacttgagtcgaagaaaggaatgcttgtgataaacttgcagtttgagggaacgaaaaggtcgattctttgatttatgcagctggtgtacaacgtttgagtgtagtgaaagttaggtgtaatgttttgagtgtagagaaagctatatgttgtggatggatacgaatggtcaaattgtagcacttttggtgcttataatactaataggtgagcgcccgtacgttgcaacgaagacatataatatacacattttatatataagtcactgtgatattatatgtccccgttgcaacgcacgggcactcacctagttgattgaatattcctattcctattctttatagtagaccccacgttgaattaggttttataaataaatataaaaagaaaaaaaaaccattaatctatta

SEQ ID NO: 31177 - DNA, 1873 bp, Zea Mays
tttcaatcccagaacagggcccgagcgagagcccacgaacgaagggctccttctctctcctctcgttgctgcatttgcagacttgcagtgttgcagataattttggatgccattcaagcgttctacggctccaatttctctgacttctccctgagcctttgcggccggctggagctggacggtccccgggcagcgcaggcagccggactgcgggagtcacctccatggcctcggctgctactgcaaccctccccaaggttcagttgaggccaagatgcaacagctacttccaggtgaccggtcaagtccatgcccacaccaaaacatgcggtgcctgcaagtgtccgacccatatccacggctggaggaaggaggacattcctgccggtgtctgcagttggatcaggtcagggctcatcggtcactgaggccgacaggaagagcgatttgtcgctggagaacgtcaagacgtccgttgtatcccgcgacggtgaaaagattaatgtacgagtgcagttgcctggaaaggcgacgcaaaaggtgtttgatgaggctctgacgttcttggcccgtgatgcgccaccggttcctggttttagaaagtccaaaggagggaaaacatcaaatatacccagcagcatcctgctgcagatgcttggcaagagccgggtcaccaaattcgttcttcaggaaatactgagcatcaccattgaagaatttgtcaagaaggaaaacctgaaggtgaaacctgagatccagacaacccagtccgaaggcgagatggagtccgcgttcgcgccgggatcagcatttgggttcaatgttgtccttcagctcgagacacctgactctgatgatccagaggagaaacctggctctgatgacgatttacaggaggaatctggttcctcggagtagaaagaaatgcatatcgcctgcatgcatttatcaaccttcttcatgtgccattccttatgaatgaatgtactgaatggaaagccgttgcaaccgttttgagttgagagttgcaactgaaacatttctgaagatatgagtggccgactcgcctctcttaacatgttgacacacagcgagcatacgcttcagaaatcggaacctgctgcacatatgattggaactgaagaaaatgcgcgtgggaggtccatgcccacaatgataacacactagagcttcagcttccagcgcacactacaacaagatcttatccgctttgtctggagtatcatccgttgacaactcggcttccaactaccagatcaatcattccgggtgctccccacctcccaaggttcacactcccccacatcgccagtgacctaccaactgcacatattattcgttccttttttttccagagaaaaccagccgcatatattcttggagaggagaaagacccggccctaaacatttgcacttctgattctatggcccatgagaattccctgtcatgacagtattttgcaacttcctgacattattgtttcagtgctgaaatgttcacgtcatgggtagtagccaagtcattataccagaaagaagacatttcattaggaaacatgatcagactcaggacctgggatgatctggtctaccaccttattctctatattcctatcacgcttccaatatttttttttctgacgatgaatagatacacgttaacaccttcaatgcttaactcccaaccaacaggatttgctagatcacaaataattgctactgcgtttttcttcttcgaaatatcatgtagcatctttcctttttggtctgagcttggcttagagccacaccagcccagctgtgaagcattttgaatgcagacagccatacaaatgattttttagcatacatt

SEQ ID NO: 31178 - DNA, 1964 bp, Zea Mays
tttcaatcccagaacagggcccgagcgagagcccacgaacgaagggctccttctctctcctctcgttgctgcatttgcagacttgcagtgttgcagataattttggatgccattcaagcgttctacggctccaatttctctgacttctccctgagcctttgcggccggctggagctggacggtccccgggcagcgcaggcagccggactgcgggagtcacctccatggcctcggctgctactgcaaccctccccaaggttcagttgaggccaagatgcaacagctacttccaggtgaccggtcaagtccatgcccacaccaaaacatgcggtgcctgcaagtgtccgacccatatccacgggttgcttgtttcagctggaggaaggaggacattcctgccggtgtctgcagttggatcaggtcagggctcatcggtcactgaggccgacaggaagagcgatttgtcgctggagaacgtcaagacgtccgttgtatcccgcgacggtgaaaagattaatgtacgagtgcagttgcctggaaaggcgacgcaaaaggtgtttgatgaggctctgacgttcttggcccgtgatgcgccaccggttcctggttttagaaagtccaaaggagggaaaacatcaaatgtaagtgcacatggacctttttttccgatcagcttcaccaatgcaaattattcaaagtcattttatcatcttccaagatacccagcagcatcctgctgcagatgcttggcaagagccgggtcaccaaattcgttcttcaggaaatactgagcatcaccattgaagaatttgtcaagaaggaaaacctgaaggtgaaacctgagatccagacaacccagtccgaaggcgagatggagtccgcgttcgcgccgggatcagcatttgggttcaatgttgtccttcagctcgagacacctgactctgatgatccagaggagaaacctggctctgatgacgatttacaggaggaatctggttcctcggagtagaaagaaatgcatatcgcctgcatgcatttatcaaccttcttcatgtgccattccttatgaatgaatgtactgaatggaaagccgttgcaaccgttttgagttgagagttgcaactgaaacatttctgaagatatgagtggccgactcgcctctcttaacatgttgacacacagcgagcatacgcttcagaaatcggaacctgctgcacatatgattggaactgaagaaaatgcgcgtgggaggtccatgcccacaatgataacacactagagcttcagcttccagcgcacactacaacaagatcttatccgctttgtctggagtatcatccgttgacaactcggcttccaactaccagatcaatcattccgggtgctccccacctcccaaggttcacactcccccacatcgccagtgacctaccaactgcacatattattcgttccttttttttccagagaaaaccagccgcatatattcttggagaggagaaagacccggccctaaacatttgcacttctgattctatggcccatgagaattccctgtcatgacagtattttgcaacttcctgacattattgtttcagtgctgaaatgttcacgtcatgggtagtagccaagtcattataccagaaagaagacatttcattaggaaacatgatcagactcaggacctgggatgatctggtctaccaccttattctctatattcctatcacgcttccaatatttttttttctgacgatgaatagatacacgttaacaccttcaatgcttaactcccaaccaacaggatttgctagatcacaaataattgctactgcgtttttcttcttcgaaatatcatgtagcatctttcctttttggtctgagcttggcttagagccacaccagcccagctgtgaagcattttgaatgcagacagccatacaaatgattttttagcatacatt

SEQ ID NO: 31179 - DNA, 1585 bp, Zea Mays
caaacaaaccgcaaggcttggaacgagaaagaaataaagaaattgataaaacagtagaaaaggtaaaggctacctcatttttgtattttcttctcccctattccctcttcttgttcttggagttgttggtgtccccggagctacaaaggccccgccttttggctcattctcagactttagtactttaccatctgctccaagaaagcgtcttggagatggcgcgcaccgagaagctcaccagcgatggctgctccggcggcgaagtccaagtggaggtggagctcggcatgggggtggacgggaaggggatcatagagtgccggatatgccaggaggagggggaggaggccgctatggactcaccttgcgcttgcgctggcacactcaagtttgcccacaggaaatgcatacagagatggtgcaacaagaagggaaatattacatgcgaaatctgcaaccaggtttactccccgaattatgtcatccctccaccgaaatgttgttcagatgaaatggacatgaatcttaggcaaaactgggtcggacgaatcgatccccatgattcccatttcctagccatcgccatcgcagagcagcagcttctgcaagctgaatttgatgactgtgtatctgcaaattctagcggtgccacatgctgccgatccattgctttaattgtgatgttccttttgctcgtacgccatgtaattgtcattgtgagggatgttagcatgctacaagatgcaacggtgctgttcagctttgcgggattctttcttccttgttatgtaatagctcgttcttgctatgctttgcagcatcggagacggagacaggtgtagggaggctcacctgaaccttaagggcttgtttgggagcaagtgaaatgaaggggattgagggtgctagaatccctcactatttaaaattgaatagtggggtattctagccccttcaatcctctccattactcttcctcccaaacaagccctaaagaacacaaagacgcaccaattgaagcgccgtctcggcggtaccaccgaagataggaggactacatggaagcttgcgaagtgagcctccccgttgttgcttggattcaccgcaaagcatttggtttctgtcctgaagacgtcggcggtttaattaggttgattgagtagcgagagcaggcgctgtgaagctcaagtgtacatacgttgagggggacaaggccttttttttttacagctgagaggaagcaaaatgtagcctcacacatttctgctgcaaataaaagaacaatcgcccgtcagcgcctctgaagtttatgcttggtttgggattgctggcttgcacctcgcagttgaagagtaggtagtagtagtacagggcggctgctacctgctgctgctggacaagtgcgtacagagggtggtttctgaatgggacagacgtggagtcacgggctcagtgccgctctaatgctccgttaagtgccggattgtctcttcgtcagtaattatgacattgcaatcgcctgtaattttcagtacacccatcatgaggaacacggtggcaaccctcgtcacttcgtcacttataa

SEQ ID NO: 31180 - DNA, 1595 bp, Zea Mays
caaacaaaccgcaaggcttggaacgagaaagaaataaagaaattgataaaacagtagaaaaggtaaaggctacctcatttttgtattttcttctcccctattccctcttcttgttcttggagttgttggtgtccccggagctacaaaggccccgccttttggctcattctcagactttagtactttaccatctgctccaagaaagcgtcttggagatggcgcgcaccgagaagctcaccagcgatggctgctccggcggcgaagtccaagtggaggtggagctcggcatgggggtggacgggaaggggatcatagagtgccggatatgccaggaggagggggaggaggccgctatggactcaccttgcgcttgcgctggcacactcaagtttgcccacaggaaatgcatacagagatggtgcaacaagaagggaaatattacatgcgaaatctgcaaccaggtttactccccgaattatgtcatccctccaccgaaatgttgttcagatgaaatggacatgaatcttaggcaaaactgggtcggacgaatcgatccccatgattcccatttcctagccatcgccatcgcagagcagcagcttctgcaagctgaatttgatgactgtgtatctgcaaattctagcggtgccacatgctgccgatccattgctttaattgtgatgttccttttgctcgtacgccatgtaattgtcattgtgagggatgttagcatgctacaagatgcaacggtgctgttcagcgcaactcttcagtttgcgggattctttcttccttgttatgtaatagctcgttcttgctatgctttgcagcatcggagacggagacaggtagggaggctcacctgaaccttaagggcttgtttgggagcaagtgaaatgaaggggattgagggtgctagaatccctcactatttaaaattgaatagtggggtattctagccccttcaatcctctccattactcttcctcccaaacaagccctaaagaacacaaagacgcaccaattgaagcgccgtctcggcggtaccaccgaagataggaggactacatggaagcttgcgaagtgagcctccccgttgttgcttggattcaccgcaaagcatttggtttctgtcctgaagacgtcggcggtttaattaggttgattgagtagcgagagcaggcgctgtgaagctcaagtgtacatacgttgagggggacaaggccttttttttttacagctgagaggaagcaaaatgtagcctcacacatttctgctgcaaataaaagaacaatcgcccgtcagcgcctctgaagtttatgcttggtttgggattgctggcttgcacctcgcagttgaagagtaggtagtagtagtacagggcggctgctacctgctgctgctggacaagtgcgtacagagggtggtttctgaatgggacagacgtggagtcacgggctcagtgccgctctaatgctccgttaagtgccggattgtctcttcgtcagtaattatgacattgcaatcgcctgtaattttcagtacacccatcatgaggaacacggtggcaaccctcgtcacttcgtcacttataa

SEQ ID NO: 31181 - DNA, 3082 bp, Zea Mays
ggtacatcagtcgttccggtatatcttcataacgttacaagacgagctcgagctgggagcgagaatcctaaaaaaaaagtaaccgatcaaagcagggcagccgtcaacatagcgcctgtgctgtggtcatcccctcgcgacgctacccaagtacccagcagtccagcacacggctgcggccgcactcgcacaacggcacaagcgcacaccaccgccatctccgccttcaccccctacccacccctctgtccttctatataacgcgcccgcctcgccacctcacaagaaattccccacacgcgcccacctcctctgctctctcctctcccccacctctgcgtccgtgcgttgtgtttgtttaggcggcaaccgcgaggcgcaatggcggccgggcgagagctggtggtgagtttcggcgagatgttgatagacttcgtgcccaccgtggcgggggtctcgctggcggaggcgccggccttcctcaaggcgcccgggggcgcgcccgccaacgtcgccatcgcggtctcgcgcctcggcggcggggccgcctttgtcggcaagctcggcgacgacgagttcggccgcatgctcgccgccatcctccgcgacaacggcgtcgacgacggcggcgtcgtcttcgactccggcgcgcgcaccgcgctcgccttcgtcaccctgcgcgccgacggggagcgcgagttcatgttctaccgcaaccccagcgctgacatgctcctcaccgccgacgagctcaacgtcgagctcatcaagagggtaagttaagccacgccacgccacgccacggtaacccatccttggtgatcctcgcccccgtgccttcacgccccgcgatctgcggacagccttattgctgtgattggtctcgtcgagtgcagtatcaatctttccgctcatttcttgattcgatcccgggcgggatctggaggcgaccgctaggtttcttgcgctgatttcgcgtgcggtttaggttgcggcaccgtctaatttggccctgtttggatccacctagtttaaactggtttttagacgctggaaggactccaaacatgttatttttttttatccggtttctaaaaattagtttctcagttttcttaaaaactaagaagttggtctccccagctaaaactagtttctaagaaactaggaggatccaaacacctcctctttttttcttctaaaagccagtttctagaaaccaaatctaaaaaccaggttttaaaaaactagtgtggattcaaacacagcctttatcgggccatgttttattacgtccgataaagtcacccctctttcccgtcgtctaattcgggtccttgatgttgaatcttcccgtggaatccaaagattccggggcgaaagtgggcgcctttccttgctggttttggttggatcttgttgtgcgttctagttggcgaattgttctttttctggatctggtcatgtggcttctgtgattcatcctaaaaatttggggagacaaacaagcagtaatccaatccaaaggagagccgttatcagaccccgtgcttcttggatccatcggcgtgagctggtcttgtagaaatcattagccacgtcgtgtattaatggagtccacggaggaattttgtttctttgtggtgggtcaataattgcaactgacgtgacctacttcagtttctccccagttccattgaagctttagagaaactctgatttacccatctgatccttctataaatgcataactatatcatgacaaacagcattgtcggatctgtgaatttggattagcactattccattttctttacgccaagaactttgaattaaatctaaaattagcacgtatcaggtgatgctagatggttattttttttcatgctttctgtaaacgtgttaaaaaaggctgtcatttgtagagttcaccagaaaatatgtgaactaatgcaatgactaaaaaaattgcaacagcttgcagcatcacattgtccatccctccaccccacccccgcccctgtttgggtaaattcttcatgttcttcattttctacaggctgcggtcttccactacggatcaataagcttgattgctgagccttgccggacagcacatctccgtgccatggagattgccaaagaggcaggtgcactgctctcttatgacccaaacctgagggaggcactatggccatcccgtgaggaggcccgcacccagatcttgagcatctgggaccaggcagacattgtcaaggtcagcgaagtcgagctcgagttcttgacaggcatcgactcggtggaggacgatgttgtcatgaagctgtggcggcctaccatgaagctgctcctagtgactcttggagatcaagggtgcaagtactatgccagggatttccatggcgctgtgccttccttcaaagtacaacaagttgatacaactggcgcaggtgacgcgttcgttggtgctctgctccaaaggatcgttaaagatccatcctcgctacaagatgagaagaagcttgtggagtcgattaaattcgctaacgcgtgcggagcgatcaccaccacgaagaagggggcgatcccgtcgctgcccaccgaagcggaggtcttgcagctaatagagaaggcttagatcatcatcgtcctgtacgccatggttttcaccagcttctacttcttcgaattgtattggattctgatatggaacagaagaagaagcggctgccccatcttaccagccctttttgtttgccctagtttccccttgtgaaaagggtgttttgttttataaactctacttgcaataagcagagcctttttttaattatgtcagggtgcatttgatacgatcgaataatcatcaatccataattgtagcaatttttttttaaaaaaagaaaagtcaattgagtttttgttccagtggtggataaatttctagaatcgggatatctggtcctgataagaggtgatattcagagcctttattttctactatagatagctgagactgagacagagtacactggcggcatctgccgggccagtggggcttcattgagcagctttgattgtt

SEQ ID NO: 31182 - DNA, 1192 bp, Zea Mays
gtgattcatcctaaaaatttggggagacaaacaagcagtaatccaatccaaaggagagccgttatcagaccccgtgcttcttggatccatcggcgtgagctggtcttgtagaaatcattagccacgtcgtgtattaatggagtccacggaggaattttgtttctttgtggctgcggtcttccactacggatcaataagcttgattgctgagccttgccggacagcacatctccgtgccatggagattgccaaagaggcaggtgcactgctctcttatgacccaaacctgagggaggcactatggccatcccgtgaggaggcccgcacccagatcttgagcatctgggaccaggcagacattgtcaaggtcagcgaagtcgagctcgagttcttgacaggcatcgactcggtggaggacgatgttgtcatgaagctgtggcggcctaccatgaagctgctcctagtgactcttggagatcaagggtgcaagtactatgccagggatttccatggcgctgtgccttccttcaaagtacaacaagttgatacaactggcgcaggtgacgcgttcgttggtgctctgctccaaaggatcgttaaagatccatcctcgctacaagatgagaagaagcttgtggagtcgattaaattcgctaacgcgtgcggagcgatcaccaccacgaagaagggggcgatcccgtcgctgcccaccgaagcggaggtcttgcagctaatagagaaggcttagatcatcatcgtcctgtacgccatggttttcaccagcttctacttcttcgaattgtattggattctgatatggaacagaagaagaagcggctgccccatcttaccagccctttttgtttgccctagtttccccttgtgaaaagggtgttttgttttataaactctacttgcaataagcagagcctttttttaattatgtcagggtgcatttgatacgatcgaataatcatcaatccataattgtagcaatttttttttaaaaaaagaaaagtcaattgagtttttgttccagtggtggataaatttctagaatcgggatatctggtcctgataagaggtgatattcagagcctttattttctactatagatagctgagactgagacagagtacactggcggcatctgccgggccagtggggcttcattgagcagctttgattgtt

SEQ ID NO: 31183 - DNA, 3370 bp, Zea Mays
cgccgctccctcacctcctccgcaaccctgctccgagcccccgcgatgggatcacccatctgcatcgcacccccttctccaccaaccctccggcgtctccagagcgcccagatcccgctccggcacctcgccagcacacaccacgcgcgcgccgatctgctcgctcgcccgccccaaatcccgcccggttcctctaccttccccacatcgggcgtcaacgttcgcggaccaaccttccccaaatccgccccggttcctctcccttccccacatcgcctgtcgacattcgcggacggggcttccccacattcggcacctgttgttactgggtataggatacatcggtacctgttgttactaggttccttgggaagggctggaaatctggtgctgtaactactttaggccgaggtggtaacgacatgactgctacaaccattggtatggaaagatgttgatggtgtacttacttgtgttccaaatatctacccacatgcaaataatgttccatacttaacatttgaagaggccacagaacttgcttttttggtgctcaggttgtactaactagcatagtgctcaagtcaaatgtcactatgttggacattgtgagcactcggatgcttggtcagtatggttttctggcaagggtatgttgaacactgagccatttttgtatttatatttcactgttctgatcactacatgtgtgaccttgagcaggtatttgctatatttgaagatctatgtatatctgtggattgtgttgctaccagtgaagttagtgtttctgtgtcacttgatccatcaaagatctggaagttttttcttgctcgcacccaaacctatttccaatgctcttaacccttgataacaaggtcaataggagatgtgtatctgaagaaaccagaatttaatagagaacctttgcacagcaagtttcgtcttcaggaaacttttaggagaccacttcttagttctgatccagcaattactgtccaccatcaccatttttgcatttcatggactctgggaacatcttagtaatcagtaagtggttgacacggtccaaagtagcccgcgtaatgtatgtattcttatcttatattcagtttctgtaaattggtctttttgagacttggtgccaaatgttactacatatttaaaatagtataattaaggatatggttaggctctcgttgcggcatattttcctcctaactaatcatatccattcggttttagttttggcatgtaccattaattgttccgtttcaaatacgcttatgatattaaatttgtgattaagatcctaaatgacaagttgcttttctagacaccaattattgcagctgtatgtattgctgttgtagtgttctattttcaatttttgaaccaaatactactagcgattatttatatacaataaactgatactgtgcactttgggtgcgtttagttgctccctttttgtgctctgccaaatggttggctggccaattttaggcggcataggaatcagctgggcattatcctgaatgtactgtgcattggtcgcacgacgttgggcaaaacaaaacacgactagaatccaagctcctattctacatacagttactgaccaatgttttgattaagaacttgtaggcgcaatccaaacacaccctatacatgatgtttttcattatctcattctagatgccttattaggttatatgtatatgcaacctctcaatgaggcaagtctgttaaacattgtgcatatggattttctgtttcgttttctccttgtactatcttaaagtttcagttaggtacatatatttgattgttgcttctagcccacatctttgtccaggtaccacaagtacaagagccctagaaggggatctatagacccaagcgatgagtcgttcttcattaagcactgcctctattcgagttctttgccactagcccactagagatctgtagaagctcaggaaccttaagtggctttcatcgggatgtcacaagtatttgtgatgaggagcagtagagatttagcgttttcgagctgcagcgtaacagtctggatttgagttccatggggactgcatgtcaagccagcagttggtcgatttcatccgcgagcatatagacacagttgtccacagatcattctgaaaaggcatttcgagtaaggatggcaaacaggtaggtgttccagagcacggaaggcccttgagctaagccaacttttaggagtcaatatttctccaacaggtggtctttgttgaagcaactgaagcccaatacgcattcaaaaaaccactatatacacgatataagacctgtgctctaggtatgatgtgaagccgggcaatgccattcttgctgaggacaaacatttgccaatagaatgggaaacaaattcttgatgttgtcacattaagcacccatgagacggggagaaacatagtggactcctaatttttatggctagcttgcagtgaaagagctgcagaagattaattcctttaaagaaccacgtgagaagcttctgtgcatcatgagctgttgtcaagtcatcaataacttgcttctgaacatattatctaggctgatgagttccttcctattcttatctatgttactatcaaggcaagcaactcttagtcttggccactgtttattctttctgtttcttcttactggttcgctgcaactgagaagctttctgaaaaatttgatgtaggccaatcctcctcagctgcactcaaatctgaagttcgttcagctctttagaagagaaacaaagttaattttagaagtcgaatattatctgactaacctcatttcagcaaagatgtttataatagatgtcagtgctcactcgctctcaatggaggaaaacgagttttagaaacatatggaatcggcaagactagctactcaagtatctgttgcaagcccaagtagctcacaggggcttccaacatctgcaagggcaaatcaggaggaaactgatatggcaagtttgtttactatactattcgatttattcggagaagtttgtttgaccatgaatttgcattccaaaacagtttgttttttgccaccaagcaaaatgtgttcttttttgcttgaaaacaacatgatgtggtttttattgcggtcctgttcaggaaccattttacctatcaaataaaataaaatgctaagctcttatagattttcctttaaatggttgttgtgtgtccgtaccagttttgaggtcgaatgatcatagcattcaaagtgatacatttgacaggttctagattccctttcatggactccaggggaagtcaagcagctgcatgatctgtatattatcatgaaagggaac

SEQ ID NO: 31184 - DNA, 3601 bp, Zea Mays
cgctccctcacctcctccgcaaccctgctccgagcccccgcgatgggatcacccatctgcatcgcacccccttctccaccaaccctccggcgtctccagagcgcccagatcccgctccggcacctcgccagcacacaccacgcgcgcgccgatctgctcgctcgcccgccccaaatcccgcccggttcctctaccttccccacatcgggcgtcaacgttcgcggaccaaccttccccaaatccgccccggttcctctcccttccccacatcgcctgtcgacattcgcggacggggcttccccacattcggcacctgttgttactgggtataggatacatcggtacctgttgttactaggttccttgggaagggctggaaatctggtgctgtaactactttaggccgaggtggtaacgacatgactgctacaaccattggtatggaaagatgttgatggtgtacttacttgtgttccaaatatctacccacatgcaaataatgttccatacttaacatttgaagaggccacagaacttgcttttttggtgctcaggttgtactaactagcatagtgctcaagtcaaatgtcactatgttggacattgtgagcactcggatgcttggtatttgctatatttgaagatctatgtatatctgtggattgtgttgctaccagtgaagttagtgtttctgtgtcacttgatccatcaaagatctggaagttttttcttgctcgcacccaaacctatttccaatgctcttaacccttgataacaaggtcaataggagatgtgtatctgaagaaaccagaatttaatagagaacctttgcacagcaagtttcgtcttcaggaaacttttaggagaccacttcttagttctgatccagcaattactgtccaccatcaccatttttgcatttcatggactctgggaacatcttagtaatcagtaagtggttgacacggtccaaagtagcccgcgtaatgtatgtattcttatcttatattcagtttctgtaaattggtctttttgagacttggtgccaaatgttactacatatttaaaatagtataattaaggatatggttaggctctcgttgcggcatattttcctcctaactaatcatatccattcggttttagttttggcatgtaccattaattgttccgtttcaaatacgcttatgatattaaatttgtgattaagatcctaaatgacaagttgcttttctagacaccaattattgcagctgtatgtattgctgttgtagtgttctattttcaatttttgaaccaaatactactagcgattatttatatacaataaactgatactgtgcactttgggtgcgtttagttgctccctttttgtgctctgccaaatggttggctggccaattttaggcggcataggaatcagctgggcattatcctgaatgtactgtgcattggtcgcacgacgttgggcaaaacaaaacacgactagaatccaagctcctattctacatacagttactgaccaatgttttgattaagaacttgtaggcgcaatccaaacacaccctatacatgatgtttttcattatctcattctagatgccttattaggttatatgtatatgcaacctctcaatgaggcaagtctgttaaacattgtgcatatggattttctgtttcgttttctccttgtactatcttaaagtttcagttaggtacatatatttgattgttgcttctagcccacatctttgtccaggtaccacaagtacaagagccctagaaggggatctatagacccaagcgatgagtcgttcttcattaagcactgcctctattcgagttctttgccactagcccactagagatctgtagaagctcaggaaccttaagtggctttcatcgggatgtcacaagtatttgtgatgaggagcagtagagatttagcgttttcgagctgcagcgtaacagtctggatttgagttccatggggactgcatgtcaagccagcagttggtcgatttcatccgcgagcatatagacacagttgtccacagatcattctgaaaaggcatttcgagtaaggatggcaaacaggtaggtgttccagagcacggaaggcccttgagctaagccaacttttaggagtcaatatttctccaacaggtacttttgcagtagtcatgagtcattgcttatatgaagtaaggagagaaaattattgcttctcttttctgatgcgtgaagttgtacatggacattctacagagggctcggtgtgcctttcaagtactacatcaatgacttcttatttctttatggacttgtagcacctgaatggaacccgtgtttgaactctgcattttttgaagatgacattattgtcgtattgtaatataatttgatccgtatcaatttagttatgtattaattgttgccaaagaatttatgagatattgagatcgataatatatgtggtattttttttatataattgttgtgcaataacattttgctgaatattttgtataccgttgcaacgcacgggctcctaactagtttatcttgaattacattttttgtgtgtcaggtggtctttgttgaagcaactgaagcccaatacgcattcaaaaaaccactatatacacgatataagacctgtgctctaggtatgatgtgaagccgggcaatgccattcttgctgaggacaaacatttgccaatagaatgggaaacaaattcttgatgttgtcacattaagcacccatgagacggggagaaacatagtggactcctaatttttatggctagcttgcagtgaaagagctgcagaagattaattcctttaaagaaccacgtgagaagcttctgtgcatcatgagctgttgtcaagtcatcaataacttgcttctgaacatattatctaggctgatgagttccttcctattcttatctatgttactatcaaggccaatcctcctcagctgcactcaaatctgaagttcgttcagctctttagaagagaaacaaagttaattttagaagtcgaatattatctgactaacctcatttcagcaaagatgtttataatagatgtcagtgctcactcgctctcaatggaggaaaacgagttttagaaacatatggaatcggcaagactagctactcaagtatctgttgcaagcccaagtagctcacaggggcttccaacatctgcaagggcaaatcaggaggaaactgatatggcaagtttgtttactatactattcgatttattcggagaagtttgtttgaccatgaatttgcattccaaaacagtttgttttttgccaccaagcaaaatgtgttcttttttgcttgaaaacaacatgatgtggtttttattgcggtcctgttcaggaaccattttacctatcaaataaaataaaatgctaagctcttatagattttcctttaaatggttgttgtgtgtccgtaccagttttgaggtcgaatgatcatagcattcaaagtgatacatttgacaggttctagattccctttcatggactccaggggaagtcaagcagctgcatgatctgtatattatcatgaaagggaac

SEQ ID NO: 31185 - DNA, 2826 bp, Zea Mays
ctcacctcctccgcaaccctgctccgagcccccgcgatgggatcacccatctgcatcgcacccccttctccaccaaccctccggcgtctccagagcgcccagatcccgctccggcacctcgccagcacacaccacgcgcgcgccgatctgctcgctcgcccgccccaaatcccgcccggttcctctaccttccccacatcgggcgtcaacgttcgcggaccaaccttccccaaatccgccccggttcctctcccttccccacatcgcctgtcgacattcgcggacggggcttccccacattcggcacctgttgttactggggctggaaatctggtgctgtaactactttaggccgaggtggtaacgacatgactgctacaaccattggtatggaaagatgttgatggtgtacttacttgtgttccaaatatctacccacatgcaaataatgttccatacttaacatttgaagaggccacagaacttgcttttttggtgctcaggttgtactaactagcatagtgctcaagtcaaatgtcactatgttggacattgtgagcactcggatgcttggtcagtatggttttctggcaagggtaccacaagtacaagagccctagaaggggatctatagacccaagcgatgagtcgttcttcattaagcactgcctctattcgagttctttgccactagcccactagagatctgtagaagctcaggaaccttaagtggctttcatcgggatgtcacaagtatttgtgatgaggagcagtagagatttagcgttttcgagctgcagcgtaacagtctggatttgagttccatggggactgcatgtcaagccagcagttggtcgatttcatccgcgagcatatagacacagttgtccacagatcattctgaaaaggcatttcgagtaaggatggcaaacaggtgcccatgaagttgctgctcgctcggatggtgctcgacctaattgtgttgccgaagttcttattgaggttattaagatttgccaactttttaggtaggtgttccagagcacggaaggcccttgagctaagccaacttttaggagtcaatatttctccaacaggtacttttgcagtagtcatgagtcattgcttatatgaagtaaggagagaaaattattgcttctcttttctgatgcgtgaagttgtacatggacattctacagagggctcggtgtgcctttcaagtactacatcaatgacttcttatttctttatggacttgtagcacctgaatggaacccgtgtttgaactctgcattttttgaagatgacattattgtcgtattgtaatataatttgatccgtatcaatttagttatgtattaattgttgccaaagaatttatgagatattgagatcgataatatatgtggtattttttttatataattgttgtgcaataacattttgctgaatattttgtataccgttgcaacgcacgggctcctaactagtttatcttgaattacattttttgtgtgtcaggtggtctttgttgaagcaactgaagcccaatacgcattcaaaaaaccactatatacacgatataatggtgtgatgcggactcgagcatcaccaattcacctctctgttgtatctaacggcagttatggcctcatggagtcatgggtttaacctctggaaccctgaatctgaataagcaatccgtaccgtgcaactgaactaaccatcaatactcaagaccgagagcgcctttattgaagctaccaaggaaatcaatgtattagaagacctgtgctctaggtatgatgtgaagccgggcaatgccattcttgctgaggacaaacatttgccaatagaatgggaaacaaattcttgatgttgtcacattaagcacccatgagacggggagaaacatagtggactcctaatttttatggctagcttgcagtgaaagagctgcagaagattaattcctttaaagaaccacgtgagaagcttctgtgcatcatgagctgttgtcaagtcatcaataacttgcttctgaacatattatctaggctgatgagttccttcctattcttatctatgttactatcaaggcaagcaactcttagtcttggccactgtttattctttctgtttcttcttactggttcgctgcaactgagaagctttctgaaaaatttgatgtaggccaatcctcctcagctgcactcaaatctgaagttcgttcagctctttagaagagaaacaaagttaattttagaagtcgaatattatctgactaacctcatttcagcaaagatgtttataatagatgtcagtgctcactcgctctcaatggaggaaaacgagttttagaaacatatggaatcggcaagactagctactcaagtatctgttgcaagcccaagtagctcacaggggcttccaacatctgcaagggcaaatcaggaggaaactgatatggcaagtttgtttactatactattcgatttattcggagaagtttgtttgaccatgaatttgcattccaaaacagtttgttttttgccaccaagcaaaatgtgttcttttttgcttgaaaacaacatgatgtggtttttattgcggtcctgttcaggaaccattttacctatcaaataaaataaaatgctaagctcttatagattttcctttaaatggttgttgtgtgtccgtaccagttttgaggtcgaatgatcatagcattcaaagtgatacatttgacaggttctagattccctttcatggactccaggggaagtcaagcagctgcatgatctgtatattatcatgaaagggaac

SEQ ID NO: 31186 - DNA, 3150 bp, Zea Mays
ctcacctcctccgcaaccctgctccgagcccccgcgatgggatcacccatctgcatcgcacccccttctccaccaaccctccggcgtctccagagcgcccagatcccgctccggcacctcgccagcacacaccacgcgcgcgccgatctgctcgctcgcccgccccaaatcccgcccggttcctctaccttccccacatcgggcgtcaacgttcgcggaccaaccttccccaaatccgccccggttcctctcccttccccacatcgcctgtcgacattcgcggacggggcttccccacattcggcacctgttgttactggggctggaaatctggtgctgtaactactttaggccgaggtggtaacgacatgactgctacaaccattggtatggaaagatgttgatggtgtacttacttgtgttccaaatatctacccacatgcaaataatgttccatacttaacatttgaagaggccacagaacttgcttttttggtgctcaggtatttgctatatttgaagatctatgtatatctgtggattgtgttgctaccagtgaagttagtgtttctgtgtcacttgatccatcaaagatctggaagttttttcttgctcgcacccaaacctatttccaatgctcttaacccttgataacaaggtcaataggagatgtgtatctgaagaaaccagaatttaatagagaacctttgcacagcaagtttcgtcttcaggaaacttttaggagaccacttcttagttctgatccagcaattactgtccaccatcaccatttttgcatttcatggactctgggaacatcttagtaatcagtaagtggttgacacggtccaaagtagcccgcgtaatgtatgtattcttatcttatattcagtttctgtaaattggtctttttgagacttggtgccaaatgttactacatatttaaaatagtataattaaggatatggttaggctctcgttgcggcatattttcctcctaactaatcatatccattcggttttagttttggcatgtaccattaattgttccgtttcaaatacgcttatgatattaaatttgtgattaagatcctaaatgacaagttgcttttctagacaccaattattgcagctgtatgtattgctgttgtagtgttctattttcaatttttgaaccaaatactactagcgattatttatatacaataaactgatactgtgcactttgggtgcgtttagttgctccctttttgtgctctgccaaatggttggctggccaattttaggcggcataggaatcagctgggcattatcctgaatgtactgtgcattggtcgcacgacgttgggcaaaacaaaacacgactagaatccaagctcctattctacatacagttactgaccaatgttttgattaagaacttgtaggcgcaatccaaacacaccctatacatgatgtttttcattatctcattctagatgccttattaggttatatgtatatgcaacctctcaatgaggcaagtctgttaaacattgtgcatatggattttctgtttcgttttctccttgtactatcttaaagtttcagttaggtacatatatttgattgttgcttctagcccacatctttgtccaggtaccacaagtacaagagccctagaaggggatctatagacccaagcgatgagtcgttcttcattaagcactgcctctattcgagttctttgccactagcccactagagatctgtagaagctcaggaaccttaagtggctttcatcgggatgtcacaagtatttgtgatgaggagcagtagagatttagcgttttcgagctgcagcgtaacagtctggatttgagttccatggggactgcatgtcaagccagcagttggtcgatttcatccgcgagcatatagacacagttgtccacagatcattctgaaaaggcatttcgagtaaggatggcaaacaggtaggtgttccagagcacggaaggcccttgagctaagccaacttttaggagtcaatatttctccaacaggtggtctttgttgaagcaactgaagcccaatacgcattcaaaaaaccactatatacacgatataagacctgtgctctaggtatgatgtgaagccgggcaatgccattcttgctgaggacaaacatttgccaatagaatgggaaacaaattcttgatgttgtcacattaagcacccatgagacggggagaaacatagtggactcctaatttttatggctagcttgcagtgaaagagctgcagaagattaattcctttaaagaaccacgtgagaagcttctgtgcatcatgagctgttgtcaagtcatcaataacttgcttctgaacatattatctaggctgatgagttccttcctattcttatctatgttactatcaaggcaagcaactcttagtcttggccactgtttattctttctgtttcttcttactggttcgctgcaactgagaagctttctgaaaaatttgatgtaggccaatcctcctcagctgcactcaaatctgaagttcgttcagctctttagaagagaaacaaagttaattttagaagtcgaatattatctgactaacctcatttcagcaaagatgtttataatagatgtcagtgctcactcgctctcaatggaggaaaacgagttttagaaacatatggaatcggcaagactagctactcaagtatctgttgcaagcccaagtagctcacaggggcttccaacatctgcaagggcaaatcaggaggaaactgatatggcaagtttgtttactatactattcgatttattcggagaagtttgtttgaccatgaatttgcattccaaaacagtttgttttttgccaccaagcaaaatgtgttcttttttgcttgaaaacaacatgatgtggtttttattgcggtcctgttcaggaaccattttacctatcaaataaaataaaatgctaagctcttatagattttcctttaaatggttgttgtgtgtccgtaccagttttgaggtcgaatgatcatagcattcaaagtgatacatttgacaggttctagattccctttcatggactccaggggaagtcaagcagctgcatgatctgtatattatcatgaaagggaac

SEQ ID NO: 31187 - DNA, 3386 bp, Zea Mays
ctcacctcctccgcaaccctgctccgagcccccgcgatgggatcacccatctgcatcgcacccccttctccaccaaccctccggcgtctccagagcgcccagatcccgctccggcacctcgccagcacacaccacgcgcgcgccgatctgctcgctcgcccgccccaaatcccgcccggttcctctaccttccccacatcgggcgtcaacgttcgcggaccaaccttccccaaatccgccccggttcctctcccttccccacatcgcctgtcgacattcgcggacggggcttccccacattcggcacctgttgttactgggtataggatacatcggtacctgttgttactaggttccttgggaagggctggaaatctggtgctgtaactactttaggccgaggtggtaacgacatgactgctacaaccattggtatggaaagatgttgatggtgtacttacttgtgttccaaatatctacccacatgcaaataatgttccatacttaacatttgaagaggccacagaacttgcttttttggtgctcaggttgtactaactagcatagtgctcaagtcaaatgtcactatgttggacattgtgagcactcggatgcttggtcagtatggttttctggcaagggtatgttgaacactgagccatttttgtatttatatttcactgttctgatcactacatgtgtgaccttgagcaggtatttgctatatttgaagatctatgtatatctgtggattgtgttgctaccagtgaagttagtgtttctgtgtcacttgatccatcaaagatctggaagttttttcttgctcgcacccaaacctatttccaatgctcttaacccttgataacaaggtcaataggagatgtgtatctgaagaaaccagaatttaatagagaacctttgcacagcaagtttcgtcttcaggaaacttttaggagaccacttcttagttctgatccagcaattactgtccaccatcaccatttttgcatttcatggactctgggaacatcttagtaatcagtaagtggttgacacggtccaaagtagcccgcgtaatgtatgtattcttatcttatattcagtttctgtaaattggtctttttgagacttggtgccaaatgttactacatatttaaaatagtataattaaggatatggttaggctctcgttgcggcatattttcctcctaactaatcatatccattcggttttagttttggcatgtaccattaattgttccgtttcaaatacgcttatgatattaaatttgtgattaagatcctaaatgacaagttgcttttctagacaccaattattgcagctgtatgtattgctgttgtagtgttctattttcaatttttgaaccaaatactactagcgattatttatatacaataaactgatactgtgcactttgggtgcgtttagttgctccctttttgtgctctgccaaatggttggctggccaattttaggcggcataggaatcagctgggcattatcctgaatgtactgtgcattggtcgcacgacgttgggcaaaacaaaacacgactagaatccaagctcctattctacatacagttactgaccaatgttttgattaagaacttgtaggcgcaatccaaacacaccctatacatgatgtttttcattatctcattctagatgccttattaggttatatgtatatgcaacctctcaatgaggcaagtctgttaaacattgtgcatatggattttctgtttcgttttctccttgtactatcttaaagtttcagttaggtacatatatttgattgttgcttctagcccacatctttgtccaggtaccacaagtacaagagccctagaaggggatctatagacccaagcgatgagtcgttcttcattaagcactgcctctattcgagttctttgccactagcccactagagatctgtagaagctcaggaaccttaagtggctttcatcgggatgtcacaagtatttgtgatgaggagcagtagagatttagcgttttcgagctgcagcgtaacagtctggatttgagttccatggggactgcatgtcaagccagcagttggtcgatttcatccgcgagcatatagacacagttgtccacagatcattctgaaaaggcatttcgagtaaggatggcaaacaggtgcccatgaagttgctgctcgctcggatggtgctcgacctaattgtgttgccgaagttcttattgaggttattaagatttgccaactttttaggtggtctttgttgaagcaactgaagcccaatacgcattcaaaaaaccactatatacacgatataagacctgtgctctaggtatgatgtgaagccgggcaatgccattcttgctgaggacaaacatttgccaatagaatgggaaacaaattcttgatgttgtcacattaagcacccatgagacggggagaaacatagtggactcctaatttttatggctagcttgcagtgaaagagctgcagaagattaattcctttaaagaaccacgtgagaagcttctgtgcatcatgagctgttgtcaagtcatcaataacttgcttctgaacatattatctaggctgatgagttccttcctattcttatctatgttactatcaaggcaagcaactcttagtcttggccactgtttattctttctgtttcttcttactggttcgctgcaactgagaagctttctgaaaaatttgatgtaggccaatcctcctcagctgcactcaaatctgaagttcgttcagctctttagaagagaaacaaagttaattttagaagtcgaatattatctgactaacctcatttcagcaaagatgtttataatagatgtcagtgctcactcgctctcaatggaggaaaacgagttttagaaacatatggaatcggcaagactagctactcaagtatctgttgcaagcccaagtagctcacaggggcttccaacatctgcaagggcaaatcaggaggaaactgatatggcaagtttgtttactatactattcgatttattcggagaagtttgtttgaccatgaatttgcattccaaaacagtttgttttttgccaccaagcaaaatgtgttcttttttgcttgaaaacaacatgatgtggtttttattgcggtcctgttcaggaaccattttacctatcaaataaaataaaatgctaagctcttatagattttcctttaaatggttgttgtgtgtccgtaccagttttgaggtcgaatgatcatagcattcaaagtgatacatttgacaggttctagattccctttcatggactccaggggaagtcaagcagctgcatgatctgtatattatcatgaaagggaac

SEQ ID NO: 31188 - DNA, 2991 bp, Zea Mays
ctgcatcgcacccccttctccaccaaccctccggcgtctccagagcgcccagatcccgctccggcacctcgccagcacacaccacgcgcgcgccgatctgctcgctcgcccgccccaaatcccgcccggttcctctaccttccccacatcgggcgtcaacgttcgcggaccaaccttccccaaatccgccccggttcctctcccttccccacatcgcctgtcgacattcgcggacggggcttccccacattcggcacctgttgttactgggtataggatacatcggtacctgttgttactaggttccttgggaagggctggaaatctggtgctgtaactactttaggccgaggtggtaacgacatgactgctacaaccattggtaaagccttgggaccgagagaaattcaggtatggaaagatgttgatggtgtacttacttgtgttccaaatatctacccacatgcaaataatgttccatacttaacatttgaagaggccacagaacttgcttttttggtgctcaggttgtactaactagcatagtgctcaagtcaaatgtcactatgttggacattgtgagcactcggatgcttggtatttgctatatttgaagatctatgtatatctgtggattgtgttgctaccagtgaagttagtgtttctgtgtcacttgatccatcaaagatctggaagttttttcttgctcgcacccaaacctatttccaatgctcttaacccttgataacaaggtcaataggagatgtgtatctgaagaaaccagaatttaatagagaacctttgcacagcaagtttcgtcttcaggaaacttttaggagaccacttcttagttctgatccagcaattactgtccaccatcaccatttttgcatttcatggactctgggaacatcttagtaatcagtaagtggttgacacggtccaaagtagcccgcgtaatgtaccacaagtacaagagccctagaaggggatctatagacccaagcgatgagtcgttcttcattaagcactgcctctattcgagttctttgccactagcccactagagatctgtagaagctcaggaaccttaagtggctttcatcgggatgtcacaagtatttgtgatgaggagcagtagagatttagcgttttcgagctgcagcgtaacagtctggatttgagttccatggggactgcatgtcaagccagcagttggtcgatttcatccgcgagcatatagacacagttgtccacagatcattctgaaaaggcatttcgagtaaggatggcaaacaggtgcccatgaagttgctgctcgctcggatggtgctcgacctaattgtgttgccgaagttcttattgaggttattaagatttgccaactttttaggtaggtgttccagagcacggaaggcccttgagctaagccaacttttaggagtcaatatttctccaacaggtacttttgcagtagtcatgagtcattgcttatatgaagtaaggagagaaaattattgcttctcttttctgatgcgtgaagttgtacatggacattctacagagggctcggtgtgcctttcaagtactacatcaatgacttcttatttctttatggacttgtagcacctgaatggaacccgtgtttgaactctgcattttttgaagatgacattattgtcgtattgtaatataatttgatccgtatcaatttagttatgtattaattgttgccaaagaatttatgagatattgagatcgataatatatgtggtattttttttatataattgttgtgcaataacattttgctgaatattttgtataccgttgcaacgcacgggctcctaactagtttatcttgaattacattttttgtgtgtcaggtggtctttgttgaagcaactgaagcccaatacgcattcaaaaaaccactatatacacgatataagacctgtgctctaggtatgatgtgaagccgggcaatgccattcttgctgaggacaaacatttgccaatagaatgggaaacaaattcttgatgttgtcacattaagcacccatgagacggggagaaacatagtggactcctaatttttatggctagcttgcagtgaaagagctgcagaagattaattcctttaaagaaccacgtgagaagcttctgtgcatcatgagctgttgtcaagtcatcaataacttgcttctgaacatattatctaggctgatgagttccttcctattcttatctatgttactatcaaggcaagcaactcttagtcttggccactgtttattctttctgtttcttcttactggttcgctgcaactgagaagctttctgaaaaatttgatgtaggccaatcctcctcagctgcactcaaatctgaagttcgttcagctctttagaagagaaacaaagttaattttagaagtcgaatattatctgactaacctcatttcagcaaagatgtttataatagatgtcagtgctcactcgctctcaatggaggaaaacgagttttagaaacatatggaatcggcaagactagctactcaagtatctgttgcaagcccaagtagctcacaggggcttccaacatctgcaagggcaaatcaggaggaaactgatatggcaagtttgtttactatactattcgatttattcggagaagtttgtttgaccatgaatttgcattccaaaacagtttgttttttgccaccaagcaaaatgtgttcttttttgcttgaaaacaacatgatgtggtttttattgcggtcctgttcaggaaccattttacctatcaaataaaataaaatgctaagctcttatagattttcctttaaatggttgttgtgtgtccgtaccagttttgaggtcgaatgatcatagcattcaaagtgatacatttgacaggttctagattccctttcatggactccaggggaagtcaagcagctgcatgatctgtatattatcatgaaagggaac

SEQ ID NO: 31189 - DNA, 3175 bp, Zea Mays
ctgcatcgcacccccttctccaccaaccctccggcgtctccagagcgcccagatcccgctccggcacctcgccagcacacaccacgcgcgcgccgatctgctcgctcgcccgccccaaatcccgcccggttcctctaccttccccacatcgggcgtcaacgttcgcggaccaaccttccccaaatccgccccggttcctctcccttccccacatcgcctgtcgacattcgcggacggggcttccccacattcggcacctgttgttactgggtataggatacatcggtacctgttgttactaggttccttgggaagggctggaaatctggtgctgtaactactttaggccgaggtggtaacgacatgactgctacaaccattggtaaagccttgggaccgagagaaattcaggtatggaaagatgttgatggtgtacttacttgtgttccaaatatctacccacatgcaaataatgttccatacttaacatttgaagaggccacagaacttgcttttttggtgctcaggttgtactaactagcatagtgctcaagtcaaatgtcactatgttggacattgtgagcactcggatgcttggtatttgctatatttgaagatctatgtatatctgtggattgtgttgctaccagtgaagttagtgtttctgtgtcacttgatccatcaaagatctggaagttttttcttgctcgcacccaaacctatttccaatgctcttaacccttgataacaaggtcaataggagatgtgtatctgaagaaaccagaatttaatagagaacctttgcacagcaagtttcgtcttcaggaaacttttaggagaccacttcttagttctgatccagcaattactgtccaccatcaccatttttgcatttcatggactctgggaacatcttagtaatcagtaagtggttgacacggtccaaagtagcccgcgtaatgtatgtattcttatcttatattcagtttctgtaaattggtctttttgagacttggtgccaaatgttactacatatttaaaatagtataattaaggatatggttaggctctcgttgcggcatattttcctcctaactaatcatatccattcggttttagttttggcatgtaccattaattgttccgtttcaaatacgcttatgatattaaatttgtgattaagatcctaaatgacaagttgcttttctagacaccaattattgcagctgtatgtattgctgttgtagtgttctattttcaatttttgaaccaaatactactagcgattatttatatacaataaactgatactgtgcactttgggtgcgtttagttgctccctttttgtgctctgccaaatggttggctggccaattttaggcggcataggaatcagctgggcattatcctgaatgtactgtgcattggtcgcacgacgttgggcaaaacaaaacacgactagaatccaagctcctattctacatacagttactgaccaatgttttgattaagaacttgtaggcgcaatccaaacacaccctatacatgatgtttttcattatctcattctagatgccttattaggttatatgtatatgcaacctctcaatgaggcaagtctgttaaacattgtgcatatggattttctgtttcgttttctccttgtactatcttaaagtttcagttaggtacatatatttgattgttgcttctagcccacatctttgtccaggtaccacaagtacaagagccctagaaggggatctatagacccaagcgatgagtcgttcttcattaagcactgcctctattcgagttctttgccactagcccactagagatctgtagaagctcaggaaccttaagtggctttcatcgggatgtcacaagtatttgtgatgaggagcagtagagatttagcgttttcgagctgcagcgtaacagtctggatttgagttccatggggactgcatgtcaagccagcagttggtcgatttcatccgcgagcatatagacacagttgtccacagatcattctgaaaaggcatttcgagtaaggatggcaaacaggtgcccatgaagttgctgctcgctcggatggtgctcgacctaattgtgttgccgaagttcttattgaggttattaagatttgccaactttttaggtggtctttgttgaagcaactgaagcccaatacgcattcaaaaaaccactatatacacgatataagacctgtgctctaggtatgatgtgaagccgggcaatgccattcttgctgaggacaaacatttgccaatagaatgggaaacaaattcttgatgttgtcacattaagcacccatgagacggggagaaacatagtggactcctaatttttatggctagcttgcagtgaaagagctgcagaagattaattcctttaaagaaccacgtgagaagcttctgtgcatcatgagctgttgtcaagtcatcaataacttgcttctgaacatattatctaggctgatgagttccttcctattcttatctatgttactatcaaggccaatcctcctcagctgcactcaaatctgaagttcgttcagctctttagaagagaaacaaagttaattttagaagtcgaatattatctgactaacctcatttcagcaaagatgtttataatagatgtcagtgctcactcgctctcaatggaggaaaacgagttttagaaacatatggaatcggcaagactagctactcaagtatctgttgcaagcccaagtagctcacaggggcttccaacatctgcaagggcaaatcaggaggaaactgatatggcaagtttgtttactatactattcgatttattcggagaagtttgtttgaccatgaatttgcattccaaaacagtttgttttttgccaccaagcaaaatgtgttcttttttgcttgaaaacaacatgatgtggtttttattgcggtcctgttcaggaaccattttacctatcaaataaaataaaatgctaagctcttatagattttcctttaaatggttgttgtgtgtccgtaccagttttgaggtcgaatgatcatagcattcaaagtgatacatttgacaggttctagattccctttcatggactccaggggaagtcaagcagctgcatgatctgtatattatcatgaaagggaac

SEQ ID NO: 31190 - DNA, 3140 bp, Zea Mays
catttttgtcactaatgaatctttgtacaaattttattttgaatgctcaagaaaagagttctggaactaaacaacggtacatgatattcatccttattgcacgtgtaaagtgtgagcaggctgcttcttagtgaataaacgaatctttcagttgcatacttctcaaaaacgaaagatcatgttcagtagataaacagttgttccctttttaccttttaaagctatattgattgttgcttggcatttgctttactaaccatcatgaattgaacatatagctcatgatgtcagtctcctgataagctctgtagtaggtaacctcaaatatatcgtcacatccgcttgactttcgagtcattgattttttcgcccctctttttcactactaggttgtactaactagcatagtgctcaagtcaaatgtcactatgttggacattgtgagcactcggatgcttggtcagtatggttttctggcaagggtatgttgaacactgagccatttttgtatttatatttcactgttctgatcactacatgtgtgaccttgagcaggtatttgctatatttgaagatctatgtatatctgtggattgtgttgctaccagtgaagttagtgtttctgtgtcacttgatccatcaaagatctggaagttttttcttgctcgcacccaaacctatttccaatgctcttaacccttgataacaaggtcaataggagatgtgtatctgaagaaaccagaatttaatagagaacctttgcacagcaagtttcgtcttcaggaaacttttaggagaccacttcttagttctgatccagcaattactgtccaccatcaccatttttgcatttcatggactctgggaacatcttagtaatcagtaagtggttgacacggtccaaagtagcccgcgtaatgtatgtattcttatcttatattcagtttctgtaaattggtctttttgagacttggtgccaaatgttactacatatttaaaatagtataattaaggatatggttaggctctcgttgcggcatattttcctcctaactaatcatatccattcggttttagttttggcatgtaccattaattgttccgtttcaaatacgcttatgatattaaatttgtgattaagatcctaaatgacaagttgcttttctagacaccaattattgcagctgtatgtattgctgttgtagtgttctattttcaatttttgaaccaaatactactagcgattatttatatacaataaactgatactgtgcactttgggtgcgtttagttgctccctttttgtgctctgccaaatggttggctggccaattttaggcggcataggaatcagctgggcattatcctgaatgtactgtgcattggtcgcacgacgttgggcaaaacaaaacacgactagaatccaagctcctattctacatacagttactgaccaatgttttgattaagaacttgtaggcgcaatccaaacacaccctatacatgatgtttttcattatctcattctagatgccttattaggttatatgtatatgcaacctctcaatgaggcaagtctgttaaacattgtgcatatggattttctgtttcgttttctccttgtactatcttaaagtttcagttaggtacatatatttgattgttgcttctagcccacatctttgtccaggtaccacaagtacaagagccctagaaggggatctatagacccaagcgatgagtcgttcttcattaagcactgcctctattcgagttctttgccactagcccactagagatctgtagaagctcaggaaccttaagtggctttcatcgggatgtcacaagtatttgtgatgaggagcagtagagatttagcgttttcgagctgcagcgtaacagtctggatttgagttccatggggactgcatgtcaagccagcagttggtcgatttcatccgcgagcatatagacacagttgtccacagatcattctgaaaaggcatttcgagtaaggatggcaaacaggtgcccatgaagttgctgctcgctcggatggtgctcgacctaattgtgttgccgaagttcttattgaggttattaagatttgccaactttttaggtggtctttgttgaagcaactgaagcccaatacgcattcaaaaaaccactatatacacgatataagacctgtgctctaggtatgatgtgaagccgggcaatgccattcttgctgaggacaaacatttgccaatcttgcagtgaaagagctgcagaagattaattcctttaaagaaccacgtgagaagcttctgtgcatcatgagctgttgtcaagtcatcaataacttgcttctgaacatattatctaggctgatgagttccttcctattcttatctatgttactatcaaggcaagcaactcttagtcttggccactgtttattctttctgtttcttcttactggttcgctgcaactgagaagctttctgaaaaatttgatgtaggccaatcctcctcagctgcactcaaatctgaagttcgttcagctctttagaagagaaacaaagttaattttagaagtcgaatattatctgactaacctcatttcagcaaagatgtttataatagatgtcagtgctcactcgctctcaatggaggaaaacgagttttagaaacatatggaatcggcaagactagctactcaagtatctgttgcaagcccaagtagctcacaggggcttccaacatctgcaagggcaaatcaggaggaaactgatatggcaagtttgtttactatactattcgatttattcggagaagtttgtttgaccatgaatttgcattccaaaacagtttgttttttgccaccaagcaaaatgtgttcttttttgcttgaaaacaacatgatgtggtttttattgcggtcctgttcaggaaccattttacctatcaaataaaataaaatgctaagctcttatagattttcctttaaatggttgttgtgtgtccgtaccagttttgaggtcgaatgatcatagcattcaaagtgatacatttgacaggttctagattccctttcatggactccaggggaagtcaagcagctgcatgatctgtatattatcatgaaagggaac

SEQ ID NO: 31191 - DNA, 3275 bp, Zea Mays
atgaatctttgtacaaattttattttgaatgctcaagaaaagagttctggaactaaacaacggtacatgatattcatccttattgcacgtgtaaagtgtgagcaggctgcttcttagtgaataaacgaatctttcagttgcatacttctcaaaaacgaaagatcatgttcagtagataaacagttgttccctttttaccttttaaagctatattgattgttgcttggcatttgctttactaaccatcatgaattgaacatatagctcatgatgtcagtctcctgataagctctgtagtaggtaacctcaaatatatcgtcacatccgcttgactttcgagtcattgattttttcgcccctctttttcactactaggttgtactaactagcatagtgctcaagtcaaatgtcactatgttggacattgtgagcactcggatgcttggtatttgctatatttgaagatctatgtatatctgtggattgtgttgctaccagtgaagttagtgtttctgtgtcacttgatccatcaaagatctggaagttttttcttgctcgcacccaaacctatttccaatgctcttaacccttggtgtgtttcacaacttgattttcacatcttgcttgttgaattgctttacttccaggttgcatctcacatgctatgatcatgtgttgtagataacaaggtcaataggagatgtgtatctgaagaaaccagaatttaatagagaacctttgcacagcaagtttcgtcttcaggaaacttttaggagaccacttcttagttctgatccagcaattactgtccaccatcaccatttttgcatttcatggactctgggaacatcttagtaatcagtaagtggttgacacggtccaaagtagcccgcgtaatgtatgtattcttatcttatattcagtttctgtaaattggtctttttgagacttggtgccaaatgttactacatatttaaaatagtataattaaggatatggttaggctctcgttgcggcatattttcctcctaactaatcatatccattcggttttagttttggcatgtaccattaattgttccgtttcaaatacgcttatgatattaaatttgtgattaagatcctaaatgacaagttgcttttctagacaccaattattgcagctgtatgtattgctgttgtagtgttctattttcaatttttgaaccaaatactactagcgattatttatatacaataaactgatactgtgcactttgggtgcgtttagttgctccctttttgtgctctgccaaatggttggctggccaattttaggcggcataggaatcagctgggcattatcctgaatgtactgtgcattggtcgcacgacgttgggcaaaacaaaacacgactagaatccaagctcctattctacatacagttactgaccaatgttttgattaagaacttgtaggcgcaatccaaacacaccctatacatgatgtttttcattatctcattctagatgccttattaggttatatgtatatgcaacctctcaatgaggcaagtctgttaaacattgtgcatatggattttctgtttcgttttctccttgtactatcttaaagtttcagttaggtacatatatttgattgttgcttctagcccacatctttgtccaggtaccacaagtacaagagccctagaaggggatctatagacccaagcgatgagtcgttcttcattaagcactgcctctattcgagttctttgccactagcccactagagatctgtagaagctcaggaaccttaagtggctttcatcgggatgtcacaagtatttgtgatgaggagcagtagagatttagcgttttcgagctgcagcgtaacagtctggatttgagttccatggggactgcatgtcaagccagcagttggtcgatttcatccgcgagcatatagacacagttgtccacagatcattctgaaaaggcatttcgagtaaggatggcaaacaggtgcccatgaagttgctgctcgctcggatggtgctcgacctaattgtgttgccgaagttcttattgaggttattaagatttgccaactttttaggtaggtgttccagagcacggaaggcccttgagctaagccaacttttaggagtcaatatttctccaacaggtggtctttgttgaagcaactgaagcccaatacgcattcaaaaaaccactatatacacgatataagacctgtgctctaggtatgatgtgaagccgggcaatgccattcttgctgaggacaaacatttgccaatagaatgggaaacaaattcttgatgttgtcacattaagcacccatgagacggggagaaacatagtggactcctaatttttatggctagcttgcagtgaaagagctgcagaagattaattcctttaaagaaccacgtgagaagcttctgtgcatcatgagctgttgtcaagtcatcaataacttgcttctgaacatattatctaggctgatgagttccttcctattcttatctatgttactatcaaggcaagcaactcttagtcttggccactgtttattctttctgtttcttcttactggttcgctgcaactgagaagctttctgaaaaatttgatgtaggccaatcctcctcagctgcactcaaatctgaagttcgttcagctctttagaagagaaacaaagttaattttagaagtcgaatattatctgactaacctcatttcagcaaagatgtttataatagatgtcagtgctcactcgctctcaatggaggaaaacgagttttagaaacatatggaatcggcaagactagctactcaagtatctgttgcaagcccaagtagctcacaggggcttccaacatctgcaagggcaaatcaggaggaaactgatatggcaagtttgtttactatactattcgatttattcggagaagtttgtttgaccatgaatttgcattccaaaacagtttgttttttgccaccaagcaaaatgtgttcttttttgcttgaaaacaacatgatgtggtttttattgcggtcctgttcaggaaccattttacctatcaaataaaataaaatgctaagctcttatagattttcctttaaatggttgttgtgtgtccgtaccagttttgaggtcgaatgatcatagcattcaaagtgatacatttgacaggttctagattccctttcatggactccaggggaagtcaagcagctgcatgatctgtatattatcatgaaagggaac

SEQ ID NO: 31192 - DNA, 1854 bp, Zea Mays
atttgctatatttgaagatctatgtatatctgtggattgtgttgctaccagtgaagttagtgtttctgtgtcacttgatccatcaaagatctggaagttttttcttgctcgcacccaaacctatttccaatgctcttaacccttgataacaaggtcaataggagatgtgtatctgaagaaaccagaatttaatagagaacctttgcacagcaagtttcgtcttcaggaaacttttaggagaccacttcttagttctgatccagcaattactgtccaccatcaccatttttgcatttcatggactctgggaacatcttagtaatcacccacatctttgtccaggtaccacaagtacaagagccctagaaggggatctatagacccaagcgatgagtcgttcttcattaagcactgcctctattcgagttctttgccactagcccactagagatctgtagaagctcaggaaccttaagtggctttcatcgggatgtcacaagtatttgtgatgaggagcagtagagatttagcgttttcgagctgcagcgtaacagtctggatttgagttccatggggactgcatgtcaagccagcagttggtcgatttcatccgcgagcatatagacacagttgtccacagatcattctgaaaaggcatttcgagtaaggatggcaaacaggtgcccatgaagttgctgctcgctcggatggtgctcgacctaattgtgttgccgaagttcttattgaggttattaagatttgccaactttttaggtaggtgttccagagcacggaaggcccttgagctaagccaacttttaggagtcaatatttctccaacaggtggtctttgttgaagcaactgaagcccaatacgcattcaaaaaaccactatatacacgatataagacctgtgctctaggtatgatgtgaagccgggcaatgccattcttgctgaggacaaacatttgccaatagaatgggaaacaaattcttgatgttgtcacattaagcacccatgagacggggagaaacatagtggactcctaatttttatggctagcttgcagtgaaagagctgcagaagattaattcctttaaagaaccacgtgagaagcttctgtgcatcatgagctgttgtcaagtcatcaataacttgcttctgaacatattatctaggctgatgagttccttcctattcttatctatgttactatcaaggccaatcctcctcagctgcactcaaatctgaagttcgttcagctctttagaagagaaacaaagttaattttagaagtcgaatattatctgactaacctcatttcagcaaagatgtttataatagatgtcagtgctcactcgctctcaatggaggaaaacgagttttagaaacatatggaatcggcaagactagctactcaagtatctgttgcaagcccaagtagctcacaggggcttccaacatctgcaagggcaaatcaggaggaaactgatatggcaagtttgtttactatactattcgatttattcggagaagtttgtttgaccatgaatttgcattccaaaacagtttgttttttgccaccaagcaaaatgtgttcttttttgcttgaaaacaacatgatgtggtttttattgcggtcctgttcaggaaccattttacctatcaaataaaataaaatgctaagctcttatagattttcctttaaatggttgttgtgtgtccgtaccagttttgaggtcgaatgatcatagcattcaaagtgatacatttgacaggttctagattccctttcatggactccaggggaagtcaagcagctgcatgatctgtatattatcatgaaagggaac

SEQ ID NO: 31193 - DNA, 2048 bp, Zea Mays
ttgctatatttgaagatctatgtatatctgtggattgtgttgctaccagtgaagttagtgtttctgtgtcacttgatccatcaaagatctggaagttttttcttgctcgcacccaaacctatttccaatgctcttaacccttgataacaaggtcaataggagatgtgtatctgaagaaaccagaatttaatagagaacctttgcacagcaagtttcgtcttcaggaaacttttaggagaccacttcttagttctgatccagcaattactgtccaccatcaccatttttgcatttcatggactctgggaacatcttagtaatcagtaagtggttgacacggtccaaagtagcccgcgtaatcccacatctttgtccaggtaccacaagtacaagagccctagaaggggatctatagacccaagcgatgagtcgttcttcattaagcactgcctctattcgagttctttgccactagcccactagagatctgtagaagctcaggaaccttaagtggctttcatcgggatgtcacaagtatttgtgatgaggagcagtagagatttagcgttttcgagctgcagcgtaacagtctggatttgagttccatggggactgcatgtcaagccagcagttggtcgatttcatccgcgagcatatagacacagttgtccacagatcattctgaaaaggcatttcgagtaaggatggcaaacaggtgcccatgaagttgctgctcgctcggatggtgctcgacctaattgtgttgccgaagttcttattgaggttattaagatttgccaactttttaggtggtctttgttgaagcaactgaagcccaatacgcattcaaaaaaccactatatacacgatataattatggcctcatggagtcatgggtttaacctctggaaccctgaatctgaataagcaatccgtaccgtgcaactgaactaaccatcaatactcaagaccgagagcgcctttattgaagctaccaaggaaatcaatgacctgtgctctaggtatgatgtgaagccgggcaatgccattcttgctgaggacaaacatttgccaatagaatgggaaacaaattcttgatgttgtcacattaagcacccatgagacggggagaaacatagtggactcctaatttttatggctagcttgcagtgaaagagctgcagaagattaattcctttaaagaaccacgtgagaagcttctgtgcatcatgagctgttgtcaagtcatcaataacttgcttctgaacatattatctaggctgatgagttccttcctattcttatctatgttactatcaaggcaagcaactcttagtcttggccactgtttattctttctgtttcttcttactggttcgctgcaactgagaagctttctgaaaaatttgatgtaggccaatcctcctcagctgcactcaaatctgaagttcgttcagctctttagaagagaaacaaagttaattttagaagtcgaatattatctgactaacctcatttcagcaaagatgtttataatagatgtcagtgctcactcgctctcaatggaggaaaacgagttttagaaacatatggaatcggcaagactagctactcaagtatctgttgcaagcccaagtagctcacaggggcttccaacatctgcaagggcaaatcaggaggaaactgatatggcaagtttgtttactatactattcgatttattcggagaagtttgtttgaccatgaatttgcattccaaaacagtttgttttttgccaccaagcaaaatgtgttcttttttgcttgaaaacaacatgatgtggtttttattgcggtcctgttcaggaaccattttacctatcaaataaaataaaatgctaagctcttatagattttcctttaaatggttgttgtgtgtccgtaccagttttgaggtcgaatgatcatagcattcaaagtgatacatttgacaggttctagattccctttcatggactccaggggaagtcaagcagctgcatgatctgtatattatcatgaaagggaac

SEQ ID NO: 31194 - DNA, 2268 bp, Zea Mays
tgctatatttgaagatctatgtatatctgtggattgtgttgctaccagtgaagttagtgtttctgtgtcacttgatccatcaaagatctggaagttttttcttgctcgcacccaaacctatttccaatgctcttaacccttggtgtgtttcacaacttgattttcacatcttgcttgttgaattgctttacttccaggttgcatctcacatgctatgatcatgtgttgtagataacaaggtcaataggagatgtgtatctgaagaaaccagaatttaatagagaacctttgcacagcaagtttcgtcttcaggaaacttttaggagaccacttcttagttctgatccagcaattactgtccaccatcaccatttttgcatttcatggactctgggaacatcttagtaatcacccacatctttgtccaggtaccacaagtacaagagccctagaaggggatctatagacccaagcgatgagtcgttcttcattaagcactgcctctattcgagttctttgccactagcccactagagatctgtagaagctcaggaaccttaagtggctttcatcgggatgtcacaagtatttgtgatgaggagcagtagagatttagcgttttcgagctgcagcgtaacagtctggatttgagttccatggggactgcatgtcaagccagcagttggtcgatttcatccgcgagcatatagacacagtaagtaccaagcagtttaacactatctgccctttcgaaaattgtaagcaccatcttcggattgcctttgggcttcctttggcaatttctcatgctgatgctgtcctggccatatgctttctggaaactaaatgaactgagtccttttgtatggctgggcatgttactgtttgctttccttgttgatacttgtagtgatggtgggttggatttcctgttggatacatgaatcaggttgtccacagatcattctgaaaaggcatttcgagtaaggatggcaaacaggtgcccatgaagttgctgctcgctcggatggtgctcgacctaattgtgttgccgaagttcttattgaggttattaagatttgccaactttttaggtaggtgttccagagcacggaaggcccttgagctaagccaacttttaggagtcaatatttctccaacaggtggtctttgttgaagcaactgaagcccaatacgcattcaaaaaaccactatatacacgatataagacctgtgctctaggtatgatgtgaagccgggcaatgccattcttgctgaggacaaacatttgccaatagaatgggaaacaaattcttgatgttgtcacattaagcacccatgagacggggagaaacatagtggactcctaatttttatggctagcttgcagtgaaagagctgcagaagattaattcctttaaagaaccacgtgagaagcttctgtgcatcatgagctgttgtcaagtcatcaataacttgcttctgaacatattatctaggctgatgagttccttcctattcttatctatgttactatcaaggcaagcaactcttagtcttggccactgtttattctttctgtttcttcttactggttcgctgcaactgagaagctttctgaaaaatttgatgtaggccaatcctcctcagctgcactcaaatctgaagttcgttcagctctttagaagagaaacaaagttaattttagaagtcgaatattatctgactaacctcatttcagcaaagatgtttataatagatgtcagtgctcactcgctctcaatggaggaaaacgagttttagaaacatatggaatcggcaagactagctactcaagtatctgttgcaagcccaagtagctcacaggggcttccaacatctgcaagggcaaatcaggaggaaactgatatggcaagtttgtttactatactattcgatttattcggagaagtttgtttgaccatgaatttgcattccaaaacagtttgttttttgccaccaagcaaaatgtgttcttttttgcttgaaaacaacatgatgtggtttttattgcggtcctgttcaggaaccattttacctatcaaataaaataaaatgctaagctcttatagattttcctttaaatggttgttgtgtgtccgtaccagttttgaggtcgaatgatcatagcattcaaagtgatacatttgacaggttctagattccctttcatggactccaggggaagtcaagcagctgcatgatctgtatattatcatgaaagggaac

SEQ ID NO: 31195 - DNA, 1775 bp, Zea Mays
cttgttgaattgctttacttccaggttgcatctcacatgctatgatcatgtgttgtagataacaaggtcaataggagatgtgtatctgaagaaaccagaatttaatagagaacctttgcacagcaagtttcgtcttcaggaaacttttaggagaccacttcttagttctgatccagcaattactgtccaccatcaccatttttgcatttcatggactctgggaacatcttagtaatcagtaccacaagtacaagagccctagaaggggatctatagacccaagcgatgagtcgttcttcattaagcactgcctctattcgagttctttgccactagcccactagagatctgtagaagctcaggaaccttaagtggctttcatcgggatgtcacaagtatttgtgatgaggagcagtagagatttagcgttttcgagctgcagcgtaacagtctggatttgagttccatggggactgcatgtcaagccagcagttggtcgatttcatccgcgagcatatagacacagttgtccacagatcattctgaaaaggcatttcgagtaaggatggcaaacaggtgcccatgaagttgctgctcgctcggatggtgctcgacctaattgtgttgccgaagttcttattgaggttattaagatttgccaactttttaggtggtctttgttgaagcaactgaagcccaatacgcattcaaaaaaccactatatacacgatataagacctgtgctctaggtatgatgtgaagccgggcaatgccattcttgctgaggacaaacatttgccaatagaatgggaaacaaattcttgatgttgtcacattaagcacccatgagacggggagaaacatagtggactcctaatttttatggctagcttgcagtgaaagagctgcagaagattaattcctttaaagaaccacgtgagaagcttctgtgcatcatgagctgttgtcaagtcatcaataacttgcttctgaacatattatctaggctgatgagttccttcctattcttatctatgttactatcaaggcaagcaactcttagtcttggccactgtttattctttctgtttcttcttactggttcgctgcaactgagaagctttctgaaaaatttgatgtaggccaatcctcctcagctgcactcaaatctgaagttcgttcagctctttagaagagaaacaaagttaattttagaagtcgaatattatctgactaacctcatttcagcaaagatgtttataatagatgtcagtgctcactcgctctcaatggaggaaaacgagttttagaaacatatggaatcggcaagactagctactcaagtatctgttgcaagcccaagtagctcacaggggcttccaacatctgcaagggcaaatcaggaggaaactgatatggcaagtttgtttactatactattcgatttattcggagaagtttgtttgaccatgaatttgcattccaaaacagtttgttttttgccaccaagcaaaatgtgttcttttttgcttgaaaacaacatgatgtggtttttattgcggtcctgttcaggaaccattttacctatcaaataaaataaaatgctaagctcttatagattttcctttaaatggttgttgtgtgtccgtaccagttttgaggtcgaatgatcatagcattcaaagtgatacatttgacaggttctagattccctttcatggactccaggggaagtcaagcagctgcatgatctgtatattatcatgaaagggaac

SEQ ID NO: 31196 - DNA, 651 bp, Zea Mays
accttgcacaccaaaaggttccatttggtctcttccttcctccccagattccgcatcttctccttaaaatgcctgcaagtcgtaaaatttgcgataaataaaaacacgtgttctgttatatcttatatgaatgaaatcaagatatgccagagcatatcctcttcctctccccatttgctaccgctttggcaaagagatcgatgcgccgcgctcacctgcagagaggaaccttgcaggtgtccgggaggaagcacatgcgggaatgcagctcgaggagctgccacatccgcctgcagttggcacagccgccgggcacccggactccgcaggccgagaagtggcgcacgagcagctcaatgcccttgcaggcgcgaaacttgcaggcggctgctaggctgcccttgagcgcttgatctcgaggcccgatcgtcctgcatccgtcccggcagatgtggaccagcgcctccattgcttcgttcttttcagggcaacatactggctcggattctggaaattgttgcagaaagaacaacctcaacacgagatccttgcggtatgtcgatccttagaggtggtggctatggagatctttgcaagccatggatggaggtccaatgctagattagaaggagcttgatttgttgatgtttt

SEQ ID NO: 31197 - DNA, 1762 bp, Zea Mays
ccggaaccgtgtggcgcctgttccatccatcatccatgcttgatggcttgatgcttccgatccatcacgcggcttcacgagctatatacactcggcttcagagacgccaacaggacagatagcagccctccgcactttcggctcgtagctacactacactacaagcgcgcgcgagcaacgtcgtcgtcgtcgtcagccacattgagccatacatgcatggcgattgcagagcacacgccgtcgtcgtcgtcgcctttccggcagcatcgacccaccggatgggtcacgttcacggcggcaacgccactgctcgcgctgcagctggccctgctggccgccttggttatggcgacggacccttcaccttctccggagctcgtcgagctgacgctcctcaccggcgcgcgggagaagggcgcagtgtgcttggatggaagcccgccgggctaccacttgcagagaggcttcggctccggatcccacagctggatcgtctatcttcagggaggagcttggtgcagcagtaacaccacagacacagaaacttgttccgagcgtaagatgaccgcctatggctcgtccaagcttatgggagcagtaacctttgatgggatattcagaaaccagcagcctcagaatcctgatttctacaactggaacaaagtctacgtaaggtattgcgacggggcgtcattttctggggacgcggagggtgaagcacaggacggaactaagctgttcttcagaggatcgcgcatctgggacgcagtcgtcgatgaactcatgggaaaaggaatggacgccgctgaacaggccttgctcgcaggctgctctgctggcggtctagctacgctactgcactgcgacgatttccgcgcgaggtttccgcaggaggtcccggtcaaatgccttcctgatggcggattcttcctggacataaaggatttatcaggagaaaggcacatgcggtcggtgttcagtggagttgttcagcttcagaatgttagcggagttctgcccaagcgctgcctggcgaagaaggacccagcagagtgtttcttccccgctgaacttatcaagagcatcagcacccccacgttcatcgtgaactcggaatacgattcttggcagatcgcgaacgttgtcgcgcccgacggatcctacactggagacgcgtggacgagctgcagagacaacattcggaactgcagctccgagcagatggacgtgctgcatgggttcagggcggaactcatcagggagctgaaggttgccgaaggtgagcgggaatgggggctgttcgtcgactcgtgcttcacgcactgtcagacccagtcgagcgactggtggcattcgcccacctccccgaggctcggtaatcagactgttgcagaggctgttggggactggtactttggtagaaggcgggtagtgaagcaggtcgactgcgagtacccttgcaaccccacgtgtagcattcagtagctgtgagctggcttcttcttcgtgaccgccattgcaccgagctgagattcatgggagtccttgtttcctccactctcgtatttgatttgtcgttgttagaaaaccagttacattttaatctagagaacgatacataaatgttaccgacaatacgtacaagtgtgtgtaaacttagcatgttgaacaaagcatagggaaacataattgtttgtgttggcgccgatctgtcaccaaacactaggggtataaccgtctggcggtgtcctgtatggcggcg

SEQ ID NO: 31198 - DNA, 1391 bp, Zea Mays
agagaggcagagagccggccatggacgcaacgtcaaactcgaatttacgccggccaggccaccaccagtcgcccacgccccgccgccagtcctggcgcgcgcgcgcgcgtcccccggcccacaccgcaccttccacttccacggaccctgctgcatgcgcgctccagtgcgcagcactagtacgtacgagtagtagtagtgctgtgctgaggacgaggctgctaggtgctagctagctagctctccatgaatcgtatcgatcggaagagaagaagcccattccctgcccctgcctgccttggatacctactccctctccctccctcctcacatcacacagacagcagacaccactggccggccggcctgttcgttcattctctctcgctcgctcgctcgcccgcccgcccgcccgccagcctttcattccatctattaaacgcctataaatacagtacaggctcacacgtccatggaaggaatgtccatcttccttcactaccaccacacggctgctggctgctactaggcaggccttcccacacgcccgccgtagctctctcgcttgtgtggtcatccccggcctcgccttctctcattctgtcgtctgctgcccctgcctgccagtgccaccaccccccggccgtgcggattatattcgggcccaacccaagcaaatggagcagaaggcgaggaggcgccgcgtgccggcgttcggagagtggaactacaactactacggcagcagcgcggagctcgccacgcccgcggcaccggcggagctggaggcccgcagcgacgtctggttcaagtactcgccgcccccgcggaagccaccgccgccgccggcggccagcaggaaagttcggaggccggcggccgacaggtccgcatgcggcggcagcggcaagcggccccgtgccgcgacgcctgcgagggcgtccgacgccgtggtcccatcgtcgtcgtccgtgccacgcacgccggcgaagagcgcggccggcgctgccagggcgcgcgtggtgcgccgcgtcgacgcggacctgtaccaggtgcccccgccggacctgctccacgacgaggatctgccaccgaggcggaagaaggcgtccagcaggagcctgtggatgggttgcttcggcttcagttgcgttccggctgattaactattttctgtatttttttatccatgtatctactcctagtttaactgtactccttttcagattgtgcaatgttttggtttttttgtttgtttctagactagatttcagattgtgcaatgttttggtttttttttctttctggactagagcgagtattgtacagtgtgggcaatgaaaaaaatgtactattatgtatggtttcgtattcgagcctacttgacgccg

SEQ ID NO: 31199 - DNA, 1369 bp, Zea Mays
catggacgcaacgtcaaactcgaatttacgccggccaggccaccaccagtcgcccacgccccgccgccagtcctggcgcgcgcgcgcgcgtcccccggcccacaccgcaccttccacttccacggaccctgctgcatgcgcgctccagtgcgcagcactagtacgtacgagtagtagtagtgctgtgctgaggacgaggctgctaggtgctagctagctagctctccatgaatcgtatcgatcggaagagaagaagcccattccctgcccctgcctgccttggatacctactccctctccctccctcctcacatcacacagacagcagacaccactggccggccggcctgttcgttcattctctctcgctcgctcgctcgcccgcccgcccgcccgccagcctttcattccatctattaaacgcctataaatacagtacaggctcacacgtccatggaaggaatgtccatcttccttcactaccaccacacggctgctggctgctactaggcaggccttcccacacgcccgccgtagctctctcgcttgtgtggtcatccccggcctcgccttctctcattctgtcgtctgctgcccctgcctgccagtgccaccaccccccggccgtgcggattatattcgggcccaacccaagcaaatggagaaggcgaggaggcgccgcgtgccggcgttcggagagtggaactacaactactacggcagcagcgcggagctcgccacgcccgcggcaccggcggagctggaggcccgcagcgacgtctggttcaagtactcgccgcccccgcggaagccaccgccgccgccggcggccagcaggaaagttcggaggccggcggccgacaggtccgcatgcggcggcagcggcaagcggccccgtgccgcgacgcctgcgagggcgtccgacgccgtggtcccatcgtcgtcgtccgtgccacgcacgccggcgaagagcgcggccggcgctgccagggcgcgcgtggtgcgccgcgtcgacgcggacctgtaccaggtgcccccgccggacctgctccacgacgaggatctgccaccgaggcggaagaaggcgtccagcaggagcctgtggatgggttgcttcggcttcagttgcgttccggctgattaactattttctgtatttttttatccatgtatctactcctagtttaactgtactccttttcagattgtgcaatgttttggtttttttgtttgtttctagactagatttcagattgtgcaatgttttggtttttttttctttctggactagagcgagtattgtacagtgtgggcaatgaaaaaaatgtactattatgtatggtttcgtattcgagcctacttgacgccg

SEQ ID NO: 31200 - DNA, 1087 bp, Zea Mays
ttctcgtttcaattcagtaacctgaacacacaaaaaaaacagtttcaaatgtctgtgtcagttggtatttatgtagctgacaaaaaaaaaccttaactatatatgctggctatatatgagtgagctcgagtgctctctggctgaaatgtagacgtcatgattgttagacacgagaaatatatatatatataggaacaataatatgagctgttcacaaactgtcgtaaatagaaactgcatatgctaaatgcaggtacgtttttttcccacttatgaatagacaaagaatggaatacagctatactatttcaacacagaagcttctgtgtgttggggtacttatattattagcacagttcaaagctgacagcacattccggacatatgttttttctctgcaagctctgttaactttacaaactaatgaaattgcagttctcttttctcgaaccagttttaagttaaagaaagaaagaaatgttcctagagatacgtagagagtgtttggtttgaagagtcaatccgttctatatatgatgatgcatcatgagtttattacataaatttagtggaacaaacgtattcctcattattatgaattattaacatatgagtaataaaatgatgatggatcaatccattcatttccacgaactaaacaataaaatgaggagtaaaaaaataatgaactatcttatttctcgaacccaacacgctattatagtagctacaccctattgtagtagctactgctgtcgctagctagttggtgatatgatgcccggttactgatacactgatatttcacggagaacacacccgtgcgtgttcttgatatataggactatataggagcatttctagtatggaaaatatggaggacagctcgaattcactagtcgaacaccaatccacaggcataagagcatgtgatgattgatgtacacgtccaaaaattctgtgtgctcctatatatagacaatttttttataaaaaaaaattagacttgtacgtgcatctaaagttagagaacggtgctaagagatagtgatacagataaagaagaacttgcatgcattcttcagga

SEQ ID NO: 31201 - DNA, 669 bp, Zea Mays
ctgaacacacaaaaaaaacagtttcaaatgtctgtgtcagttggtatttatgtagctgacaaaaaaaaaccttaactatatatgctggctatatatgagtgagctcgagtgctctctggctgacaagattgatgggagtggatggatcgatccgcctactgaccgccgttgggcttctcgtcgccgccggcggtaccagacttcaagaacgggctgatgccgagcgtcccgaggccggagacagcgccagacccgcccatcgcggtcgagtagccgaactcgtagccgccgccgttgatccccagcctcgcgatgggctcgccgccgtcatagctcctggacagcatctgcgcgttgccgaactgctcctgcccgaacacggaggcggagcctccgagggacccgagcgccgccgagtgtccaatgttgatgaagttgtgcgcgccgttcggcatcgcgttgccgatgaactctgccatcgcttgcggccctgtcggcgccgtggacgcagaagctgccgctgccgcctacaaggaagaagagcgaggacgaattaacagccgacgcaacacacgttcgctcatgtgatctctacaacatgtgcgagccagcgaatggtacgttgtgagacgacgatatatatatatatgtcgatcgacgatcgtcaca

SEQ ID NO: 31202 - DNA, 4324 bp, Zea Mays
ctgaaacttggtaggagcagtcaatcgatctgcggttggtatgttcttttgcggagtgtgtttggtgtccctagaggttagattaggccagggaattaagtcacagtgttctcactgttcgagaatttttagtggctcccattcaccctctctggtcgtctaactggtccttcacctatataattttacagcttagagtataacttaaatcgtaatgcaggttaaattgagtattccagagcaagtagtctggactaattttcttgttgtaacaagatcagaagtataaacacacataaatatacacttctcttgtacattatatggaagtgtaggagacaacatgaaggaatactggcaaacatcacgatacactcttgaccttggtccactgtgatatactcagtttattgcattggcacgtcgttgtaacttgcttacatagtcattatagacacacatgtacaagctgaaacctgcagctaattccgtgatacctttcagtgattcctgattgctcattttagagagaacaagcttctacaaagtttatggaacccaacaaatgaacccctagggtcttcaatatctcatcacccagcagccacctgatattgttcttatcttgatttggtcagttttgtcagaggatatggtgagggatggttatgaggacgttgtaaacatatacatttcatctgtgctcatcgagcggatgagagagaaacaaaaggagattacacaactaacatgtagcgtttgcagatctaggtaaatacaatcacctcttctttgtactcacatacaagcacttatgacttatccatgtattttatgaactgaattgtgatcaattatactactgtgcttttaggacatgttatttttgcttaaaagtgccagactttcagttagtgcttttggcttgttggaaatggatgaggccgagatgctaactccccatgcttctctctcctattatggtcaattcagaacatagtcttcaataaaaggaatgatcaatctggcgtggcaaattatgcatgctgttagcagtagactgttagactcaagtagtacaaaatcttttagaccagctgatatagagacaagagcccttggagctgcatatgctgctgggttagctgcaagagtttggaccaaggagcaggtatttgtaggtttgcataaggagaacatgacagtcttccgcctgaaactgcatgaagcgcacatgaagaagagggcagattcatggtacaaggcaatccctagatcatttgatttggctgactgatctttctctgtaagtttatcttgtcagtgctccatctatttctggaagctgcaaatgattacattcgtatttgttgggattattcttagctacttgttatttatatataacatcacgatcttttacaaacaaacgcgagtacatgtataatttggttgcagaagatcattagattgagcactaccatgtgaggcaatctatatggtttgctttctgtgtgtatgtctgcaagcaaagtgacttgtactctatgacatgtattcattttcattttgcaattataaactattcgaatttatatacatactttctagaaaaaagctgtagttattattcattgtgcattaatattttatcaaattgattgtgtattgttgcaacacaagggtacctaatttgcttattaaaacaagatttatttacacaatatatatagatcgtaacaatgtaccatcacctaactatagttctctatatattacttcatccgtttcaatatataaatcgtttgacttttttaccccaattttttactagtttatcttattaaaaaaataataattactattattttttactatgatatcatttagtatatctgatgcaaaacctggggttcgaactgtggcagaacctccaagttattgggcccacatgtacctgtctttcttccaaagacctcagacggccatgcatgtgcaccagatagcttaacaggatctgtccgattgccccaaggacatcggataaaccactttcaaccagaaccgcggattaagtaatacaaatcacacacaccaatatttttgcagcggaaaatcttactaccaaattttacaagttacaaaaattttatattattttatcggagtgattacaaaagtataagtttgaaatatatgctagctcaaatgaccatcctcaataagaaatataagggagttacttagacttataagaaggccgagcccaccggcacttaacaccatcacagcagcacaaggttagaacctgaaaaacaacagggaataaaaccctgagtacggaattactcagcaagacttacctgactaaagaaaagactctcaagggtatgctggctagagggattcaaggtatggcttatcaagaatcaaagactctgttttgcagaaaagcttactaggagtggatccttaaaatccaattttattgtcaggttaggtaaaattacctgcatctagagttctttctaccctagttcaaacacttgacctgcactagccaatttcttagcaaacctttcattcatctttactggagttctacgtatagggcagtgaccaagtcttcataaccgcgaaggtacggcgatccgaatcaattatactcagctgaggatctccaatcacacgacatatgtagcacttaacccttgcatatgtcaacccgccaccggggtttttaagaccagatcaggttcacgcgaaccgagagcacagatacaccaccgtccagcctcttgccacggagggtacacactactcccgccaccgctccacgcccattccgtgttatcttattctggccttagtctgcccgaggcaaggcttacccatgacgaggcatgtgaccagttaaagggtcctcggtcatcaagcctacatcgacacggtccttaatcgactcagacggagacactacaccgagactctcttctcgtgcaagtcacccgcccggtctcagcttaattatttaaaactcaaagcttggtacctgacagaggtacatcttttccgatgttgaacccatcacggccatgatggatccaccatcaagttttgttttcaaaaacatcccacccacttttgccacatcatcttttgtaaaaacaaaatatttgtttttctaaagcaaggctaagcatcaaaaatcttttgtaaaacagggatttcaaggaaggtaatcaaatccaaggaaggtaatgcaaaaattgttttagcaatcaacgcctatcacctaatgtatcaagcaagtgaaaatgatttttaaaacacaagggggtggcaaatgcaccggggcttgcctgagtaacactaggttagtgttgttagacggcgatcctttggcgagcagcttttgttctgccactcgttcagtctatccatcttcaggttcatcattcgcatcacctcgcgaatcagtctgcgcttggggtcgacttggctcgggttctccgcatcacgtggttaattcacatacctgaatgaaatgcattatgcacatgaatgcatatcgacggaaatattataattctaaatagtgttatacgatagcgtattaaacacctaagggcgaggcgttgtacaatcttacacgaaaacactagttattaatatacgactacgcacaataattacgcttctctaaattagacgaacctaacacaaacatcgcaaacaaatcatatactttaaacataattagcctaaacacaactcatcagctacttaattaaattctaaatttatcactcgttttataaattatactacatcgctcaaaaagaactattttaattttattttactcctcacatgtttttcatgtcaacaattactcaaacatttctttatcgtaaatatatacacatctatagaagtgattaaaatattttatcatcacagaggcctactcatattctactcggtacactaattcggctaattgaccgaaataacgaaataactcgctataactgaatctggctcgataattgcaagaacctcgatgtcgacgagagtttcgtgactcacgtaattatcgagcaccgcattagcacattaatttatttaacgatcgaactattctgaataattcatcagcttaccgcgactaagctgatctcggattttgcaaggaccatgactaccaccagtttattcttttcaccggccgatgtactgaagcttccttttcctcaaaatcctggggctcgacccgaacacaaaacgcgcacgacgcgtaggagctgacacggttgtagcc

SEQ ID NO: 31203 - DNA, 392 bp, Zea Mays
ccggcgaggcctgagctggaaaccgggcgagggagaaggagctcgcagggataccaaggcgagggagcagcacgccggggaggccgagcagggagcatgtgcggcggcgtccggcgagcgcgcaggggaacggtaccctggccaagcagcgctgaatattatcaccacagggagccgtacacgtgtgaagtttccagggagattaggatgcatgggcgtgtgcacggaggagcaggacggacgtgtgggcatggtggagcttggacgatggggaaacagcgtcaaaggtctagcacgctagttggaggggctcggctaacaagcctggctgcggcaaggtgagctgaggagatgagaaagctgagcagcaaggcagacggccgaagatttat

SEQ ID NO: 31204 - DNA, 1383 bp, Zea Mays
atagagttgttctacttctattctactggagtgcattaccacctgtctttttccttcctcttcaacgtctcgaacaagcaggaggaggtagaccgaacaactccaggtcgcgggagcggccatttctctggggcgggaccgcgggagagctctagctcttgcagcagtagaactctactgcagccagctatttatgacagagttaagagaaatggataaggatggcagctccgagagaagtcgcccagatcatggtgatgtgaagatgctcaagttcagaccaaaggtgcctcgacagaagcaaaagccaaagcaacaagaccctaagccaattgatgaagatgtgatgaagatattgaggactcgccaagtggctgcaaaaagtgcaccaaacacagaagatgagtgctcaccacagaagaccctctcgacgccaccttctgcagatgttgtttgcttgtcaccagcgcaactcggagtgcaaaaacaaaatcaattgccactccaaattcctagatccttccctgttcctgttaattcaggtgaatgtgaagattcataagctcctttgttcttctgaacaatactttccactaagaatttttatcgaaatattcaactcttgacaggattggtttatgaagaagagagtagtgatgacgacgacgataatgatagtgacaatgttgggttgctggagactcagccagattcaattgaaagtgaagctttaacatgtccggctgaggagcttgatttgcttcagcaagaaggtagcaaagaaagaatgttcttcttccagttcccaaactctcttcctttacccaaaaggtcgtccagtgccggcaaggaggtgatggaaggatccaacctgcagcagctgcctcagggttatttgggcaaaatgctagtatacaagagcggcaagatcaaaatgaagttaggagacatcatctttgatgtgaacccaggagtagaaagtaggatgctgcagcgtgcagtagctctcaacactcgagacaaacactgttgcttgcttggagagattgagaatcgtcatgttattgtgactcccaatgttgattctttgttgaacgacaagtagggaccaactgtagcagctttgtcacagattgtgtgtagacctgtagatatgcagggttagtgacatctgtagaaattatatcagctctgtcaaatgatgtataggattttagttgtgtagtgttgtgaacgttttattgtgattgcagtgctatgttagttttagaactgcatgcagctccctgtggatgaatgtttgtaaggatcggtatttgaccttgattgtattggaaggcaaatataataaaaatcacgtcgttcttgtgggcaaggccttct

SEQ ID NO: 31205 - DNA, 1573 bp, Zea Mays
atagagttgttctacttctattctactggagtgcattaccacctgtctttttccttcctcttcaacgtctcgaacaagcaggaggaggtagaccgaacaactccaggtcgcgggagcggccatttctctggggcgggaccgcgggagagctctagctcttgcagcagtagaactctactgcagccagacactgcaaagggcgagaggtttgctttcgcgccctgggactttcaagaagcactcgttctagggtggtgcctcgcgtgcttttcgtgcgactcgtggtctgattccttagtagttccagtgctgcgggtcaacttttggacagcaatgattttggggaaggaggttgtagatgaatgaagcgcatagaatatacccttggaaacctacacacgccgtacagcagtgtgactataaaaaagactcgccatgatacacaaacgctgaaagaatttctgatggcagaactgagagagttaagagaaatggataaggatggcagctccgagagaagtcgcccagatcatggtgatgtgaagatgctcaagttcagaccaaaggtgcctcgacagaagcaaaagccaaagcaacaagaccctaagccaattgatgaagatgtgatgaagatattgaggactcgccaagtggctgcaaaaagtgcaccaaacacagaagatgagtgctcaccacagaagaccctctcgacgccaccttctgcagatgttgtttgcttgtcaccagcgcaactcggagtgcaaaaacaaaatcaattgccactccaaattcctagatccttccctgttcctgttaattcaggattggtttatgaagaagagagtagtgatgacgacgacgataatgatagtgacaatgttgggttgctggagactcagccagattcaattgaaagtgaagctttaacatgtccggctgaggagcttgatttgcttcaagaaggtagcaaagaaagaatgttcttcttccagttcccaaactctcttcctttacccaaaaggtcgtccagtgccggcaaggaggtgatggaaggatccaacctgcagcagctgcctcagggttatttgggcaaaatgctagtatacaagagcggcaagatcaaaatgaagttaggagacatcatctttgatgtgaacccaggagtagaaagtaggatgctgcagcgtgcagtagctctcaacactcgagacaaacactgttgcttgcttggagagattgagaatcgtcatgttattgtgactcccaatgttgattctttgttgaacgacaagtagggaccaactgtagcagctttgtcacagattgtgtgtagacctgtagatatgcagggttagtgacatctgtagaaattatatcagctctgtcaaatgatgtataggattttagttgtgtagtgttgtgaacgttttattgtgattgcagtgctatgttagttttagaactgcatgcagctccctgtggatgaatgtttgtaaggatcggtatttgaccttgattgtattggaaggcaaatataataaaaatcacgtcgttcttgtgggcaaggccttct

SEQ ID NO: 31206 - DNA, 1663 bp, Zea Mays
atagagttgttctacttctattctactggagtgcattaccacctgtctttttccttcctcttcaacgtctcgaacaagcaggaggaggtagaccgaacaactccaggtcgcgggagcggccatttctctggggcgggaccgcgggagagctctagctcttgcagcagtagaactctactgcagccagacactgcaaagggcgagaggtttgctttcgcgccctgggactttcaagaagcactcgttctagggtggtgcctcgcgtgcttttcgtgcgactcgtggtctgattccttagtagttccagtgctgcgggtcaacttttggacagcaatgattttggggaaggaggttgtagatgaatgaagcgcatagaatatacccttggaaacctacacacgccgtacagcagtgtgactataaaaaagactcgccatgatacacaaacgctgaaagaatttctgatggcagaactgagagttgtgctaggtggcatccaaaataccggctaaactttagtacgggatccaaacacccccccttaactgggctcttagctatttatgacagagttaagagaaatggataaggatggcagctccgagagaagtcgcccagatcatggtgatgtgaagatgctcaagttcagaccaaaggtgcctcgacagaagcaaaagccaaagcaacaagaccctaagccaattgatgaagatgtgatgaagatattgaggactcgccaagtggctgcaaaaagtgcaccaaacacagaagatgagtgctcaccacagaagaccctctcgacgccaccttctgcagatgttgtttgcttgtcaccagcgcaactcggagtgcaaaaacaaaatcaattgccactccaaattcctagatccttccctgttcctgttaattcaggattggtttatgaagaagagagtagtgatgacgacgacgataatgatagtgacaatgttgggttgctggagactcagccagattcaattgaaagtgaagctttaacatgtccggctgaggagcttgatttgcttcaagaaggtagcaaagaaagaatgttcttcttccagttcccaaactctcttcctttacccaaaaggtcgtccagtgccggcaaggaggtgatggaaggatccaacctgcagcagctgcctcagggttatttgggcaaaatgctagtatacaagagcggcaagatcaaaatgaagttaggagacatcatctttgatgtgaacccaggagtagaaagtaggatgctgcagcgtgcagtagctctcaacactcgagacaaacactgttgcttgcttggagagattgagaatcgtcatgttattgtgactcccaatgttgattctttgttgaacgacaagtagggaccaactgtagcagctttgtcacagattgtgtgtagacctgtagatatgcagggttagtgacatctgtagaaattatatcagctctgtcaaatgatgtataggattttagttgtgtagtgttgtgaacgttttattgtgattgcagtgctatgttagttttagaactgcatgcagctccctgtggatgaatgtttgtaaggatcggtatttgaccttgattgtattggaaggcaaatataataaaaatcacgtcgttcttgtgggcaaggccttct

SEQ ID NO: 31207 - DNA, 1361 bp, Zea Mays
atagagttgttctacttctattctactggagtgcattaccacctgtctttttccttcctcttcaacgtctcgaacaagcaggaggaggtagaccgaacaactccaggtcgcgggagcggccatttctctggggcgggaccgcgggagagctctagctcttgcagcagtagaactctactgcagccaggtggcatccaaaataccggctaaactttagtacgggatccaaacacccccccttaactgggctcttagctatttatgacagagttaagagaaatggataaggatggcagctccgagagaagtcgcccagatcatggtgatgtgaagatgctcaagttcagaccaaaggtgcctcgacagaagcaaaagccaaagcaacaagaccctaagccaattgatgaagatgtgatgaagatattgaggactcgccaagtggctgcaaaaagtgcaccaaacacagaagatgagtgctcaccacagaagaccctctcgacgccaccttctgcagatgttgtttgcttgtcaccagcgcaactcggagtgcaaaaacaaaatcaattgccactccaaattcctagatccttccctgttcctgttaattcaggattggtttatgaagaagagagtagtgatgacgacgacgataatgatagtgacaatgttgggttgctggagactcagccagattcaattgaaagtgaagctttaacatgtccggctgaggagcttgatttgcttcaagaaggtagcaaagaaagaatgttcttcttccagttcccaaactctcttcctttacccaaaaggtcgtccagtgccggcaaggaggtgatggaaggatccaacctgcagcagctgcctcagggttatttgggcaaaatgctagtatacaagagcggcaagatcaaaatgaagttaggagacatcatctttgatgtgaacccaggagtagaaagtaggatgctgcagcgtgcagtagctctcaacactcgagacaaacactgttgcttgcttggagagattgagaatcgtcatgttattgtgactcccaatgttgattctttgttgaacgacaagtagggaccaactgtagcagctttgtcacagattgtgtgtagacctgtagatatgcagggttagtgacatctgtagaaattatatcagctctgtcaaatgatgtataggattttagttgtgtagtgttgtgaacgttttattgtgattgcagtgctatgttagttttagaactgcatgcagctccctgtggatgaatgtttgtaaggatcggtatttgaccttgattgtattggaaggcaaatataataaaaatcacgtcgttcttgtgggcaaggccttct

SEQ ID NO: 31208 - DNA, 1370 bp, Zea Mays
atagagttgttctacttctattctactggagtgcattaccacctgtctttttccttcctcttcaacgtctcgaacaagcaggaggaggtagaccgaacaactccaggtcgcgggagcggccatttctctggggcgggaccgcgggagagctctagctcttgcagcagtagaactctactgcagccagttgtgctaggtggcatccaaaataccggctaaactttagtacgggatccaaacacccccccttaactgggctcttagctatttatgacagagttaagagaaatggataaggatggcagctccgagagaagtcgcccagatcatggtgatgtgaagatgctcaagttcagaccaaaggtgcctcgacagaagcaaaagccaaagcaacaagaccctaagccaattgatgaagatgtgatgaagatattgaggactcgccaagtggctgcaaaaagtgcaccaaacacagaagatgagtgctcaccacagaagaccctctcgacgccaccttctgcagatgttgtttgcttgtcaccagcgcaactcggagtgcaaaaacaaaatcaattgccactccaaattcctagatccttccctgttcctgttaattcaggattggtttatgaagaagagagtagtgatgacgacgacgataatgatagtgacaatgttgggttgctggagactcagccagattcaattgaaagtgaagctttaacatgtccggctgaggagcttgatttgcttcaagaaggtagcaaagaaagaatgttcttcttccagttcccaaactctcttcctttacccaaaaggtcgtccagtgccggcaaggaggtgatggaaggatccaacctgcagcagctgcctcagggttatttgggcaaaatgctagtatacaagagcggcaagatcaaaatgaagttaggagacatcatctttgatgtgaacccaggagtagaaagtaggatgctgcagcgtgcagtagctctcaacactcgagacaaacactgttgcttgcttggagagattgagaatcgtcatgttattgtgactcccaatgttgattctttgttgaacgacaagtagggaccaactgtagcagctttgtcacagattgtgtgtagacctgtagatatgcagggttagtgacatctgtagaaattatatcagctctgtcaaatgatgtataggattttagttgtgtagtgttgtgaacgttttattgtgattgcagtgctatgttagttttagaactgcatgcagctccctgtggatgaatgtttgtaaggatcggtatttgaccttgattgtattggaaggcaaatataataaaaatcacgtcgttcttgtgggcaaggccttct

SEQ ID NO: 31209 - DNA, 1936 bp, Zea Mays
ctttgataggtcccccatccgcaggttggcttcggcgacgcccttcgccctccaggactccaggccttcactccacgcaacctgttcgcaccggccacagccgccaccggccttcgccgcgagcccgcgacgacgcccagacttgttgccttactaccacggagacggaggcaccaccgcatcaggcagggaccggacgacgacgcccagacctatttcaacctgccggtctccccaggcccccagcccccagcagcaggaggacaccatgaagcttgacgtgaatgcccttcgctacctcgccaaggacgacttccgtgtcctcaccgccgtcgagatgggcatgcgcaacgcatggaggcacatacaaagtgctgaggaatcttttgaggaacaagctggtgcatcatggtgccactaaatacgatggatatcggctcacctatctgggatatgacttccttgccatcaagactttggttaatcgaggagtttttgcttcagttggccgccagattggtgttggaaaggagtcagatatatttgaggtagccacagacgatggtacagtacttgccatgaagcttcataggttgggcaggacatcttttagagctgtgaaatctaagcgtgactatctaaggcaccgaaggagctttaattggctgtatctctcacgactcgcagccttgaaggaatttgcctttatgaaggctttaggagatcatggtttccctgttccaactgctgtggattgcaaccggcattgtgtgatcatgtcacttgtgcagggatatcctcttgttcaagtgaaaaagttacaaaatccggatgatgtttttgactcaattcttggtcttatcgttcgtttggctgagcatggactcatacactgtgactttaatgagttcaatatcatgattgacgatgatgaaaaaattacagtgattgactttccgcagatggtgtctgtttctcaccgtaatgcccaaatgttttttgaccgagacattgaatgcatctacaagttctttaacaaaaggttcaatctgaggtcagtgaaaaatgaagaacaagctggatctgaaaatgatgatgaagggaacagcagaccttcctttttgtccgtggaaaagggtgctggttccttggacaaggaactagctgccagtggatttaccaggaaagagaaagtggatatggataagtacatcgaggaagttgttgaagggcatgattccagctcagatgatgataatgatgaggacagttccgatgagcctgattgtgatcttaccccaagtgattcagacgcgcctggaactttttctgaagagcatggaacaagttgtagcggcgagaacagattggaaattcctccctcggatggcaatggagtggttatggcaccgctcgaatctgggatcaagacgttttccatggaagatgatgataacgatgatggctcgtcagaggatgctgatgaagaagaagatgctgagctcacgaaacaattgaacaagcaaaggagaaaagcaatcgcagctgcccatgggcggagaagaccaacgtcatccaggaacgcctacaaggacaagggtaagggcaccatgaactccaagatgcagaggcaggcgtgcaactggtgatggttgagtgcctcttgcggcagtaaatagattaggcgcagggttttgtgtggttgtataaccgtgggaccctttactagaatcaactccggctttatatttttactaggtgagtaatcgtgcgtcgcaacgagaacacataatattacgagaacttatatataaaatgtcgcaacgaaaacatataatattatgagaacttatatacaaaatgtgtgttatactgttatgaaaaaagatttcataactcatttgtgattctggcaatacataaatttattatttta

SEQ ID NO: 31210 - DNA, 1957 bp, Zea Mays
cgcaggttggcttcggcgacgcccttcgccctccaggactccaggccttcactccacgcaacctgttcgcaccggccacagccgccaccggccttcgccgcgagcccgcgacgacgcccagacttgttgccttactaccacggagacggaggcaccaccgcatcaggcagggaccggacgacgacgcccagacctatttcaacctgccggtctccccaggcccccagcccccagcagcaggaggacaccatgaagcttgacgtgaatgcccttcgctacctcgccaaggacgacttccgtgtcctcaccgccgtcgagatgggcatgcgcaaccatgagattgttccagtagaacttattgacaggattgccagattgaagcatggaggcacatacaaagtgctgaggaatcttttgaggaacaagctggtgcatcatggtgccactaaatacgatggatatcggctcacctatctgggatatgacttccttgccatcaagactttggttaatcgaggagtttttgcttcagttggccgccagattggtgttggaaaggagtcagatatatttgaggtagccacagacgatggtacagtacttgccatgaagcttcataggttgggcaggacatcttttagagctgtgaaatctaagcgtgactatctaaggcaccgaaggagctttaattggctgtatctctcacgactcgcagccttgaaggaatttgcctttatgaaggagatcatggtttccctgttccaactgctgtggattgcaaccggcattgtgtgatcatgtcacttgtgcagggatatcctcttgttcaagtgaaaaagttacaaaatccggatgatgtttttgactcaattcttggtcttatcgttcgtttggctgagcatggactcatacactgtgactttaatgagttcaatatcatgattgacgatgatgaaaaaattacagtgattgactttccgcagatggtgtctgtttctcaccgtaatgcccaaatgttttttgaccgagacattgaatgcatctacaagttctttaacaaaaggttcaatctgaggtcagtgaaaaatgaagaacaagctggatctgaaaatgatgatgaagggaacagcagaccttcctttttgtccgtggaaaagggtgctggttccttggacaaggaactagctgccagtggatttaccaggaaagagaaagtggatatggataagtacatcgaggaagttgttgaagggcatgattccagctcagatgatgataatgatgaggacagttccgatgagcctgattgtgatcttaccccaagtgattcagacgcgcctggaactttttctgaagagcatggaacaagttgtagcggcgagaacagattggaaattcctccctcggatggcaatggagtggttatggcaccgctcgaatctgggatcaagacgttttccatggaagatgatgataacgatgatggctcgtcagaggatgctgatgaagaagaagatgctgagctcacgaaacaattgaacaagcaaaggagaaaagcaatcgcagctgcccatgggcggagaagaccaacgtcatccaggaacgcctacaaggacaagggtaagggcaccatgaactccaagatgcagaggcaggcgtgcaactggtgatggttgagtgcctcttgcggcagtaaatagattaggcgcagggttttgtgtggttgtataaccgtgggaccctttactagaatcaactccggctttatatttttactaggtgagtaatcgtgcgtcgcaacgagaacacataatattacgagaacttatatataaaatgtcgcaacgaaaacatataatattatgagaacttatatacaaaatgtgtgttatactgttatgaaaaaagatttcataactcatttgtgattctggcaatacataaatttattatttta

SEQ ID NO: 31211 - DNA, 2026 bp, Zea Mays
gcaggttggcttcggcgacgcccttcgccctccaggactccaggccttcactccacgcaacctgttcgcaccggccacagccgccaccggccttcgccgcgagcccgcgacgacgcccagacttgttgccttactaccacggagacggaggcaccaccgcatcaggcagggaccggacgacgacgcccagacctatttcaacctgccggtctccccaggcccccagcccccagtggtcacacggtcacaccgtgaggtgttggactgttgaactgaggtggtcagcctgtgcaagtcagcaggaggacaccatgaagcttgacgtgaatgcccttcgctacctcgccaaggacgacttccgtgtcctcaccgccgtcgagatgggcatgcgcaaccatgagattgttccagtagaacttattgacaggattgccagattgaagcatggaggcacatacaaagtgctgaggaatcttttgaggaacaagctggtgcatcatggtgccactaaatacgatggatatcggctcacctatctgggatatgacttccttgccatcaagactttggttaatcgaggagtttttgcttcagttggccgccagattggtgttggaaaggagtcagatatatttgaggtagccacagacgatggtacagtacttgccatgaagcttcataggttgggcaggacatcttttagagctgtgaaatctaagcgtgactatctaaggcaccgaaggagctttaattggctgtatctctcacgactcgcagccttgaaggaatttgcctttatgaaggctttaggagatcatggtttccctgttccaactgctgtggattgcaaccggcattgtgtgatcatgtcacttgtgcagggatatcctcttgttcaagtgaaaaagttacaaaatccggatgatgtttttgactcaattcttggtcttatcgttcgtttggctgagcatggactcatacactgtgactttaatgagttcaatatcatgattgacgatgatgaaaaaattacagtgattgactttccgcagatggtgtctgtttctcaccgtaatgcccaaatgttttttgaccgagacattgaatgcatctacaagttctttaacaaaaggttcaatctgaggtcagtgaaaaatgaagaacaagctggatctgaaaatgatgatgaagggaacagcagaccttcctttttgtccgtggaaaagggtgctggttccttggacaaggaactagctgccagtggatttaccaggaaagagaaagtggatatggataagtacatcgaggaagttgttgaagggcatgattccagctcagatgatgataatgatgaggacagttccgatgagcctgattgtgatcttaccccaagtgattcagacgcgcctggaactttttctgaagagcatggaacaagttgtagcggcgagaacagattggaaattcctccctcggatggcaatggagtggttatggcaccgctcgaatctgggatcaagacgttttccatggaagatgatgataacgatgatggctcgtcagaggatgctgatgaagaagaagatgctgagctcacgaaacaattgaacaagcaaaggagaaaagcaatcgcagctgcccatgggcggagaagaccaacgtcatccaggaacgcctacaaggacaagggtaagggcaccatgaactccaagatgcagaggcaggcgtgcaactggtgatggttgagtgcctcttgcggcagtaaatagattaggcgcagggttttgtgtggttgtataaccgtgggaccctttactagaatcaactccggctttatatttttactaggtgagtaatcgtgcgtcgcaacgagaacacataatattacgagaacttatatataaaatgtcgcaacgaaaacatataatattatgagaacttatatacaaaatgtgtgttatactgttatgaaaaaagatttcataactcatttgtgattctggcaatacataaatttattatttta

SEQ ID NO: 31212 - DNA, 1905 bp, Zea Mays
gttggcttcggcgacgcccttcgccctccaggactccaggccttcactccacgcaacctgttcgcaccggccacagccgccaccggccttcgccgcgagcccgcgacgacgcccagacttgttgccttactaccacggagacggaggcaccaccgcatcaggcagggaccggacgacgacgcccagacctatttcaacctgccggtctccccaggcccccagcccccagcagcaggaggacaccatgaagcttgacgtgaatgcccttcgctacctcgccaaggacgacttccgtgtcctcaccgccgtcgagatgggcatgcgcaacgcatggaggcacatacaaagtgctgaggaatcttttgaggaacaagctggtgcatcatggtgccactaaatacgatggatatcggctcacctatctgggatatgacttccttgccatcaagactttggttaatcgaggagtttttgcttcagttggccgccagattggtgttggaaaggagtcagatatatttgaggtagccacagacgatggtacagtacttgccatgaagcttcataggttgggcaggacatcttttagagctgtgaaatctaagcgtgactatctaaggcaccgaaggagctttaattggctgtatctctcacgactcgcagccttgaaggaatttgcctttatgaaggagatcatggtttccctgttccaactgctgtggattgcaaccggcattgtgtgatcatgtcacttgtgcagggatatcctcttgttcaagtgaaaaagttacaaaatccggatgatgtttttgactcaattcttggtcttatcgttcgtttggctgagcatggactcatacactgtgactttaatgagttcaatatcatgattgacgatgatgaaaaaattacagtgattgactttccgcagatggtgtctgtttctcaccgtaatgcccaaatgttttttgaccgagacattgaatgcatctacaagttctttaacaaaaggttcaatctgaggtcagtgaaaaatgaagaacaagctggatctgaaaatgatgatgaagggaacagcagaccttcctttttgtccgtggaaaagggtgctggttccttggacaaggaactagctgccagtggatttaccaggaaagagaaagtggatatggataagtacatcgaggaagttgttgaagggcatgattccagctcagatgatgataatgatgaggacagttccgatgagcctgattgtgatcttaccccaagtgattcagacgcgcctggaactttttctgaagagcatggaacaagttgtagcggcgagaacagattggaaattcctccctcggatggcaatggagtggttatggcaccgctcgaatctgggatcaagacgttttccatggaagatgatgataacgatgatggctcgtcagaggatgctgatgaagaagaagatgctgagctcacgaaacaattgaacaagcaaaggagaaaagcaatcgcagctgcccatgggcggagaagaccaacgtcatccaggaacgcctacaaggacaagggtaagggcaccatgaactccaagatgcagaggcaggcgtgcaactggtgatggttgagtgcctcttgcggcagtaaatagattaggcgcagggttttgtgtggttgtataaccgtgggaccctttactagaatcaactccggctttatatttttactaggtgagtaatcgtgcgtcgcaacgagaacacataatattacgagaacttatatataaaatgtcgcaacgaaaacatataatattatgagaacttatatacaaaatgtgtgttatactgttatgaaaaaagatttcataactcatttgtgattctggcaatacataaatttattatttta

SEQ ID NO: 31213 - DNA, 1837 bp, Zea Mays
tcggcgacgcccttcgccctccaggactccaggccttcactccacgcaacctgttcgcaccggccacagccgccaccggccttcgccgcgagcccgcgacgacgcccagacttgttgccttactaccacggagacggaggcaccaccgcatcaggcagggaccggacgacgacgcccagacctatttcaacctgccggtctccccaggcccccagcccccagcagcagcaggaggacaccatgaagcttgacgtgaatgcccttcgctacctcgccaaggacgacttccgtgtcctcaccgccgtcgagatgggcatgcgcaaccatgagattgttccagtagaacttattgacaggattgccagattgaagcatggaggcacatacaaagtgctgaggaatcttttgaggaacaagctggtgcatcatggtgccactaaatacgatggatatcggctcacctatctgggatatgacttccttgccatcaagactttggttaatcgaggagtttttgcttcagttggccgccagattggtgttggaaaggagtcagatatatttgaggtagccacagacgatggtacagtacttgccatgaagcttcataggttgggcaggacatcttttagagctgtgaaatctaagcgtgactatctaaggcaccgaaggagctttaattggctgtatctctcacgactcgcagccttgaaggaatttgcctttatgaaggctttaggagatcatggtttccctgttccaactgctgtggattgcaaccggcattgtgtgatcatgtcacttgtgcagggatatcctctattgacgatgatgaaaaaattacagtgattgactttccgcagatggtgtctgtttctcaccgtaatgcccaaatgttttttgaccgagacattgaatgcatctacaagttctttaacaaaaggttcaatctgaggtcagtgaaaaatgaagaacaagctggatctgaaaatgatgatgaagggaacagcagaccttcctttttgtccgtggaaaagggtgctggttccttggacaaggaactagctgccagtggatttaccaggaaagagaaagtggatatggataagtacatcgaggaagttgttgaagggcatgattccagctcagatgatgataatgatgaggacagttccgatgagcctgattgtgatcttaccccaagtgattcagacgcgcctggaactttttctgaagagcatggaacaagttgtagcggcgagaacagattggaaattcctccctcggatggcaatggagtggttatggcaccgctcgaatctgggatcaagacgttttccatggaagatgatgataacgatgatggctcgtcagaggatgctgatgaagaagaagatgctgagctcacgaaacaattgaacaagcaaaggagaaaagcaatcgcagctgcccatgggcggagaagaccaacgtcatccaggaacgcctacaaggacaagggtaagggcaccatgaactccaagatgcagaggcaggcgtgcaactggtgatggttgagtgcctcttgcggcagtaaatagattaggcgcagggttttgtgtggttgtataaccgtgggaccctttactagaatcaactccggctttatatttttactaggtgagtaatcgtgcgtcgcaacgagaacacataatattacgagaacttatatataaaatgtcgcaacgaaaacatataatattatgagaacttatatacaaaatgtgtgttatactgttatgaaaaaagatttcataactcatttgtgattctggcaatacataaatttattatttta

SEQ ID NO: 31214 - DNA, 1968 bp, Zea Mays
tcggcgacgcccttcgccctccaggactccaggccttcactccacgcaacctgttcgcaccggccacagccgccaccggccttcgccgcgagcccgcgacgacgcccagacttgttgccttactaccacggagacggaggcaccaccgcatcaggcagggaccggacgacgacgcccagacctatttcaacctgccggtctccccaggcccccagcccccaggaggacaccatgaagcttgacgtgaatgcccttcgctacctcgccaaggacgacttccgtgtcctcaccgccgtcgagatgggcatgcgcaacgcatggaggcacatacaaagtgctgaggaatcttttgaggaacaagctggtgcatcatggtgccactaaatacgatggatatcggctcacctatctgggatatgacttccttgccatcaagactttggttaatcgaggagtttttgcttcagttggccgccagattggtgttggaaaggagtcagatatatttgaggtagccacagacgatggtacagtacttgccatgaagcttcataggttgggcaggacatcttttagagctgtgaaatctaagcgtgactatctaaggcaccgaaggagctttaattggctgtatctctcacgactcgcagccttgaaggaatttgcctttatgaaggctttaggagatcatggtttccctgttccaactgctgtggattgcaaccggcattgtgtgatcatgtcacttgtgcagggatatcctcttgttcaagtgaaaaagttacaaaatccggatgatgtttttgactcaattcttggtcttatcgttcgtttggctgagcatggactcatacactgtgactttaatgagttcaatatcatgattgacgatgatgaaaaaattacagtgattgactttccgcagatggtgtctgtttctcaccgtaatgcccaaatgtatgaagcttctcagccaactaatgtgaaagtgtcttgcatttaaaaaaatgaatttcacttttgcaggttttttgaccgagacattgaatgcatctacaagttctttaacaaaaggttcaatctgaggtcagtgaaaaatgaagaacaagctggatctgaaaatgatgatgaagggaacagcagaccttcctttttgtccgtggaaaagggtgctggttccttggacaaggaactagctgccagtggatttaccaggaaagagaaagtggatatggataagtacatcgaggaagttgttgaagggcatgattccagctcagatgatgataatgatgaggacagttccgatgagcctgattgtgatcttaccccaagtgattcagacgcgcctggaactttttctgaagagcatggaacaagttgtagcggcgagaacagattggaaattcctccctcggatggcaatggagtggttatggcaccgctcgaatctgggatcaagacgttttccatggaagatgatgataacgatgatggctcgtcagaggatgctgatgaagaagaagatgctgagctcacgaaacaattgaacaagcaaaggagaaaagcaatcgcagctgcccatgggcggagaagaccaacgtcatccaggaacgcctacaaggacaagggtaagggcaccatgaactccaagatgcagaggcaggcgtgcaactggtgatggttgagtgcctcttgcggcagtaaatagattaggcgcagggttttgtgtggttgtataaccgtgggaccctttactagaatcaactccggctttatatttttactaggtgagtaatcgtgcgtcgcaacgagaacacataatattacgagaacttatatataaaatgtcgcaacgaaaacatataatattatgagaacttatatacaaaatgtgtgttatactgttatgaaaaaagatttcataactcatttgtgattctggcaatacataaatttattatttta

SEQ ID NO: 31215 - DNA, 2343 bp, Zea Mays
tcggcgacgcccttcgccctccaggactccaggccttcactccacgcaacctgttcgcaccggccacagccgccaccggccttcgccgcgagcccgcgacgacgcccagacttgttgccttactaccacggagacggaggcaccaccgcatcaggcagggaccggacgacgacgcccagacctatttcaacctgccggtctccccaggcccccagcccccagcagcagcaggaggacaccatgaagcttgacgtgaatgcccttcgctacctcgccaaggacgacttccgtgtcctcaccgccgtcgagatgggcatgcgcaaccatgagattgttccagtagaacttattgacaggattgccagattgaagtaagattttgttttgttcgcagtcctgcaatatgcctgtggttgctagttttagatgttaactggtattatgttttgcaccttctgtagtatgcaatttatttagttctggtttgctattccattgtggtgcacaaagtagcatgcaatctccatatttccgcttatcctttcaataggaaaaaacgaacatatgttttgtataaacttcaatatgccgaaaacatagtctgagaacaaggaggcttcggtgcagctaatgctacacttagtgatgcttattgttagtctaataaccacttaaacaatggtgagatgaaactattgtttgctgagtcgaaagaatgtgtactccatcccagtggaatatgttcttacgctttatgaatttaggcatggaggcacatacaaagtgctgaggaatcttttgaggaacaagctggtgcatcatggtgccactaaatacgatggatatcggctcacctatctgggatatgacttccttgccatcaagactttggttaatcgaggagtttttgcttcagttggccgccagattggtgttggaaaggagtcagatatatttgaggtagccacagacgatggtacagtacttgccatgaagcttcataggttgggcaggacatcttttagagctgtgaaatctaagcgtgactatctaaggcaccgaaggagctttaattggctgtatctctcacgactcgcagccttgaaggaatttgcctttatgaaggctttaggagatcatggtttccctgttccaactgctgtggattgcaaccggcattgtgtgatcatgtcacttgtgcagggatatcctcttgttcaagtgaaaaagttacaaaatccggatgatgtttttgactcaattcttggtcttatcgttcgtttggctgagcatggactcatacactgtgactttaatgagttcaatatcatgattgacgatgatgaaaaaattacagtgattgactttccgcagatggtgtctgtttctcaccgtaatgcccaaatgttttttgaccgagacattgaatgcatctacaagttctttaacaaaaggttcaatctgaggtcagtgaaaaatgaagaacaagctggatctgaaaatgatgatgaagggaacagcagaccttcctttttgtccgtggaaaagggtgctggttccttggacaaggaactagctgccagtggatttaccaggaaagagaaagtggatatggataagtacatcgaggaagttgttgaagggcatgattccagctcagatgatgataatgatgagttccgatgagcctgattgtgatcttaccccaagtgattcagacgcgcctggaactttttctgaagagcatggaacaagttgtagcggcgagaacagattggaaattcctccctcggatggcaatggagtggttatggcaccgctcgaatctgggatcaagacgttttccatggaagatgatgataacgatgatggctcgtcagaggatgctgatgaagaagaagatgctgagctcacgaaacaattgaacaagcaaaggagaaaagcaatcgcagctgcccatgggcggagaagaccaacgtcatccaggaacgcctacaaggacaagggtaagggcaccatgaactccaagatgcagaggcaggcgtgcaactggtgatggttgagtgcctcttgcggcagtaaatagattaggcgcagggttttgtgtggttgtataaccgtgggaccctttactagaatcaactccggctttatatttttactaggtgagtaatcgtgcgtcgcaacgagaacacataatattacgagaacttatatataaaatgtcgcaacgaaaacatataatattatgagaacttatatacaaaatgtgtgttatactgttatgaaaaaagatttcataactcatttgtgattctggcaatacataaatttattatttta

SEQ ID NO: 31216 - DNA, 1946 bp, Zea Mays
tcggcgacgcccttcgccctccaggactccaggccttcactccacgcaacctgttcgcaccggccacagccgccaccggccttcgccgcgagcccgcgacgacgcccagacttgttgccttactaccacggagacggaggcaccaccgcatcaggcagggaccggacgacgacgcccagacctatttcaacctgccggtctccccaggcccccagcccccaggaggacaccatgaagcttgacgtgaatgcccttcgctacctcgccaaggacgacttccgtgtcctcaccgccgtcgagatgggcatgcgcaaccatgagattgttccagtagaacttattgacaggattgccagattgaagcatggaggcacatacaaagtgctgaggaatcttttgaggaacaagctggtgcatcatggtgccactaaatacgatggatatcggctcacctatctgggatatgacttccttgccatcaagactttggttaatcgaggagtttttgcttcagttggccgccagattggtgttggaaaggagtcagatatatttgaggtagccacagacgatggtacagtacttgccatgaagcttcataggttgggcaggacatcttttagagctgtgaaatctaagcgtgactatctaaggcaccgaaggagctttaattggctgtatctctcacgactcgcagccttgaaggaatttgcctttatgaaggctttaggagatcatggtttccctgttccaactgctgtggattgcaaccggcattgtgtgatcatgtcacttgtgcagggatatcctcttgttcaagtgaaaaagttacaaaatccggatgatgtttttgactcaattcttggtcttatcgttcgtttggctgagcatggactcatacactgtgactttaatgagttcaatatcatgattgacgatgatgaaaaaattacagtgattgactttccgcagatggtgtctgtttctcaccgtaatgcccaaatgttttttgaccgagacattgaatgcatctacaagttctttaacaaaaggttcaatctgaggtcagtgaaaaatgaagaacaagctggatctgaaaatgatgatgaagggaacagcagaccttcctttttgtccgtggaaaagggtgctggttccttggacaaggaactagctgccagtggatttaccaggaaagagaaagtggatatggataagtacatcgaggaagttgttgaagggcatgattccagctcagatgatgataatgatgaggacagttccgatgagcctgattgtgatcttaccccaagtgattcagacgcgcctggaactttttctgaagagcatggaacaagttgtagcggcgagaacagattggaaattcctccctcggatggcaatggagtggttatggcaccgctcgaatctgggatcaagacgttttccatggaagatgatgataacgatgatggctcgtcagaggatgctgatgaagaagaagatgctgagctcacgaaacaattgaacaagcaaaggagaaaagcaatcgcagctgcccatgggcggagaagaccaacgtcatccaggaacgcctacaaggacaagggtaagggcaccatgaactccaagatgcagaggcaggcgtgcaactggtgatggttgagtgcctcttgcggcagtaaatagattaggcgcagggttttgtgtggttgtataaccgtgggaccctttactagaatcaactccggctttatatttttactaggtgagtaatcgtgcgtcgcaacgagaacacataatattacgagaacttatatataaaatgtcgcaacgaaaacatataatattatgagaacttatatacaaaatgtgtgttatactgttatgaaaaaagatttcataactcatttgtgattctggcaatacataaatttattatttta

SEQ ID NO: 31217 - DNA, 1787 bp, Zea Mays
tcggcgacgcccttcgccctccaggactccaggccttcactccacgcaacctgttcgcaccggccacagccgccaccggccttcgccgcgagcccgcgacgacgcccagacttgttgccttactaccacggagacggaggcaccaccgcatcaggcagggaccggacgacgacgcccagacctatttcaacctgccggtctccccaggcccccagcccccagcagcaggaggacaccatgaagcttgacgtgaatgcccttcgctacctcgccaaggacgacttccgtgtcctcaccgccgtcgagatgggcatgcgcaacgcatggaggcacatacaaagtgctgaggaatcttttgaggaacaagctggtgcatcatggtgccactaaatacgatggatatcggctcacctatctgggatatgacttccttgccatcaagactttggttaatcgaggagtttttgcttcagttggccgccagattggtgttggaaaggagtcagatatatttgaggtagccacagacgatggtacagtacttgccatgaagcttcataggttgggcaggacatcttttagagctgtgaaatctaagcgtgactatctaaggcaccgaaggagctttaattggctgtatctctcacgactcgcagccttgaaggaatttgcctttatgaaggctttaggagatcatggtttccctgttccaactgctgtggattgcaaccggcattgtgtgatcatgtcacttgtgcagggatatcctctattgacgatgatgaaaaaattacagtgattgactttccgcagatggtgtctgtttctcaccgtaatgcccaaatgttttttgaccgagacattgaatgcatctacaagttctttaacaaaaggttcaatctgaggtcagtgaaaaatgaagaacaagctggatctgaaaatgatgatgaagggaacagcagaccttcctttttgtccgtggaaaagggtgctggttccttggacaaggaactagctgccagtggatttaccaggaaagagaaagtggatatggataagtacatcgaggaagttgttgaagggcatgattccagctcagatgatgataatgatgaggacagttccgatgagcctgattgtgatcttaccccaagtgattcagacgcgcctggaactttttctgaagagcatggaacaagttgtagcggcgagaacagattggaaattcctccctcggatggcaatggagtggttatggcaccgctcgaatctgggatcaagacgttttccatggaagatgatgataacgatgatggctcgtcagaggatgctgatgaagaagaagatgctgagctcacgaaacaattgaacaagcaaaggagaaaagcaatcgcagctgcccatgggcggagaagaccaacgtcatccaggaacgcctacaaggacaagggtaagggcaccatgaactccaagatgcagaggcaggcgtgcaactggtgatggttgagtgcctcttgcggcagtaaatagattaggcgcagggttttgtgtggttgtataaccgtgggaccctttactagaatcaactccggctttatatttttactaggtgagtaatcgtgcgtcgcaacgagaacacataatattacgagaacttatatataaaatgtcgcaacgaaaacatataatattatgagaacttatatacaaaatgtgtgttatactgttatgaaaaaagatttcataactcatttgtgattctggcaatacataaatttattatttta

SEQ ID NO: 31218 - DNA, 1950 bp, Zea Mays
tcggcgacgcccttcgccctccaggactccaggccttcactccacgcaacctgttcgcaccggccacagccgccaccggccttcgccgcgagcccgcgacgacgcccagacttgttgccttactaccacggagacggaggcaccaccgcatcaggcagggaccggacgacgacgcccagacctatttcaacctgccggtctccccaggcccccagcccccagcagcagcaggaggacaccatgaagcttgacgtgaatgcccttcgctacctcgccaaggacgacttccgtgtcctcaccgccgtcgagatgggcatgcgcaaccatgagattgttccagtagaacttattgacaggattgccagattgaagcatggaggcacatacaaagtgctgaggaatcttttgaggaacaagctggtgcatcatggtgccactaaatacgatggatatcggctcacctatctgggatatgacttccttgccatcaagactttggttaatcgaggagtttttgcttcagttggccgccagattggtgttggaaaggagtcagatatatttgaggtagccacagacgatggtacagtacttgccatgaagcttcataggttgggcaggacatcttttagagctgtgaaatctaagcgtgactatctaaggcaccgaaggagctttaattggctgtatctctcacgactcgcagccttgaaggaatttgcctttatgaaggctttaggagatcatggtttccctgttccaactgctgtggattgcaaccggcattgtgtgatcatgtcacttgtgcagggatatcctcttgttcaagtgaaaaagttacaaaatccggatgatgtttttgactcaattcttggtcttatcgttcgtttggctgagcatggactcatacactgtgactttaatgagttcaatatcatgattgacgatgatgaaaaaattacagtgattgactttccgcagatggtgtctgtttctcaccgtaatgcccaaatgttttttgaccgagacattgaatgcatctacaagttctttaacaaaaggttcaatctgaggtcagtgaaaaatgaagaacaagctggatctgaaaatgatgatgaagggaacagcagaccttcctttttgtccgtggaaaagggtgctggttccttggacaaggaactagctgccagtggatttaccaggaaagagaaagtggatatggataagtacatcgaggaagttgttgaagggcatgattccagctcagatgatgataatgatgagttccgatgagcctgattgtgatcttaccccaagtgattcagacgcgcctggaactttttctgaagagcatggaacaagttgtagcggcgagaacagattggaaattcctccctcggatggcaatggagtggttatggcaccgctcgaatctgggatcaagacgttttccatggaagatgatgataacgatgatggctcgtcagaggatgctgatgaagaagaagatgctgagctcacgaaacaattgaacaagcaaaggagaaaagcaatcgcagctgcccatgggcggagaagaccaacgtcatccaggaacgcctacaaggacaagggtaagggcaccatgaactccaagatgcagaggcaggcgtgcaactggtgatggttgagtgcctcttgcggcagtaaatagattaggcgcagggttttgtgtggttgtataaccgtgggaccctttactagaatcaactccggctttatatttttactaggtgagtaatcgtgcgtcgcaacgagaacacataatattacgagaacttatatataaaatgtcgcaacgaaaacatataatattatgagaacttatatacaaaatgtgtgttatactgttatgaaaaaagatttcataactcatttgtgattctggcaatacataaatttattatttta

SEQ ID NO: 31219 - DNA, 1332 bp, Zea Mays
cccacgaaatttcccaatatctgtcccgcgggccgtagccccgccacgcccccacatagaaaacaggcctcctcgcctccgtccgtccagctctggtccgagcccatggaaatcgttgccatatcagatcagctccgccatggacccccatctatctgcgaccctcggtgacgcgctccgcccaccgccgcccgggaatggctcgagcgctgctcctgctgcgagtagctgtagcccgctaccctcctctcccggcctcacccgcgctcctccagccgctgctgcgccgccacgcgccctcccagtacaggtcccagctccgcttcctctcctccctctcctcctcgtccgtgtccaccagctcagatgctcccagcgacggcgggggcggccgcgacggggaagaggatggcgcgaagagcggcggccgcgtcgactacttggggatgagcgacgaggagctcatggagcagtgcgatatgggcacgttcaaggcgtccggccccggcggccagcaccgcaacaagcgcgagtccgccgtccggctgaaacaccttcccaccggcatcatcgcccaggctgtggaggatcggtcacaacataagaaccgagcgtctgctttatctcggcttcgaaccctgattgctcttaaagggaatgcaagctttattagacctgctgtttgctgttgaaggttctgtatcagatgcagcaaagattttaggcctaagcactggtgctttgtcaagattgattctgtcagatgattctctccgaacggccgcgaatgaactgcgagcttcgaagggactgaagcctttgagatgaaatcctttgtaaaatcctcagcttcaagtgcaccatatcccataggtgccatgttcgacagatgtcaggaggcattatttctagggaaaacctttgaggtttcatgcggtttgtttaagggatgttcgtcgtcattagattgccgtaaatatgttcagtaggcagctagtatatcttcagaatatcctcgtttcgtattacatatacccccaatgttctccagcagggcaacaccattacaccacttaaccaatatttttccttgaggacctgttaacctcaaacttttatttgccagccaaaagttgttgaagcggctgtgctgaattgctgatttaattggctgtaactacctcatgggtacacaattctaatcttgtttcctttcagcgtttgatgatgcttttatatcaaattggtgctcttaaatttaaatgcaccatggatctgtttttagcttccattgtcattgcatgaaaactgaaattataatcatagttcgag

SEQ ID NO: 31220 - DNA, 1413 bp, Zea Mays
cgcccccacatagaaaacaggcctcctcgcctccgtccgtccagctctggtccgagcccatggaaatcgttgccatatcagatcagctccgccatggacccccatctatctgcgaccctcggtgacgcgctccgcccaccgccgcccgggaatggctcgagcgctgctcctgctgcgagtagctgtagcccgctaccctcctctcccggcctcacccgcgctcctccagccgctgctgcgccgccacgcgccctcccagtacaggtcccagctccgcttcctctcctccctctcctcctcgtccgtgtccaccagctcagatgctcccagcgacggcgggggcggccgcgacggggaagaggatggcgcgaagagcggcggccgcgtcgactacttggggatgagcgacgaggagctcatggagcagtgcgatatgggcacgttcaaggcgtccggccccggcggccagcaccgcaacaagcgcgagtccgccgtccggctgaaacaccttcccaccggcatcatcgcccaggctgtggaggatcggtcacaacataagaaccgagcgtctgctttatctcggcttcgaaccctgattgctcttaaaggaggccgataaacctggaagactacactccacctgttgagcttcttcagatattacccctgaagtccagcgttagaggaaaagatgttgggccccaaatcggtccaaataactcaaaattttctccaggaatgcaagctttattagacctgctgtttgctgttgaaggttctgtatcagatgcagcaaagattttaggcctaagcactggtgctttgtcaagattgattctgtcagatgattctctccgaacggccgcgaatgaactgcgagcttcgaagggactgaagcctttgagatgaaatcctttgtaaaatcctcagcttcaagtgcaccatatcccataggtgccatgttcgacagatgtcaggaggcattatttctagggaaaacctttgaggtttcatgcggtttgtttaagggatgttcgtcgtcattagattgccgtaaatatgttcagtaggcagctagtatatcttcagaatatcctcgtttcgtattacatatacccccaatgttctccagcagggcaacaccattacaccacttaaccaatatttttccttgaggacctgttaacctcaaacttttatttgccagccaaaagttgttgaagcggctgtgctgaattgctgatttaattggctgtaactacctcatgggtacacaattctaatcttgtttcctttcagcgtttgatgatgcttttatatcaaattggtgctcttaaatttaaatgcaccatggatctgtttttagcttccattgtcattgcatgaaaactgaaattataatcatagttcgag

SEQ ID NO: 31221 - DNA, 1127 bp, Zea Mays
cacatagaaaacaggcctcctcgcctccgtccgtccagctctggtccgagcccatggaaatcgttgccatatcagatcagctccgccatggacccccatctatctgcgaccctcggtgacgcgctccgcccaccgccgcccgggaatggctcgagcgctgctcctgctgcgagtagctgtagcccgctaccctcctctcccggcctcacccgcgctcctccagccgctgctgcgccgccacgcgccctcccagtacaggtcccagctccgcttcctctcctccctctcctcctcgtccgtgtccaccagctcagatgctcccagcgacggcgggggcggccgcgacggggaagaggatggcgcgaagagcggcggccgcgtcgactacttggggatgagcgacgaggagctcatggagcagtgcgatatgggcacgttcaaggcgtccggccccggcggccagcaccgcaacaagcgcgagtccgccgtccggctgaaacaccttcccaccggcatcatcgcccaggctgtggaggatcggtcacaacataagaaccgagcgtctgctttatctcggcttcgaaccctgattgctcttaaagggactgaagcctttgagatgaaatcctttgtaaaatcctcagcttcaagtgcaccatatcccataggtgccatgttcgacagatgtcaggaggcattatttctagggaaaacctttgaggtttcatgcggtttgtttaagggatgttcgtcgtcattagattgccgtaaatatgttcagtaggcagctagtatatcttcagaatatcctcgtttcgtattacatatacccccaatgttctccagcagggcaacaccattacaccacttaaccaatatttttccttgaggacctgttaacctcaaacttttatttgccagccaaaagttgttgaagcggctgtgctgaattgctgatttaattggctgtaactacctcatgggtacacaattctaatcttgtttcctttcagcgtttgatgatgcttttatatcaaattggtgctcttaaatttaaatgcaccatggatctgtttttagcttccattgtcattgcatgaaaactgaaattataatcatagttcgag

SEQ ID NO: 31222 - DNA, 1326 bp, Zea Mays
ctcgcctccgtccgtccagctctggtccgagcccatggaaatcgttgccatatcagatcagctccgccatggacccccatctatctgcgaccctcggtgacgcgctccgcccaccgccgcccgggaatggctcgagcgctgctcctgctgcgagtagctgtagcccgctaccctcctctcccggcctcacccgcgctcctccagccgctgctgcgccgccacgcgccctcccagtacagcgacggcgggggcggccgcgacggggaagaggatggcgcgaagagcggcggccgcgtcgactacttggggatgagcgacgaggagctcatggagcagtgcgatatgggcacgttcaaggcgtccggccccggcggccagcaccgcaacaagcgcgagtccgccgtccggctgaaacaccttcccaccggcatcatcgcccaggctgtggaggatcggtcacaacataagaaccgagcgtctgctttatctcggcttcgaaccctgattgctcttaaagttaggaggccgataaacctggaagactacactccacctgttgagcttcttcagatattacccctgaagtccagcgttagaggaaaagatgttgggccccaaatcggtccaaataactcaaaattttctccaggaatgcaagctttattagacctgctgtttgctgttgaaggttctgtatcagatgcagcaaagattttaggcctaagcactggtgctttgtcaagattgattctgtcagatgattctctccgaacggccgcgaatgaactgcgagcttcgaagggactgaagcctttgagatgaaatcctttgtaaaatcctcagcttcaagtgcaccatatcccataggtgccatgttcgacagatgtcaggaggcattatttctagggaaaacctttgaggtttcatgcggtttgtttaagggatgttcgtcgtcattagattgccgtaaatatgttcagtaggcagctagtatatcttcagaatatcctcgtttcgtattacatatacccccaatgttctccagcagggcaacaccattacaccacttaaccaatatttttccttgaggacctgttaacctcaaacttttatttgccagccaaaagttgttgaagcggctgtgctgaattgctgatttaattggctgtaactacctcatgggtacacaattctaatcttgtttcctttcagcgtttgatgatgcttttatatcaaattggtgctcttaaatttaaatgcaccatggatctgtttttagcttccattgtcattgcatgaaaactgaaattataatcatagttcgag

SEQ ID NO: 31223 - DNA, 1221 bp, Zea Mays
ccaccccatcccatccccatcaacaacgcaaaaacctaaaccgctctggtccatccacatccacagtcgccatcgcccccacctctcgtcgtcgtctccgtgcaccactaggcccccactgccggccgcgcctcctagccacctcgtgccgctcggccaccatgcccgtcctccactgcccctatggctgccatgggcgagcgctgcccgagcagccgaccgccctttccctaccgttttcagctgccgcgcgctgcctctcctccccgccaggcctccactgcccacttctccggcggctacagcggaaggcaaggagaaggacagcgggcagcggtagctagatctagcaagcacagggcgtcttctccatccgccacctctcggcgcatcatcagctgaggctgagctctctcattcaccgctggctcttgctcttgtgttcataagtaacttcgcattgccttgcccccttgtcctgctccctcctcccctccggatctccccgcctgctccatttaattactgactcgtacccttccccgcattcgccttcttgtttcttccatcccacccgtatcagccaccggttcccaatgcccaggaacatgttggagatggagtagagttgctggatgatgatatgtttgtgttgctattgttcaaaaattcaccaaactctacttcagtgagtgcacatggatgcgaggagtagagtgcctcgatggcgaggcaggttcatccagacaagaagaaaccatgatggaatctggatttcccctctatccgatggaatccagattcagtgccagtccgttttcctgtgattttgggataccagcccaattccccttcatggagggtatgcgttgctgttggttggcacaccggaaggcagaacctttagctgtgaaggcctgtgactgaggtcatttcatgcaactaacaattctggtgaagactatccaatcttaggacacaacatgcaacaattagacgtatctatcatgatccttctataatttaacgatccttatatagtttaacaagtattatgtttttctgtaaagcttagaaatacttattttgttaatgcatagaaaatcaatgaaaaaaatgtagagcttttatgaaagtcaaaatggacatcaacgatttacgctaaaacttgtacccatttacgctgttttagttcacattttatgttgaaatccgttcgag

SEQ ID NO: 31224 - DNA, 1118 bp, Zea Mays
ttcgggcttcggcctctcgtctcccgtcccgttccatggaacgggccccggaagcccgagatgcggcctgagactgggagtctcgtcccgaaaggtgtcgggtgtggaacttatcctctaattcccttcattctcttgctttgaagggtggggggctagggcgggccgcactgcgcaccgagcgggcgccgggcggacgacgaagcggcgaggcagtgactggggagagatgtcgggcggcaggaggagggggcttgtgtggagcctccccgtggcgaggtcggatgcgctcggcaaactgggccctgccttcggcatcggcgctggctgcggcgtgggtcttggcttcggcctcatcggaggcatcggagctggattccctggtttacaattggggtttggagctggagctggatgtggaataggaataggttttggttacggctttggaaaaggcgttgcatatgatgaaagtggaaggtattcgaacatcaggagaccgttccagagctccagaagcattgctttcgatgagaagttcgatatcatgtttgacgaactgatggagagcaccaggaagctggtcaaagcaacatcaaaggagatcgacaaatggaggcgaatgtagaagcgagcaggggcagcacttataggatgaactgcgtagcgagagaaagcgatgccatcagaatctaaggtattaatgtgtgattggataaagtggcctagaagcttctacttgtgtgtaagaaagaaagaaagactgataaaagcgagttctccagagtacgaagccaaaagttgtcgaggcactctacacgtgcttcttctgtgtccgtgggaaccaaactgactaaaaagcaagttgctcgcttgctgttacatggaatatttttcagcgattcatgaggatgagatactctggcctgccgatgctgatgctcaaaagcattagtttttccagccacgtgctcggtgctgtccatgtgatcgcgacggcgcctggaattgaaatatcacccacgacgtcgccgtcgaaacccttgtttttcgtatccaaatatttggcacttggcaggacatattttctagagtattgtcgtgcccatatgttgacc

SEQ ID NO: 31225 - DNA, 957 bp, Zea Mays
gtctcgtcccgaaaggtgtcgggtgtggaacttatcctctaattcccttcattctcttgctttgaagggtggggggctagggcgggccgcactgcgcaccgagcgggcgccgggcggacgacgaagcggcgaggcagtgactggggagagatgtcgggcggcaggaggagggggcttgtgtggagcctccccgtggcgaggtcggatgcgctcggcaaactgggccctgccttcggcatcggcgctggctgcggcgtgggtcttggcttcggcctcatcggaggtgcaggcatcggagctggattccctggtttacaattggggtttggagctggagctggatgtggaataggaataggttttggttacggctttggaaaaggcgttgcatatgatgaaagtggaaggtattcgaacatcaggagaccgttccagagctccagaagcattgctttcgatgagaagttcgatatcatgtttgacgaactgatggagagcaccaggaagctggtcaaagcaacatcaaaggagatcgacaaatggaggcgaatgtagaagcgagcaggggcagcacttataggatgaactgcgtagcgagagaaagcgatgccatcagaatctaagagtacgaagccaaaagttgtcgaggcactctacacgtgcttcttctgtgtccgtgggaaccaaactgactaaaaagcaagttgctcgcttgctgttacatggaatatttttcagcgattcatgaggatgagatactctggcctgccgatgctgatgctcaaaagcattagtttttccagccacgtgctcggtgctgtccatgtgatcgcgacggcgcctggaattgaaatatcacccacgacgtcgccgtcgaaacccttgtttttcgtatccaaatatttggcacttggcaggacatattttctagagtattgtcgtgcccatatgttgacc

SEQ ID NO: 31226 - DNA, 798 bp, Zea Mays
cgaacgcgtaggggctccggctcactgccaacaaaggtgcaggcatcggagctggattccctggtttacaattggggtttggagctggagctggatgtggaataggaataggttttggttacggctttggaaaaggcgttgcatatgatgaaagtggaaggtattcgaacatcaggagaccgttccagagctccagaagcattgctttcgatgagaagttcgatatcatgtttgacgaactgatggagagcaccaggaagctggtcaaagcaacatcaaaggagatcgacaaatggaggcgaatgtagaagcgagcaggggcagcacttataggatgaactgcgtagcgagagaaagcgatgccatcagaatctaaggtattaatgtgtgattggataaagtggcctagaagcttctacttgtgtgtaagaaagaaagaaagactgataaaagcgagttctccagagtacgaagccaaaagttgtcgaggcactctacacgtgcttcttctgtgtccgtgggaaccaaactgactaaaaagcaagttgctcgcttgctgttacatggaatatttttcagcgattcatgaggatgagatactctggcctgccgatgctgatgctcaaaagcattagtttttccagccacgtgctcggtgctgtccatgtgatcgcgacggcgcctggaattgaaatatcacccacgacgtcgccgtcgaaacccttgtttttcgtatccaaatatttggcacttggcaggacatattttctagagtattgtcgtgcccatatgttgacc

SEQ ID NO: 31227 - DNA, 746 bp, Zea Mays
atgtctaggagactttgacagtaggctttgcaactcgagggcagcaggctttgcaagcagccgaatttgcaagcaggcggagcagtggagcacgggctgcacatccgaagcaggcggagcaaagcaaagcaagcaggcgaagcaaagcaaagcaggcaagcagccgtggagcagtggaggtggagcacggtcgtgcggccgccggccggccaacgcccaatgggccaaccggcctcggccaacgcccaaggggccaaccggccaagcacacgcgcacagcaggaaggcagaagcagctaggcaagaccgcagcccgcaggaagcagcaagccagagacggaggtgggcaggcggccgcggacggacaggcggtcggtcggccgggcgaggagcgggcgagccgcgagcggacgtcttgtgctgcagcggctgtattgcggcggctgtgctgtgcgtgcggagtgctacggctacggaggtatggtacgggctgtgctgaatacctaggtttcactcttttactgggcctagttgaggtatggtgcgggccatacttagccataacggaccctccgcccctcgctagagttccacattgtgattcaattgttacatttttcttagaagtcttagccttttgagtataaatatttaaccttatgttttaaaaagagaagaaaagcatctcaaagactatactcttctatcacctttcgacatatagccatccttattcttaaggttta

SEQ ID NO: 31228 - DNA, 2290 bp, Zea Mays
ggcaaatgttaaagcacacaccatgccttggctctcatcaatcaattctcaaccggaagtgactcgcccacgcggtcgtgggtcccacacgcagggactcgcgtcactgggtttgctagcggagtccatccaactataatgaattaggcacccagtacgtaatggcaacggaagtcaaacaaacttatttttcatggtcacaaggagagtcaactgaacgggatggtcctcaaggagtatctgtatcccagacacttgatcatggttccatttccttcggaagatttgaattagagtcactatcatgggagaagtggtccgtatttactaatgacaggcgcaatgaagaatttggaaaattcaatggtttagtcgctcagaaaaaggcttattttgaagagtattacaagaagatcagggaactaaaggcttcacagcagcaaaaccagcaaactgaacttattctggaatacagcggtgatggtagtgactccagccaaacagcagaagaggagcagggtgctgatcttgaaacccccactggatctggagcagctgttgatgtttatgtggaagaagttccatgtgaaaccacatcggagcatggactgcagtgctataatgaccaaggaaacgaaaattttgatacagaattttcctcatctaatctttcttcgtcaggtggatttctgcagcaaactgaccatgatgttagagttcctgttcgtggtgacaattctaccagtaaactgtatgcggcgccgcagaatgctagttctgttcacgatggtactagaaaaacatatgaagctgcaaggactcctagaaggattattgagaaagattccaggcttagacacagccccaagataataccaaaatccgtcaaagccctttcacaaagtgctatggattacacatttactagtgagaggcctggttcagtgaagcccaatacaactacgagccagaaggctaagccagtgcaaagaccaaatgcagcaagccagaagatgtctgcatctacagaaaggagcaagcttacaggtctcagaagaccttcctcagcaggtgcgcaacggccttctactggagagcgacatgctattgccagggagaattcacaattacctgtggtcgtttccaccccacggcgaccttccactgctgagagacgcccagtcacccgagatcgtgcagagaagcaagccaatgtcaccacaccacgccgaccttctacttctgaaagactccccatcaaaagagagactgcagcaaagcataatgatatttccgctgtacgtcgaccctctacaggagagagacgtgcttttactagagatggtgttctgagaactgatgtgaagacacctagtaaggcaagagcaactgtggctcatccgatgagtgaaatgactacagtgggcaatacgagaaaggctatcactccaaatgcagctagaagtagcaagctggaaacaaaaagcaataactacagactgaagggaccttcagcattggatagccactctactaggtcaaacagaatggacttgcaagtgtctggcaagcagaaatcgagttctgttaaccttcctccaaggaaaattttcagttctactgctggagaaccatcagttggaaccatttctaggtcaaaaaagaaagagggcgttcaggcgacagtgcaatctcgagcatccacttcaaagagaacaactcctttgcagactggaaacttaaaggcgaggggtccaaatccaccagcaccgccacctccaccacgtcggccatcacgaacgactaccaaaccaagtgccggtgcctcatcgattggcggaagaaagccaaaggcttcagcaccacaatggcactgatgcagtggaggagagcggaaagcgcttcagtacagtggcccgcagagcatggtggatctgagggacgtcagtaccggccttcctttgtatggtgtgtactcccgttggcccgtgcagagcagctcccaagtgtagtctcagtacaacccccgttggcccgtcccttcctttgcagagcagcagtctagtgtatgtagtcgcgcgtatcatatcccaccggtgcctagtttcgtcgtccacaaggaacttagaacattgtaaatacctggaaataaatttgcagcttagctctaaagtaaatccagcccaagatttgtgaacatccatgtatgtcattagcaatggaagcccttgtttatcagcttgttattggtgtgttctttttaagggttattgtcagatttgattcttcg

SEQ ID NO: 31229 - DNA, 3141 bp, Zea Mays
  misc_feature (2783)..(2882): n is a, c, g, or t
atcaatcaattctcaaccggaagtgactcgcccacgcggtcgtgggtcccacacgcagggactcgcgtcactgggtttgctagcggagtccatccaactataatgaattaggcacccagtacgtaatggcaacggaagtcaaacaaacttatttttcatggtcacaaggagagtcaactgaacgggatggtcctcaaggagtatctgtatcccagacacttgatcatggttccatttccttcggaagatttgaattagagtcactatcatgggagaagtggtccgtatttactaatgacaggcgcaatgaagaatttggaaaattcaatggtttagtcgctcagaaaaaggcttattttgaagagtattacaagaagatcagggaactaaaggcttcacagcagcaaaaccagcaaactgaacttattctggaatacagcggtgatggtagtgactccagccaaacagcagaagaggagcagggtgctgatcttgaaacccccactggatctggagcagctgttgatgtttatgtggaagaagttccatgtgaaaccacatcggagcatggactgcagtgctataatgaccaaggaaacgaaaattttgatacagaattttcctcatctaatctttcttcgtcaggtggatttctgcagcaaactgaccatgatgttagagttcctgttcgtggtgacaattctaccagtaaactgtatgcggcgccgcagaatgctagttctgttcacgatggtactagaaaaacatatgaagctgcaaggactcctagaaggattattgagaaagattccaggcttagacacagccccaagataataccaaaatccgtcaaagccctttcacaaagtgctatggattacacatttactagtgagaggcctggttcagtgaagcccaatacaactacgagccagaaggctaagccagtgcaaagaccaaatgcagcaagccagaagatgtctgcatctacagaaaggagcaagcttacaggtctcagaagaccttcctcagcaggtgcgcaacggccttctactggagagcgacatgctattgccagggagaattcacaattacctgtggtcgtttccaccccacggcgaccttccactgctgagagacgcccagtcacccgagatcgtgcagagaagcaagccaatgtcaccacaccacgccgaccttctacttctgaaagactccccatcaaaagagagactgcagcaaagcataatgatatttccgctgtacgtcgaccctctacaggagagagacgtgcttttactagagatggtgttctgagaactgatgtgaagacacctagtaaggcaagagcaactgtggctcatccgatgagtgaaatgactacagtgggcaatacgagaaaggctatcactccaaatgcagctagaagtagcaagctggaaacaaaaagcaataactacagactgaagggaccttcagcattggatagccactctactaggtcaaacagaatggacttgcaagtgtctggcaagcagaaatcgagttctgttaaccttcctccaaggaaaattttcagttctactgctggagaaccatcagttggaaccatttctaggtcaaaaaagaaagagtcctctagaagccaaacatcgttgatacttagaaggcagctgagtatatggtatttgtgggccattgtgctgtccatgcgagcggagagcatgcgtggcacctgtgcttcgggtgatgcccctgaccagagtagctgccgatgcattcggtgtgctgacaatcgcactgtttgctctgtttgctgctctgggcctcttctgcatcttccagtcggtctacttcaggtgtcggattcggagaggaccctccttccttccgcttggttattttaacggcccatgggtgactcgcattgctctgattctgatcacaatttggtggggagtaggtgagatagtgagattgagcttcttgaagaaaaagttgttctccagcttaacatggcagaggaacatatgtgatgtgtacatactttccaacctagggtttgcagagccagggatcttctttgcgtttgcttttctgctccatggctcgttacaaaagagggagctgggcacattaaaccaaagatggaattggaagaccatggcctacttgttggttttctgtattccagtgttctcggtgcaggcaatcctagtgtttgttgggcccaggtttgttagagaggagaaccatgatctcgggagaagaaagattgctaaatacttcatacggacctacacgccggttggagataccagtgtttgcacttacccattgtttggcaccctttttcttggacttgtagatgctttcctgatgagctatgtatcatatgttggattacgggtgctgtccttggttattaacaagtcactgcgaaggagagtttatctactgatgctgtctgtgctgtgcttccttcctatcagggtgcttctcctcgggttttcggtgctgctcaagccaggacatgttgcctttgagggtattatcttcctgtcattcttgatgatgctgtcctgcacgactgttgggatactcttgctggtttactaccctgtagctgattcattggccctccgagatataggccagagggacatagcagaaatggtgccttatgatgattactactatgaaggcacatcgcttgtggccaaccagagtttccgagaaatcgagcggaattctgacacttcaacgaagccgggatccatatnnnnnnnnnnnnnnnnnnnnnnnnnnnnnnnnnnnnnnnnnnnnnnnnnnnnnnnnnnnnnnnnnnnnnnnnnnnnnnnnnnnnnnnnnnnnnnnnnnnntttttcccccaaactagcttaactcatcattagcccagcactctaattccattctatcaaagtagcaagtagctagatcttgcactggctgatgagctgtgttctggcattggctggaagaggctgtgagttggagttcacttttggttggttttgctgctccacaactcataatatctcccagccaataggttacaccatggactaggctggaatggggcctctgctgtgtcgtcgcctactattccttagctgtttc

SEQ ID NO: 31230 - DNA, 2304 bp, Zea Mays
cccacacgcagggactcgcgtcactgcgccgcagcttttcaaaagtgctcctctttgggcccttgggggtctgtaactgctgggtggcctctcttttcttgcctccccgctttcttttccgtgggtttgctagcggagtccatccaactataatgaattaggcacccagtacgtaatggcaacggaagtcaaacaaacttatttttcatggtcacaaggagagtcaactgaacgggatggtcctcaaggagtatctgtatcccagacacttgatcatggttccatttccttcggaagatttgaattagagtcactatcatgggagaagtggtccgtatttactaatgacaggcgcaatgaagaatttggaaaattcaatggtttagtcgctcagaaaaaggcttattttgaagagtattacaagaagatcagggaactaaaggcttcacagcagcaaaaccagcaaactgaacttattctggaatacagcggtgatggtagtgactccagccaaacagcagaagaggagcagggtgctgatcttgaaacccccactggatctggagcagctgttgatgtttatgtggaagaagttccatgtgaaaccacatcggagcatggactgcagtgctataatgaccaaggaaacgaaaattttgatacagaattttcctcatctaatctttcttcgtcaggtggatttctgcagcaaactgaccatgatgttagagttcctgttcgtggtgacaattctaccagtaaactgtatgcggcgccgcagaatgctagttctgttcacgatggtactagaaaaacatatgaagctgcaaggactcctagaaggattattgagaaagattccaggcttagacacagccccaagataataccaaaatccgtcaaagccctttcacaaagtgctatggattacacatttactagtgagaggcctggttcagtgaagcccaatacaactacgagccagaaggctaagccagtgcaaagaccaaatgcagcaagccagaagatgtctgcatctacagaaaggagcaagcttacaggtctcagaagaccttcctcagcaggtgcgcaacggccttctactggagagcgacatgctattgccagggagaattcacaattacctgtggtcgtttccaccccacggcgaccttccactgctgagagacgcccagtcacccgagatcgtgcagagaagcaagccaatgtcaccacaccacgccgaccttctacttctgaaagactccccatcaaaagagagactgcagcaaagcataatgatatttccgctgtacgtcgaccctctacaggagagagacgtgcttttactagagatggtgttctgagaactgatgtgaagacacctagtaaggcaagagcaactgtggctcatccgatgagtgaaatgactacagtgggcaatacgagaaaggctatcactccaaatgcagctagaagtagcaagctggaaacaaaaagcaataactacagactgaagggaccttcagcattggatagccactctactaggtcaaacagaatggacttgcaagtgtctggcaagcagaaatcgagttctgttaaccttcctccaaggaaaattttcagttctactgctggagaaccatcagttggaaccatttctaggtcaaaaaagaaagagggcgttcaggcgacagtgcaatctcgagcatccacttcaaagagaacaactcctttgcagactggaaacttaaaggcgaggggtccaaatccaccagcaccgccacctccaccacgtcggccatcacgaacgactaccaaaccaagtgccggtgcctcatcgattggcggaagaaagccaaaggcttcagcaccacaatggcactgatgcagtggaggagagcggaaagcgcttcagtacagtggcccgcagagcatggtggatctgagggacgtcagtaccggccttcctttgtatggtgtgtactcccgttggcccgtgcagagcagctcccaagtgtagtctcagtacaacccccgttggcccgtcccttcctttgcagagcagcagtctagtgtatgtagtcgcgcgtatcatatcccaccggtgcctagtttcgtcgtccacaaggaacttagaacattgtaaatacctggaaataaatttgcagcttagctctaaagtaaatccagcccaagatttgtgaacatccatgtatgtcattagcaatggaagcccttgtttatcagcttgttattggtgtgttctttttaagggttattgtcagatttgattcttcg

SEQ ID NO: 31231 - DNA, 644 bp, Zea Mays
cgaaacatttataactgaactgagggcgttcaggcgacagtgcaatctcgagcatccacttcaaagagaacaactcctttgcagactggaaacttaaaggcgaggggtccaaatccaccagcaccgccacctccaccacgtcggccatcacgaacgactaccaaaccaagtgccggtgcctcatcgattggcggaagaaagccaaaggcttcagcaccacaatggcactgatgcagtggaggagagcggaaagcgcttcagtacagtggcccgcagagcatggtggatctgagggacgtcagtaccggccttcctttgtatggtgtgtactcccgttggcccgtgcagagcagctcccaagtgtagtctcagtacaacccccgttggcccgtcccttcctttgcagagcagcagtctagtgtatgtagtcgcgcgtatcatatcccaccggtgcctagtttcgtcgtccacaaggaacttagaacattgtaaatacctggaaataaatttgcagcttagctctaaagtaaatccagcccaagatttgtgaacatccatgtatgtcattagcaatggaagcccttgtttatcagcttgttattggtgtgttctttttaagggttattgtcagatttgattcttcg

SEQ ID NO: 31232 - DNA, 1234 bp, Zea Mays
  misc_feature (876)..(975): n is a, c, g, or t
gggcgaccgaggctgcaggttcggcacctaccgagccgcaggacaactggagacagcctgtctcgcacccccctcctcttcttcgctctgtctccggctctccgctctctctctctcttcccctccccgttctcccattctctctctcctctcccgagtccctccccctatccccccctctccgcctccgtcgctagggctccattcccctgcgcatccgccgccgccggatcccgcctcgcctccgccgcagcttcggcatcagaatcaccggattcggtggtgtttctcggctgcctcagcttccgccggcggaaggccccaggcggcgctccctgcagccctccggccttcactgagtcctctagaagccaaacatcgttgatacttagaaggcagctgagtatatggtatttgtgggccattgtgctgtccatgcgagcggagagcatgcgtggcacctgtgcttcgggtgatgcccctgaccagagtagctgccgatgcattcggtgtgctgacaatcgcactgtttgctctgtttgctgctctgggcctcttctgcatcttccagtcggtctacttcagggtgcttctcctcgggttttcggtgctgctcaagccaggacatgttgcctttgagggtattatcttcctgtcattcttgatgatgctgtcctgcacgactgttgggatactcttgctggtttactaccctgtagctgattcattggccctccgagatataggccagagggacatagcagaaatggtgccttatgatgattactactatgaaggcacatcgcttgtggccaaccagagtttccgagaaatcgagcggaattctgacacttcaacgaagccgggatccatatnnnnnnnnnnnnnnnnnnnnnnnnnnnnnnnnnnnnnnnnnnnnnnnnnnnnnnnnnnnnnnnnnnnnnnnnnnnnnnnnnnnnnnnnnnnnnnnnnnnntttttcccccaaactagcttaactcatcattagcccagcactctaattccattctatcaaagtagcaagtagctagatcttgcactggctgatgagctgtgttctggcattggctggaagaggctgtgagttggagttcacttttggttggttttgctgctccacaactcataatatctcccagccaataggttacaccatggactaggctggaatggggcctctgctgtgtcgtcgcctactattccttagctgtttc

SEQ ID NO: 31233 - DNA, 1617 bp, Zea Mays
  misc_feature (1259)..(1358): n is a, c, g, or t
cggctctccgctctctctctctcttcccctccccgttctcccattctctctctcctctcccgagtccctccccctatccccccctctccgcctccgtcgctagggctccattcccctgcgcatccgccgccgccggatcccgcctcgcctccgccgcagcttcggcatcagaatcaccggattcggtggtgtttctcggctgcctcagcttccgccggcggaaggccccaggcggcgctccctgcagccctccggccttcactgagtcctctagaagccaaacatcgttgatacttagaaggcagctgagtatatggtatttgtgggccattgtgctgtccatgcgagcggagagcatgcgtggcacctgtgcttcgggtgatgcccctgaccagagtagctgccgatgcattcggtgtgctgacaatcgcactgtttgctctgtttgctgctctgggcctcttctgcatcttccagtcggtctacttcaggtgtcggattcggagaggaccctccttccttccgcttggttattttaacggcccatgggtgactcgcattgctctgattctgatcacaatttggtggggagtaggtgagatagtgagattgagcttcttgaagaaaaagttgttctccagcttaacatggcagaggaacatatgtgatgtgtacatactttccaacctagggtttgcagagccagggatcttctttgcgtttgcttttctgctccatggctcgttacaaaagagggagctgggcacattaaaccaaagatggaattggaagaccatggcctacttgttggttttctgtattccagtgttctcggtgcaggcaatcctagtgtttgttgggcccaggtttgttagagaggagaaccatgatctcgggagaagaaagattgctaaatacttcatacggacctacacgccggttggagataccagtgtttgcacttacccattgtttggcaccctttttcttggacttgtagatgctttcctgatgagctatgtatcatatgttggattacgggtgctgtccttggttattaacaagtcactgcgaaggagagtttatctactgatgctgtctgtgctgtgcttccttcctatcagggtgcttctcctcgggttttcggtgctgctcaagccaggacatgttgcctttgagggcacatcgcttgtggccaaccagagtttccgagaaatcgagcggaattctgacacttcaacgaagccgggatccatatnnnnnnnnnnnnnnnnnnnnnnnnnnnnnnnnnnnnnnnnnnnnnnnnnnnnnnnnnnnnnnnnnnnnnnnnnnnnnnnnnnnnnnnnnnnnnnnnnnnntttttcccccaaactagcttaactcatcattagcccagcactctaattccattctatcaaagtagcaagtagctagatcttgcactggctgatgagctgtgttctggcattggctggaagaggctgtgagttggagttcacttttggttggttttgctgctccacaactcataatatctcccagccaataggttacaccatggactaggctggaatggggcctctgctgtgtcgtcgcctactattccttagctgtttc

SEQ ID NO: 31234 - DNA, 1898 bp, Zea Mays
  misc_feature (1540)..(1639): n is a, c, g, or t
gtttgagcagttgtccctaatctttttaggcagcctcttttggtgatctagtgcttactccggtcggttaacggtctgggtttgagcctctttacccgtgggaacgagcaaataagttgctattggagtatttaggagctaacaagtgatattcttgctagtatttctgaaatgtttcaggggttaaaaaaatctgtatttaatgcaggaatggtaagctttttcttgttagctgattgcctgattcaagtaatttaccaacttaaatgtgctaggttacccacttcagtacgatattaactgtgcacgcaatcaataatggatttgtcctagtatgggcatcggaggtttagtgtataatcagctaaaatcaaacgaagtttcgattgagtcctctagaagccaaacatcgttgatacttagaaggcagctgagtatatggtatttgtgggccattgtgctgtccatgcgagcggagagcatgcgtggcacctgtgcttcgggtgatgcccctgaccagagtagctgccgatgcattcggtgtgctgacaatcgcactgtttgctctgtttgctgctctgggcctcttctgcatcttccagtcggtctacttcaggtgtcggattcggagaggaccctccttccttccgcttggttattttaacggcccatgggtgactcgcattgctctgattctgatcacaatttggtggggagtaggtgagatagtgagattgagcttcttgaagaaaaagttgttctccagcttaacatggcagaggaacatatgtgatgtgtacatactttccaacctagggtttgcagagccagggatcttctttgcgtttgcttttctgctccatggctcgttacaaaagagggagctgggcacattaaaccaaagatggaattggaagaccatggcctacttgttggttttctgtattccagtgttctcggtgcaggcaatcctagtgtttgttgggcccaggtttgttagagaggagaaccatgatctcgggagaagaaagattgctaaatacttcatacggacctacacgccggttggagataccagtgtttgcacttacccattgtttggcaccctttttcttggacttgtagatgctttcctgatgagctatgtatcatatgttggattacgggtgctgtccttggttattaacaagtcactgcgaaggagagtttatctactgatgctgtctgtgctgtgcttccttcctatcagggtgcttctcctcgggttttcggtgctgctcaagccaggacatgttgcctttgagggtattatcttcctgtcattcttgatgatgctgtcctgcacgactgttgggatactcttgctggtttactaccctgtagctgattcattggccctccgagatataggccagagggacatagcagaaatggtgccttatgatgattactactatgaaggcacatcgcttgtggccaaccagagtttccgagaaatcgagcggaattctgacacttcaacgaagccgggatccatatnnnnnnnnnnnnnnnnnnnnnnnnnnnnnnnnnnnnnnnnnnnnnnnnnnnnnnnnnnnnnnnnnnnnnnnnnnnnnnnnnnnnnnnnnnnnnnnnnnnntttttcccccaaactagcttaactcatcattagcccagcactctaattccattctatcaaagtagcaagtagctagatcttgcactggctgatgagctgtgttctggcattggctggaagaggctgtgagttggagttcacttttggttggttttgctgctccacaactcataatatctcccagccaataggttacaccatggactaggctggaatggggcctctgctgtgtcgtcgcctactattccttagctgtttc

SEQ ID NO: 31235 - DNA, 2199 bp, Zea Mays
atagtcgcccgctcctctgctctcacgaattcgaacccaccaaaccctcgctcactcagaccgcctgccctccgccgccgccatttgcgccgaccgccgtcatcagggcaaggatcgcggaagcgagggtgattccggggttttgcggagggtttaagcccggaccgctctgttcgcgcatcgaggggaggaaaggatgagctggaagaggcagaagcaggataaggacgagatgaccgaggaatgctgcttcatttgcaaggacagcggccacgacctccgcgtatgtgactctaggaactgccccaaggcttaccatccacgctgtttccaaaacaaagatgaggtgttcatatgcgattggcacacatgtgtccattgcagaggacgttctgattatcagtgcctgtgctgtccattttactcggtttgctctgcctgccttggaaaactagaatttgtgcaactgagaaagcaaaataagggattctgcagcagctgcttgaacctggctattgcgattgagaaggatgatcctcatgtgtcaaaaacagataactacaaaattttgtttaaagactactgggaaggaattaaagatgcagaacatttgacattggttgacctggaagaagctagtgatattctgaacagaaagcttaactgtaaaggagcaactttagagagatttccagctgatgatcacaagttagatgaaaatacatctcctgataatggtgctaatgatcaaacaagatttccagctgatgatctcaagacacatgaaaatacatctcctgataatggtgccaatgatcaaacaatttcttttgactctgagggcaaacagattaaagcaaacacatcacggaacaacaagtcaaataagagaacctatgttgggtggggttccaaagagctaattggattcttgtcaagtttgggaaaggatacgtcaaaatctcttgatgaactcgaaattattggagttgtcaaggggtacatcaaacagaagaaactgtaccaggatgataagaaacttcgtttcttgtgtgatgataagctgcaacccctctttacaagaagaaaagtgagatgtaaaatgatccgtaagttcttggcagttcatctagcttcaaatgctatttcagaggatgaaagattttgtagttatgaagatgacgatgatgccttagttattaaaaagagacctcggaatagtctagggccaaagattgctaagagggtctcagaaagaagcaagagacattttgcgtcccttactcagaataatatcaacctaatctacctgagaaaaactttagttattagtcttttgaatcagccagacacatttgaacagaaagttattggctgttttgttagagtcaggtgtggcaaaaagacgcacagctatgaaatacctaaaaaggcatacctgcttggaaaagtaataggcatcaagaagtctaaaaatgaatacaagataaatgatacatatacaaaaattctcttatgtgttactggtttgttggatgatgtcagtgtatcgatgctctcagatgaggacttagaagaggatgagtgcgatgatcttatttctttggctgagaaaggactactggaacgggctactgttaacctaaccatttgaatatatggcactggatggagcagacttaccatgctgttgaataaatgatttctttctttcacctttcacattcattgcactagcgatgagaatattttgtatttgcatgtgttgtatgtatgtgtacatttattgtgaataaatgttatggttctcattctaacatattcacatggctaattagtaacgcgaatctgtggctgtatcttgtcaaacaaatcatggattcctctagcaattccagtgctaaagtaagataattcatatacaaattcatcacggggatctatgctccttatgctctaaagaacgcttagtacaatacagaagggtgcttgatttgcaggcataaactggcttgttctttaatttttggatgttccccgggagtgtggtttatgaggggaaatctctgtggtcggcagttaagtacagtcttttacaactacctaaactctctattctgcttaattgaaatgcatagctcctgagagttcattaaaaatgatctaggcaattttctttggttgctctttcaattggat

SEQ ID NO: 31236 - DNA, 3167 bp, Zea Mays
atagtcgcccgctcctctgctctcacgaattcgaacccaccaaaccctcgctcactcagaccgcctgccctccgccgccgccatttgcgccgaccgccgtcatcagggcaaggatcgcggaagcgagggtgattccggggttttgcggagggtttaagcccggaccgctctgttcgcgcatcgaggggaggaaaggatgagctggaagaggcagaagcaggataaggacgagatgaccgaggaatgctgcttcatttgcaaggacagcggccacgacctccgcgtatgtgactctaggaactgccccaaggcttaccatccacgctgtttccaaaacaaagatgaggtgttcatatgcgattggcacacatgtgtccattgcagaggacgttctgattatcagtgcctgtgctgtccattttactcggtttgctctgcctgccttggaaaactagaatttgtgcaactgagaaagcaaaataagggattctgcagcagctgcttgaacctggctattgcgattgagaaggatgatcctcatgtgtcaaaaacagataactacaaaattttgtttaaagactactgggaaggaattaaagatgcagaacatttgacattggttgacctggaagaagctagtgatattctgaacagaaagcttaactgtaaaggagcaactttagagagatttccagctgatgatcacaagttagatgaaaatacatctcctgataatggtgctaatgatcaaacaagatttccagctgatgatctcaagacacatgaaaatacatctcctgataatggtgccaatgatcaaacaatttcttttgactctgagggcaaacagattaaagcaaacacatcacggaacaacaagtcaaataagagaacctatgttgggtggggttccaaagagctaattggattcttgtcaagtttgggaaaggatacgtcaaaatctcttgatgaactcgaaattattggagttgtcaaggggtacatcaaacagaagaaactgtaccaggatgataagaaacttcgtttcttgtgtgatgataagctgcaacccctctttacaagaagaaaagtgagatgtaaaatgatccgtaagttcttggcagttcatctagcttcaaatgctatttcagaggatgaaagattttgtagttatgaagatgacgatgatgccttagttattaaaaagagacctcggaatagtctagggccaaagattgctaagagggtctcagaaagaagcaagagacattttgcgtcccttactcagaataatatcaacctaatctacctgagaaaaactttagttattagtcttttgaatcagccagacacatttgaacagaaagttattggctgttttgttagagtcaggtgtggcaaaaagacgcacagctatgaaatacctaaaaaggcatacctgcttggaaaagtaataggcatcaagaagtctaaaaatgaatacaagataaatgatacatatacaaaaattctcttatgtgttactggtttgttggatgatgtcagtgtatcgatgctctcagatgaggacttagaagaggatgagtgcgatgatcttatttctttggctgagaaaggactactggaacgggctactgttgctgagttggaggaaaaggtggcaactgtacatacagacatagttaatcatgatttagacacgaggagaattctttttcgcgttgtgaagatgggctctatccccttccatcaaactcttggagagaagctctactttttcgcgttttgaagatgggctctatccccttccatcaaactcttggagagaagctctagacaccttcaaggtatcccctcgcagatggcatagtcgtcttggtcatccagctcgtcacagttcaaaagttggggtcttgctctagagtctgttggttgaaaaaaatattatgtcagctttatagatgatttcaacaagtttgcttgggtgcattttcttgaatttaaatctgatgtttttcagaaattcactgagttccagaatatggttaggagagggaaaaaggcctgaggcctcgaagaaactggacacaacacacaaaaatgcacaccagattcacacaacaaacacacaccaaacacacacataccagccacacacaacacaccaccaccacaacatacaaagaggctaaaaaaccttccttcctctaaccaggataaaaaagagagcgcatgttcttggctcctgaaaaaaaaaacagttgcatctcatctttgaaaccatcctctaaggtagaaaggcagggccaagctccatcaaagatacacctatttctctgcttccaaaggctccaagccccaaggatgaccacactattaaagctctttcttttgcttttaggaatcctagctgaagactttctccaccattcagcaaaacaggaatctcttctcttagaagccacaatagagagaccaattggagttaatatattatgtcaaaactatcttgtgaaaacacaatttgatagaatatgctgcacagtttcatcttcttgatcacatagaacacaattttcaggttgaacatctcttccactaaaatcatagcaatgtaatgcaaactgactggggaggtgagtatcaaaggttaaacttgttcttcaccaaaatagggatcacacactatgtaaaatgctctcatgcgcaccagcaaaacagttcagctaagagaaaacacagacatattgtggaggctatctgttctagttcatgcatccatgccactcaaattctggcatgaagtttttgctactgcaacatatcttatcaaccgccctccctcaaaactcttagattactcaacacctctagaacgacaggttaaacaattcccagattattccttttttatggtgtttgggtgtgcttacgggcctaatttgtgcccatacaatactcgcaagcttacttttaggtctatgcaatgtgtcttccttggatacaacaacacgcataaaggttacaagtgtcaaaaggtattcattggccgcataaacatctctcgtgatattgtttctgatgaagtctttctctctagagaacttcattttaatgctggtgcggcgatcagaaatcagtcttttgccttctaacttacttccttc

SEQ ID NO: 31237 - DNA, 3145 bp, Zea Mays
atagtcgcccgctcctctgctctcacgaattcgaacccaccaaaccctcgctcactcagaccgcctgccctccgccgccgccatttgcgccgaccgccgtcatcagggcaaggatcgcggaagcgagggtgattccggggttttgcggagggtttaagcccggaccgctctgttcgcgcatcgaggggaggaaaggatgagctggaagaggcagaagcaggataaggacgagatgaccgaggaatgctgcttcatttgcaaggacagcggccacgacctccgcgtatgtgactctaggaactgccccaaggcttaccatccacgctgtttccaaaacaaagatgaggtgttcatatgcgattggcacacatgtgtccattgcagaggacgttctgattatcagtgcctgtgctgtccattttactcggtttgctctgcctgccttggaaaactagaatttgtgcaactgagaaagcaaaataagggattctgcagcagctgcttgaacctggctattgcgattgagaaggatgatcctcatgtgtcaaaaacagataactacaaaattttgtttaaagactactgggaaggaattaaagatgcagaacatttgacattggttgacctggaagaagctagtgatattctgaacagaaagcttaactgtaaaggagcaactttagagagatttccagctgatgatcacaagttagatgaaaatacatctcctgataatggtgctaatgatcaaacaagatttccagctgatgatctcaagacacatgaaaatacatctcctgataatggtgccaatgatcaaacaatttcttttgactctgagggcaaacagattaaagcaaacacatcacggaacaacaagtcaaataagagaacctatgttgggtggggttccaaagagctaattggattcttgtcaagtttgggaaaggatacgtcaaaatctcttgatgaactcgaaattattggagttgtcaaggggtacatcaaacagaagaaactgtaccaggatgataagaaacttcgtttcttgtgtgatgataagctgcaacccctctttacaagaagaaaagtgagatgtaaaatgatccgtaagttcttggcagttcatctagcttcaaatgctatttcagaggatgaaagattttgtagttatgaagatgacgatgatgccttagttattaaaaagagacctcggaatagtctagggccaaagattgctaagagggtctcagaaagaagcaagagacattttgcgtcccttactcagaataatatcaacctaatctacctgagaaaaactttagttattagtcttttgaatcagccagacacatttgaacagaaagttattggctgttttgttagagtcaggtgtggcaaaaagacgcacagctatgaaatacctaaaaaggcatacctgcttggaaaagtaataggcatcaagaagtctaaaaatgaatacaagataaatgatacatatacaaaaattctcttatgtgttactggtttgttggatgatgtcagtgtatcgatgctctcagatgaggacttagaagaggatgagtgcgatgatcttatttctttggctgagaaaggactactggaacgggctactgttgctgagttggaggaaaaggtggcaactgtacatacagacatagttaatcattggattgaaagagaacttgtgagactagaaagaaagatcgacattgcgcatacgaaagggttacgcatagaaatggtggaactactggaccaaaagatacttttaaacacgccagctgaaagacggcgtcttcttgaagaggttccagaaatcgttcctgatacagagtacagagaaaaggaaactgaactccaagttgcggcaagcaactcttctcaagagattagagggcggctagttatattgagtaactggaattctgaaaccattcgaacaccaaaaccataagatcattttgtcatctgggttgtgctagatactaataatctagcatggtgatgccaagaaactctgatcaatagcagtaaataagctcatgaagcctgcgtcagtggtggtgtcactcctgatcctgcactatattatcaaatggacgatactcaagatgatagcccgactcaagccatgaacattgaccaagatgaatgtgaccactcccggcaagttgccatgacaaggattaatgaagcagaagtcatcgatctaaccagtgatgacgaggaggatcctcgcacagtgcagcataagccagaaggcaaggtcatgcatgatccaactccatgggccatggatgggattcttcagccggagcagcgacagccagctcatgcagccatgaatggaattgtgcccccagagcagcacaagccagcacgtgcagcaacgaacggcgtgtcaccttggacgctccaatggcactacatagaccctcaaggagacacccgagggccattctcgctggtgcacctgttgcattggaaacgggggggcttcttcgacgagggcttccgagtgtggaggacggggcagacttctgagcaggctatcttgcttagagatgccttgttgcatctgcatctgtagcctgctttcgtcatcgatgcattctggatctcgtttccgtaaccggtttggacctcatggacatggactacctctagtcacctcgaggctcgagtaatgtggatgtactcccccgtggccctcgccacacacacaccaaacgaacaaacaaaaaacacacaattttagatttgaaactagtcaagctttcttaaatcagagtttactagccttcttaaatcagccggatgtccgcggccgctatttttagtttagctttgtcctacgatttagggcctgtttagttagctttgtctgagattttttctgagaatttggttgtcgagaaaactcgagtatcatggagattacgtgttgagaaagataaaagagtacatagaaagtgacgcttttctactgtcacaacggctcgaccaattctgtatttattttgattttggacgattttgactaaagtgattctcatagaaacgttgaaaagttgggtgtttaacagttcgagcttacttatggtggccaaaagttgaaaag

SEQ ID NO: 31238 - DNA, 3302 bp, Zea Mays
atagtcgcccgctcctctgctctcacgaattcgaacccaccaaaccctcgctcactcagaccgcctgccctccgccgccgccatttgcgccgaccgccgtcatcagggcaaggatcgcggaagcgagggtgattccggggttttgcggagggtttaagcccggaccgctctgttcgcgcatcgaggggaggaaaggatgagctggaagaggcagaagcaggataaggacgagatgaccgaggaatgctgcttcatttgcaaggacagcggccacgacctccgcgtatgtgactctaggaactgccccaaggcttaccatccacgctgtttccaaaacaaagatgaggtgttcatatgcgattggcacacatgtgtccattgcagaggacgttctgattatcagtgcctgtgctgtccattttactcggtttgctctgcctgccttggaaaactagaatttgtgcaactgagaaagcaaaataagggattctgcagcagctgcttgaacctggctattgcgattgagaaggatgatcctcatgtgtcaaaaacagataactacaaaattttgtttaaagactactgggaaggaattaaagatgcagaacatttgacattggttgacctggaagaagctagtgatattctgaacagaaagcttaactgtaaaggagcaactttagagagatttccagctgatgatcacaagttagatgaaaatacatctcctgataatggtgctaatgatcaaacaagatttccagctgatgatctcaagacacatgaaaatacatctcctgataatggtgccaatgatcaaacaatttcttttgactctgagggcaaacagattaaagcaaacacatcacggaacaacaagtcaaataagagaacctatgttgggtggggttccaaagagctaattggattcttgtcaagtttgggaaaggatacgtcaaaatctcttgatgaactcgaaattattggagttgtcaaggggtacatcaaacagaagaaactgtaccaggatgataagaaacttcgtttcttgtgtgatgataagctgcaacccctctttacaagaagaaaagtgagatgtaaaatgatccgtaagttcttggcagttcatctagcttcaaatgctatttcagaggatgaaagattttgtagttatgaagatgacgatgatgccttagttattaaaaagagacctcggaatagtctagggccaaagattgctaagagggtctcagaaagaagcaagagacattttgcgtcccttactcagaataatatcaacctaatctacctgagaaaaactttagttattagtcttttgaatcagccagacacatttgaacagaaagttattggctgttttgttagagtcaggtgtggcaaaaagacgcacagctatgaaatacctaaaaaggcatacctgcttggaaaagtaataggcatcaagaagtctaaaaatgaatacaagataaatgatacatatacaaaaattctcttatgtgttactggtttgttggatgatgtcagtgtatcgatgctctcagatgaggacttagaagaggatgagtgcgatgatcttatttctttggctgagaaaggactactggaacgggctactgttgctgagttggaggaaaaggtggcaactgtacatacagacatagttaatcatgatttagacacgaggagaattctttttcgcgttgtgaagatgggctctatccccttccatcaaactcttggagagaagctctactttttcgcgttttgaagatgggctctatccccttccatcaaactcttggagagaagctctagacaccttcaagtggattgaaagagaacttgtgagactagaaagaaagatcgacattgcgcatacgaaagggttacgcatagaaatggtggaactactggaccaaaagatacttttaaacacgccagctgaaagacggcgtcttcttgaagaggttccagaaatcgttcctgatacagagtacagagaaaaggaaactgaactccaagttgcggcaagcaactcttctcaagagattagagggcggctagttatattgagtaactggaattctgaaaccattcgaacaccaaaaccataagatcattttgtcatctgggttgtgctagatactaataatctagcatggtgatgccaagaaactctgatcaatagcagtaaataagctcatgaagcctgcgtcagtggtggtgtcactcctgatcctgcactatattatcaaatggacgatactcaagatgatagcccgactcaagccatgaacattgaccaagatgaatgtgaccactcccggcaagttgccatgacaaggattaatgaagcagaagtcatcgatctaaccagtgatgacgaggaggatcctcgcacagtgcagcataagccagaaggcaaggtcatgcatgatccaactccatgggccatggatgggattcttcagccggagcagcgacagccagctcatgcagccatgaatggaattgtgcccccagagcagcacaagccagcacgtgcagcaacgaacggcgtgtcaccttggacgctccaatggcactacatagaccctcaaggagacacccgagggccattctcgctggtgcacctgttgcattggaaacgggggggcttcttcgacgagggcttccgagtgtggaggacggggcagacttctgagcaggctatcttgcttagagatgccttgttgcatctgcatctgtagcctgctttcgtcatcgatgcattctggatctcgtttccgtaaccggtttggacctcatggacatggactacctctagtcacctcgaggctcgagtaatgtggatgtactcccccgtggccctcgccacacacacaccaaacgaacaaacaaaaaacacacaattttagatttgaaactagtcaagctttcttaaatcagagtttactagccttcttaaatcagccggatgtccgcggccgctatttttagtttagctttgtcctacgatttagggcctgtttagttagctttgtctgagattttttctgagaatttggttgtcgagaaaactcgagtatcatggagattacgtgttgagaaagataaaagagtacatagaaagtgacgcttttctactgtcacaacggctcgaccaattctgtatttattttgattttggacgattttgactaaagtgattctcatagaaacgttgaaaagttgggtgtttaacagttcgagcttacttatggtggccaaaagttgaaaag

SEQ ID NO: 31239 - DNA, 1729 bp, Zea Mays
atgacgggattggcgggattctgccagttgccagctgttggcatccacaaatcgatttgcaaacgaaactctgtaccttttgcggacgagcgagttttttgccctgaaaggccttcgatggttaagctgcaccctttgctgccgaggaagcaggtgctggaacagacaaaacaacgtcatggaggtagcccggactggtaccatgccaccgatcaaacttggtcctaccttaaggggtcgacgcctttggtgggccagcgtctacggtggggactgaggtggtcgccaatcccaggacaggaggtcggtgcagggctgggaaaggtggtcgctggcgtcggagtgtccgctggtcgttggctgaggggaaacgaggcgtcggggagagattggcacacatgtgtccattgcagaggacgttctgattatcagtgcctgtgctgtccattttactcggtttgctctgcctgccttggaaaactagaatttgtgcaactgagaaagcaaaataagggattctgcagcagctgcttgaacctggctattgcgattgagaaggatgatcctcatgtgtcaaaaacagataactacaaaattttgtttaaagactactgggaaggaattaaagatgcagaacatttgacattggttgacctggaagaagctagtgatattctgaacagaaagcttaactgtaaaggagcaactttagagagatttccagctgatgatcacaagttagatgaaaatacatctcctgataatggtgctaatgatcaaacaagatttccagctgatgatctcaagacacatgaaaatacatctcctgataatggtgccaatgatcaaacaatttcttttgactctgagggcaaacagattaaagcaaacacatcacggaacaacaagtcaaataagagaacctatgttgggtggggttccaaagagctaattggattcttgtcaagtttgggaaaggatacgtcaaaatctcttgatgaactcgaaattattggagttgtcaaggggtacatcaaacagaagaaactgtaccaggatgataagaaacttcgtttcttgtgtgatgataagctgcaacccctctttacaagaagaaaagtgagatgtaaaatgatccgtaagttcttggcagttcatctagcttcaaatgctatttcagaggatgaaagattttgtagttatgaagatgacgatgatgccttagttattaaaaagagacctcggaatagtctagggccaaagattgctaagagggtctcagaaagaagcaagagacattttgcgtcccttactcagaataatatcaacctaatctacctgagaaaaactttagttattagtcttttgaatcagccagacacatttgaacagaaagttattggctgttttgttagagtcaggtgtggcaaaaagacgcacagctatgaaatacctaaaaaggcatacctgcttggaaaagtaataggcatcaagaagtctaaaaatgaatacaagataaatgatacatatacaaaaattctcttatgtgttactggtttgttggatgatgtcagtgtatcgatgctctcagatgaggacttagaagaggatgagtgcgatgatcttatttctttggctgagaaaggactactggaacgggctactgttgaaggaaattcactagtccatagagatgaaggaccacggctgagttggaggaaaaggtggc

SEQ ID NO: 31240 - DNA, 3719 bp, Zea Mays
atgacgggattggcgggattctgccagttgccagctgttggcatccacaaatcgatttgcaaacgaaactctgtaccttttgcggacgagcgagttttttgccctgaaaggccttcgatggttaagctgcaccctttgctgccgaggaagcaggtgctggaacagacaaaacaacgtcatggaggtagcccggactggtaccatgccaccgatcaaacttggtcctaccttaaggggtcgacgcctttggtgggccagcgtctacggtggggactgaggtggtcgccaatcccaggacaggaggtcggtgcagggctgggaaaggtggtcgctggcgtcggagtgtccgctggtcgttggctgaggggaaacgaggcgtcggggagagattggcacacatgtgtccattgcagaggacgttctgattatcagtgcctgtgctgtccattttactcggtttgctctgcctgccttggaaaactagaatttgtgcaactgagaaagcaaaataagggattctgcagcagctgcttgaacctggctattgcgattgagaaggatgatcctcatgtgtcaaaaacagataactacaaaattttgtttaaagactactgggaaggaattaaagatgcagaacatttgacattggttgacctggaagaagctagtgatattctgaacagaaagcttaactgtaaaggagcaactttagagagatttccagctgatgatcacaagttagatgaaaatacatctcctgataatggtgctaatgatcaaacaagatttccagctgatgatctcaagacacatgaaaatacatctcctgataatggtgccaatgatcaaacaatttcttttgactctgagggcaaacagattaaagcaaacacatcacggaacaacaagtcaaataagagaacctatgttgggtggggttccaaagagctaattggattcttgtcaagtttgggaaaggatacgtcaaaatctcttgatgaactcgaaattattggagttgtcaaggggtacatcaaacagaagaaactgtaccaggatgataagaaacttcgtttcttgtgtgatgataagctgcaacccctctttacaagaagaaaagtgagatgtaaaatgatccgtaagttcttggcagttcatctagcttcaaatgctatttcagaggatgaaagattttgtagttatgaagatgacgatgatgccttagttattaaaaagagacctcggaatagtctagggccaaagattgctaagagggtctcagaaagaagcaagagacattttgcgtcccttactcagaataatatcaacctaatctacctgagaaaaactttagttattagtcttttgaatcagccagacacatttgaacagaaagttattggctgttttgttagagtcaggtgtggcaaaaagacgcacagctatgaaatacctaaaaaggcatacctgcttggaaaagtaataggcatcaagaagtctaaaaatgaatacaagataaatgatacatatacaaaaattctcttatgtgttactggtttgttggatgatgtcagtgtatcgatgctctcagatgaggacttagaagaggatgagtgcgatgatcttatttctttggctgagaaaggactactggaacgggctactgttgctgagttggaggaaaaggtggcaactgtacatacagacatagttaatcatatggctcaagggaggatgctaatgatgggcaccacgttaaatctgtggattgaaagagaacttgtgagactagaaagaaagatcgacattgcgcatacgaaagggttacgcatagaaatggtggaactactggaccaaaagatacttttaaacacgccagctgaaagacggcgtcttcttgaagaggttccagaaatcgttcctgatacagagtacagagaaaaggaaactgaactccaagttgcggcaagcaactcttctcaagagattagaggtgccaacacttgatttttttgtttcttaaagcacttttacctttgcatctgtttcacattcataatggtcccgaatacttaaatcgttacatgctcgatccaaatcgacttccacttcgtccgtgagtgtgtcgccgtcgacgatgtctaggtccttcacattccgacgacttcgcagttcattgacatcttcaccaagggccttccttccttggtgttctccgactttcggtccaaactcaatgtctgcagaagctagagacctagagtttcgactacggagagtgttagtgtatgccctatgagctgttaatgtatggaatcatttttctacaataaacaattatcagacaaccaatttgatttgtatgttcattcaacttttgatgtttccacaaaacaatggaaccagtccgggatatattttgtgcatatggattttatttagaacttgattaaaactaaagctaataaatgatggactgcttaaatgttttagggcggctagttatattgagtaactggaattctgaaaccattcgaacaccaaaaccataagatcattttgtcatctgggttgtgctagatactaataatctagcatggtgatgccaagaaactctgatcaatagcagtaaataagctcatgaagcctgcgtcagtggtggtgtcactcctgatcctgcactatattatcaaatggacgatactcaagatgatagcccgactcaagccatgaacattgaccaagatgaatgtgaccactcccggcaagttgccatgacaaggattaatgaagcagaagtcatcgatctaaccagtgatgacgaggaggatcctcgcacagtgcagcataagccagaaggcaaggtcatgcatgatccaactccatgggccatggatgggattcttcagccggagcagcgacagccagctcatgcagccatgaatggaattgtgcccccagagcagcacaagccagcacgtgcagcaacgaacggcgtgtcaccttggacgctccaatggcactacatagaccctcaaggagacacccgagggccattctcgctggtgcacctgttgcattggaaacgggggggcttcttcgacgagggcttccgagtgtggaggacggggcagacttctgagcaggctatcttgcttagagatgccttgttgcatctgcatctgtagcctgctttcgtcatcgatgcattctggatctcgtttccgtaaccggtttggacctcatggacatggactacctctagtcacctcgaggctcgagtaatgtggatgtactcccccgtggccctcgccacacacacaccaaacgaacaaacaaaaaacacacaattttagatttgaaactagtcaagctttcttaaatcagagtttactagccttcttaaatcagccggatgtccgcggccgctatttttagtttagctttgtcctacgatttagggcctgtttagttagctttgtctgagattttttctgagaatttggttgtcgagaaaactcgagtatcatggagattacgtgttgagaaagataaaagagtacatagaaagtgacgcttttctactgtcacaacggctcgaccaattctgtatttattttgattttggacgattttgactaaagtgattctcatagaaacgttgaaaagttgggtgtttaacagttcgagcttacttatggtggccaaaagttgaaaag

SEQ ID NO: 31241 - DNA, 2397 bp, Zea Mays
aaaaaatccatgtataatccacacatcaaaaacagataactacaaaattttgtttaaagactactgggaaggaattaaagatgcagaacatttgacattggttgacctggaagaagctagtgatattctgaacagaaagcttaactgtaaaggagcaactttagagagatttccagctgatgatcacaagttagatgaaaatacatctcctgataatggtgctaatgatcaaacaagatttccagctgatgatctcaagacacatgaaaatacatctcctgataatggtgccaatgatcaaacaatttcttttgactctgagggcaaacagattaaagcaaacacatcacggaacaacaagtcaaataagagaacctatgttgggtggggttccaaagagctaattggattcttgtcaagtttgggaaaggatacgtcaaaatctcttgatgaactcgaaattattggagttgtcaaggggtacatcaaacagaagaaactgtaccaggatgataagaaacttcgtttcttgtgtgatgataagctgcaacccctctttacaagaagaaaagtgagatgtaaaatgatccgtaagttcttggcagttcatctagcttcaaatgctatttcagaggatgaaagattttgtagttatgaagatgacgatgatgccttagttattaaaaagagacctcggaatagtctagggccaaagattgctaagagggtctcagaaagaagcaagagacattttgcgtcccttactcagaataatatcaacctaatctacctgagaaaaactttagttattagtcttttgaatcagccagacacatttgaacagaaagttattggctgttttgttagagtcaggtgtggcaaaaagacgcacagctatgaaatacctaaaaaggcatacctgcttggaaaagtaataggcatcaagaagtctaaaaatgaatacaagataaatgatacatatacaaaaattctcttatgtgttactggtttgttggatgatgtcagtgtatcgatgctctcagatgaggacttagaagaggatgagtgcgatgatcttatttctttggctgagaaaggactactggaacgggctactgttgctgagttggaggaaaaggtggcaactgtacatacagacatagttaatcatggcggctagttatattgagtaactggaattctgaaaccattcgaacaccaaaaccataagatcattttgtcatctgggttgtgctagatactaataatctagcatggtgatgccaagaaactctgatcaatagcagtaaataagctcatgaagcctgcgtcagtggtggtgtcactcctgatcctgcactatattatcaaatggacgatactcaagatgatagcccgactcaagccatgaacattgaccaagatgaatgtgaccactcccggcaagttgccatgacaaggattaatgaagcagaagtcatcgatctaaccagtgatgacgaggaggatcctcgcacagtgcagcataagccagaaggcaaggtcatgcatgatccaactccatgggccatggatgggattcttcagccggagcagcgacagccagctcatgcagccatgaatggaattgtgcccccagagcagcacaagccagcacgtgcagcaacgaacggcgtgtcaccttggacgctccaatggcactacatagaccctcaaggagacacccgagggccattctcgctggtgcacctgttgcattggaaacgggggggcttcttcgacgagggcttccgagtgtggaggacggggcagacttctgagcaggctatcttgcttagagatgccttgttgcatctgcatctgtagcctgctttcgtcatcgatgcattctggatctcgtttccgtaaccggtttggacctcatggacatggactacctctagtcacctcgaggctcgagtaatgtggatgtactcccccgtggccctcgccacacacacaccaaacgaacaaacaaaaaacacacaattttagatttgaaactagtcaagctttcttaaatcagagtttactagccttcttaaatcagccggatgtccgcggccgctatttttagtttagctttgtcctacgatttagggcctgtttagttagctttgtctgagattttttctgagaatttggttgtcgagaaaactcgagtatcatggagattacgtgttgagaaagataaaagagtacatagaaagtgacgcttttctactgtcacaacggctcgaccaattctgtatttattttgattttggacgattttgactaaagtgattctcatagaaacgttgaaaagttgggtgtttaacagttcgagcttacttatggtggccaaaagttgaaaag

SEQ ID NO: 31242 - DNA, 1331 bp, Zea Mays
tgggcaccacgttaaatctgtggattgaaagagaacttgtgagactagaaagaaagatcgacattgcgcatacgaaagggttacgcatagaaatggtggaactactggaccaaaagatacttttaaacacgccagctgaaagacggcgtcttcttgaagaggttccagaaatcgttcctgatacagagtacagagaaaaggaaactgaactccaagttgcggcaagcaactcttctcaagagattagagctcatgaagcctgcgtcagtggtggtgtcactcctgatcctgcactatattatcaaatggacgatactcaagatgatagcccgactcaagccatgaacattgaccaagatgaatgtgaccactcccggcaagttgccatgacaaggattaatgaagcagaagtcatcgatctaaccagtgatgacgaggaggatcctcgcacagtgcagcataagccagaaggcaaggtcatgcatgatccaactccatgggccatggatgggattcttcagccggagcagcgacagccagctcatgcagccatgaatggaattgtgcccccagagcagcacaagccagcacgtgcagcaacgaacggcgtgtcaccttggacgctccaatggcactacatagaccctcaaggagacacccgagggccattctcgctggtgcacctgttgcattggaaacgggggggcttcttcgacgagggcttccgagtgtggaggacggggcagacttctgagcaggctatcttgcttagagatgccttgttgcatctgcatctgtagcctgctttcgtcatcgatgcattctggatctcgtttccgtaaccggtttggacctcatggacatggactacctctagtcacctcgaggctcgagtaatgtggatgtactcccccgtggccctcgccacacacacaccaaacgaacaaacaaaaaacacacaattttagatttgaaactagtcaagctttcttaaatcagagtttactagccttcttaaatcagccggatgtccgcggccgctatttttagtttagctttgtcctacgatttagggcctgtttagttagctttgtctgagattttttctgagaatttggttgtcgagaaaactcgagtatcatggagattacgtgttgagaaagataaaagagtacatagaaagtgacgcttttctactgtcacaacggctcgaccaattctgtatttattttgattttggacgattttgactaaagtgattctcatagaaacgttgaaaagttgggtgtttaacagttcgagcttacttatggtggccaaaagttgaaaag

SEQ ID NO: 31243 - DNA, 1381 bp, Zea Mays
attagtatagtgtttcattttgatacttttaaacacgccagctgaaagacggcgtcttcttgaagaggttccagaaatcgttcctgatacagagtacagagaaaaggaaactgaactccaagttgcggcaagcaactcttctcaagagattagagggcggctagttatattgagtaactggaattctgaaaccattcgaacaccaaaaccataagatcattttgtcatctgggttgtgctagatactaataatctagcatggtgatgccaagaaactctgatcaatagcagtaaataagctcatgaagcctgcgtcagtggtggtgtcactcctgatcctgcactatattatcaaatggacgatactcaagatgatagcccgactcaagccatgaacattgaccaagatgaatgtgaccactcccggcaagttgccatgacaaggattaatgaagcagaagtcatcgatctaaccagtgatgacgaggaggatcctcgcacagtgcagcataagccagaaggcaaggtcatgcatgatccaactccatgggccatggatgggattcttcagccggagcagcgacagccagctcatgcagccatgaatggaattgtgcccccagagcagcacaagccagcacgtgcagcaacgaacggcgtgtcaccttggacgctccaatggcactacatagaccctcaaggagacacccgagggccattctcgctggtgcacctgttgcattggaaacgggggggcttcttcgacgagggcttccgagtgtggaggacggggcagacttctgagcaggctatcttgcttagagatgccttgttgcatctgcatctgtagcctgctttcgtcatcgatgcattctggatctcgtttccgtaaccggtttggacctcatggacatggactacctctagtcacctcgaggctcgagtaatgtggatgtactcccccgtggccctcgccacacacacaccaaacgaacaaacaaaaaacacacaattttagatttgaaactagtcaagctttcttaaatcagagtttactagccttcttaaatcagccggatgtccgcggccgctatttttagtttagctttgtcctacgatttagggcctgtttagttagctttgtctgagattttttctgagaatttggttgtcgagaaaactcgagtatcatggagattacgtgttgagaaagataaaagagtacatagaaagtgacgcttttctactgtcacaacggctcgaccaattctgtatttattttgattttggacgattttgactaaagtgattctcatagaaacgttgaaaagttgggtgtttaacagttcgagcttacttatggtggccaaaagttgaaaag

SEQ ID NO: 31244 - DNA, 1149 bp, Zea Mays
gttagatcaaaatgtccaaccctaatagtctcacatttttcctaccaaactcattgatcgctgctgccccacaaattcccttccaaaaaagaactaatcgaccaaatctcgtagtccaccacatccatcgtccatatactcatttccatagatcaacttacaccgttggattaaagtcatgtgtcgttagattaaaatgtgcaaccctaaatagctttatctttcttttctagtccatttattcgccgccgccgccgcaactctcacctctcctacatctctacttataaccacgacacccacagacacccttcttcatcccacgccttcatagatcatcgccggatctcattcgattctttcttgtctccatatctaactagttctagagtccgccatggcccccactacctccacccccttcaaatctagggtttgaggctacaagcggagagggataagtggtggaaacttgatgtccaaatcaatcatgagcccggggtacgggccatggaatcacttcatcgatcgaacacacgacgaatcagcaccctcaaaaatcagaagctggaacccctctaggcccatgggaagattggatgctgagaagaggaaggcgatcgagggttttgggactactcatccatgcaatcagatatagtaaggaagaaaccatgaagtcctctcagctgcaatgcggttgaataagcaagagacgatgttcactctatgatgcaaacaagagtaatgaccgagctttgtgatgctcttggtcaagatactaacggcagccaggtaaaaaaaacgatactaacggcagccaggtcaaaaagaaacgatactaacggcagctgctcctgtccagaacagagatggggaacaaagaaaaaataggaatagacttacacaattgcaacatagctgcagattgtgcttgttccagtaattagcagcatatattatttctcatcacgagtggtcaatatgttccgtttctatcccgctcttgatgctgttctgaagggtcattcttagcagttagcacagtcagccattcgcaaactcgcaacatgaacatgtaatgtatggaacactggtccttcaagaattctcattaaagatttaaaggcgtgtttgagaacaaagaga

SEQ ID NO: 31245 - DNA, 1386 bp, Zea Mays
atggcagagaacacaaaatccgctcgctcacaatctccatgcctcttactttctggtgctcttagtcttagccaccttcacctcctcatcgcgcttcacctttttcgcggccttaagcagcaagttcggtccatggaactcgccactcttcaggatgtcttcatcgtaatccttcctgtggagcatcagtatcctcttctccttctccctccgctccttgcagggttcgcagtcccaatgccccttgggcacctttcttcttggaggactgaggcagtagagatgatagccctgatcgcagcagtcacacaggatgatctggtcatcgtccgtgtcgcacaggcagacacggcagaggcaagatggacagtaccagcgctggctgcccatctgcacatcacttgcaatctgctcggtagtcaggcaactaatgtggtagtacttgtacaggcaaagatagtggtcacagatcaggaacctcttgtccacctcttcaggtcctccacacaccttgcagcagatcaacatagcagtacgggacagctccggaagttcagaggggtccatacttcagatgcctacaagagtgataacataacgctgagcaacgcaaaaagtctacccaaactgagatttataggcagctgaaaaaaagatttggtcagtaatgtttggtccataatccatctggcgaaactgaatatcaaaattgatcagccttttcaccaggggacccaaaatgtgccaatggaacaataccaaaacatggactaaaacaatatatgtaaacattcatcctgaagaaatcaggtgcagatgaaagtaagatgcaacaagaaacactgggtgatcaaatgctttccattatccagcttagagctgcaagatcaatccagggcgacattaatctagtcgaggaacaggtttttttcctttctttttctttttggaaactaatcaagcagtataaatgtcgattatgttaattaataaagaagaagaccgcaaacaacggcaccagagaagaaaaagaaatgctacaactaaggcaactcagccaacaacaaaggaacatgtttttgttttgtgaaacaatgaaattgctgaccaactccagataaaataagccactaggcagacaaaaaataaataaatatgattcatgaactccattcccccagacaaagctaatccctatttgagttattctacttcaactatcgatttccagagatctgtttcattctgccttctgagcaaaacattttgctaacacgcaggggcgaagctatgttcaggagagaggatgcacatgcacccaagaaaatttacaaaatcaatgttttagaccagattttgaccatatatgcaccacctataaatcat

SEQ ID NO: 31246 - DNA, 939 bp, Zea Mays
ttagcagatataccagattctaccatttctttcatgtttctctgttaaagataggaatgattagaaatggaagcaagcatactaagttaaaataattgtcctggacgtgtagcttgagtgaatggtcatcacacgggatcaatatactacaaaatagatagggatgacaatcttacccgcgggtgtgtgtatccacgagtttcctacccgatgggtgttggcatgggtatgaaatctcacccgcatgtacatgagggtcgggtacccgcaaatatacaggtagagtacacatatcaaattttacctgcgggtacccgcaatttgagaatatatatgaatatatatcacatgtcgttcgcatatcatgtggactagctcatttaggatatctacagtagcttacccattcacatacccatattcaaactccactctgcgaacaatgcagtctacagtgcaaaacagtgttttaggtaaccatatgggtgaactgctggacagtcttaacatgtaatgtgtagcatatgcaattatgcataacaatgtcgaactatagagatgatattttttggatggctaaataaagtgattgcgtgagctactaacttgttatgttagttcttgtgtaagttttttgtgttatttgtacgagcatgaatgaccgaattattgttctagttatgtattgtgacttgtgagctactgtatattgtcctagtgaactctacacaagtgacattgatatatttacatgatgtttaactatgaatttattatatcataccactatgactattatttgtcttaatatacctagcaggtatatttacatgttgtttagcaatgaatttattatttcataccactatgacttcattatttgatcactcttaatatacccgataggtacaagatacccgtcgggtgcgggcacaggta

SEQ ID NO: 31247 - DNA, 393 bp, Zea Mays
cggaccagatgggcccgcatgtgcggcgaacgctggctccaccgccactggcggtgccgcggcggtgtgcccggcctccttgagaagcttcttccacgacacgattgtggtctcccctggccgcagctccactgtgaacagctgcctctggcacggcgtcgcggcttcagagaccgcggccgcggtggcaggcggctgcgtcggagcgagagcggacggcgcagaggtgacgccaggggctgctgccaccgcacccggaaccctagctgcggcggcagcggcagggtcggtcaaggacgaggagggtaccgccacggggtcttccatggagaggctgggggaattgagaattcgagagctcacggcattagatcgaaggacctagggttttga

SEQ ID NO: 31248 - DNA, 1256 bp, Zea Mays
cggacagcgaggtgaagccaagttgccccgcggacgcaaagcatacaggccattttgccgtttccggcgcgcgcctctgaacaaacccgaaagcccccctcatcgccattcctcttcctgccatggcgatcctctttactcctcccctcccaccaccaccgcccctcccaactacaccacaccgcaccggcaccaccaccaaccgagcggctccaggctcctgctcaggaaggggagaagaggcgagccttccttgggaagtcgcaggaggagagaaggggaacaaagatggggcgcggcaagatcgagatcaagcggatcgagaactccaccaaccgccaggtgaccttctccaagcgccgcaacgggatcctcaagaaggcgcgggagatcagcgtgctctgcgacgccgaggtcggcgtcgtcgtcttctccagcgccggcaagctttacgactactgctccccgaagacatcgctatcaaaaatcctggagaagtaccagaccaactctggaaagatactgtggggtgagaagcacaagagccttagtgcagagattgaccgtataaagaaagagaacgacaccatgcagatcgagctcaggcacctgaaaggtgaagatctaaactcgctgcaacccaaagacctgatcatgatcgaggaggcacttgataatggactgacgaacctgaatgagaaactgatggagcactgggaaaggcgtgtgacaaacactaagatgatggaagacgagaacaaattgctggccttcaaactccaagatatcgcgctgagcggcagcatgagagagcttgagctgggttaccatcctgaccgggacctggcggcccagatgccaatcaccttccgcgtgcagcccagccatcccaacttgcaggagaacaattagactgctggatgccctcgttccactcgccgaggatttcacccagccaccaccgctggcttgtatgccctcgtgcgctggcaactgtatctttatctttccggtatgtttggatgaacgtataatgtgtgtcagtgtcggtcgcatgacgtgccgatgtcgtgcatctctctctctctctgccagagcagcggaactctgcaccgtgagtaacttaattggtaccgtatgatctgccggacagtgaatagtttatgtgagtgggtcaaaccataatgtgtagtatttgtgtcgaactgtcaatggcacgtatttggattttcactacacgttacatatgaagggat

SEQ ID NO: 31249 - DNA, 776 bp, Zea Mays
atacaggccattttgccgtttccggcgcgcgcctctgaacaaacccgaaagcccccctcatcgccattcctcttcctgccatggcgatcctctttactcctcccctcccaccaccaccgcccctcccaactacaccacaccgcaccggcaccaccaccaaccgagcggctccaggctcctgctcaggaaggggagaagaggcgagccttccttgggaagtcgcaggaggagagaaggggaacaaagatggggcgcggcaagatcgagatcaagcggatcgagaactccaccaaccgccaggtgaccttctccaagcgccgcaacgggatcctcaagaaggcgcgggagatcagcgtgctctgcgacgccgaggtcggcgtcgtcgtcttctccagcgccggcaagctttacgactactgctccccgaagacatcgctatcaaaaatcctggagaagtaccagaccaactctggaaagatactgtggggtgagaagcacaagagccttagtgcagagattgaccgtataaagaaagagaacgacaccatgcagatcgagctcaggcacctgaaaggtgaagatctaaactcgctgcaacccaaagacctgatcatgatcgaggaggcacttgataatggactgacgaacctgaatgagaaactgatggagcactgggaaaggcgtgtgacaaacactaagatgatggaagacgagaacaaattgctggccttcaaactcactacctttactttgatgcttaaatcacgcgtgccgca

SEQ ID NO: 31250 - DNA, 1015 bp, Zea Mays
ccgtggttgccatcgccgtctccactagaggtggatctacagtgtgggcaacgtgggtcataaccccacctcagattttataatattcataataccatagaagattagagggagcaggagatctcagccgccgagcgcagcgtctgagcagcggccacccattcgttgttcacccagggagtctcaggtcttccgtcggctggcatcggccaccgttccatcgcatcgccgaccgccgccccacatcccaccgcggcaccgccccacagacaaagagatattcaaatcccttgatgatgagactattactagaagattccagcgtcttaaaactagaagaatgcacttgcctcgagtcataactacaagattaacaacttagtgattggatttttgtcggtgattttggtgccgcactgcagattaagagagaaatttcgtcttgggcagttcggctgacagaccaacctacggcctggattggagacttatccgcgacccctcctccccacttcagcttcagcgcaagccatcttcccgccacaggctcaaaagcaatcaagcgactcctcccacagtcccacttccactcccacccacccacacgcacggccgcaggcagcagcaccatgtggtcggcagcaacggcggcggcggcgcgcgcggtgtccgtgtccccagtcccggcgccttcgctcctcagcggccggcgcggcgggtcgcggggcggccgggggtcggtgtcggtgcgcagcacggtgtgggacttcgtgggcggcgacctggtgcggccggacctgggcaagtggctggacgacgtggagaagcacaaggcgctggccatctacccgccgcacgagggcggctacgagggccgctacctgaaccgcctccgttaccagggctactacttcctcgacctctccgcgcgggggctcggcgacccggagaccacgctcaccaaggtccaccccgtctgcccggaacactcatcgttaaggtgagaggacttaag

SEQ ID NO: 31251 - DNA, 3032 bp, Zea Mays
ctttctcgctgcccccgccgccgcaaccgtccacccgcgccgcgacaaccacaagctgcgattcgccgccgcgacaacgcctcgatacatccaccatgtcgccgtcaatgctggttcgaacgggggatatattctccgccggcgacctcgaggtgccccccgcgcctgcagcaggatcgaatgtacgctgcaatctcccgaatatactccgcggcgcgtaggcgcctcgaggccttcataaccgcgctcccgggcagtcacgatggttgcggcggcagcaggaggggctcgcatcggcatcgccagcggcggcggtggagcagccctttcaggaccccgctgggctcgcctatgtcgatgtcctccatcatcggcgccgcggacgagcaggccacccccgcgtcgtcgggggcggcctacgccactccccagggcgagacagcgacaccgtccgtgattctggcgtcgccgctgccaccgccacagatggtcgtggtggcgctggacgccacgcgggaccaccgggatgacgagatcaaaacggcgttcaggaatttggtcgagcgaggagacatactccgcgcaagggattcgctgctcgtgctgggcgtgcttcactccatcacccatccaatgggctaccaaaccaaaccgtttactgaatcttttgtcgggacaagcgacagatacctacttgatcaggtggcgaacatagctgaatcctacaaaaataagctccaacaagttatagagatgctccacaatgttaagattactgtgaccctcaagataaccccgggagcacctgcaaaggttttcattatccatgaagtaaattccagcaaagcttcttgggttgtcctagataggcacttccggagagatttcaagcacttagaaaagcacatagcttgcaaagttgcgacatttcaggatcacttacaagtgcaatccttgaggtcaatacgaacaaatccatcaaacaaaagcacatatgaattggaggacctgcaacgttttgcggtcacgatggatctgagttctgaaacagtaaatggtgacactcgcaaggtatcaatcaggtcgtcgcctgtaagctaccttgcctctctgaacaagcacgagatccatgagacctccagcgtggctgcatgcagcatgccatacttcagtggcatgtctctcacaattgacgatatggaatccctacctaatgaaaaatacgaagataaaatgagctcccaatatgattcatcagaaaggccagttttgtgcattggctgcggtctaaaatcagttctgtacataaaggaatccatgaaattcccattctcggagattcaaactgcaacatcggatttttcaagtgaaaatttgctgggtgagggtggatttgggcatgtgtacaagggccagctcaaggatggtcaggtcattgcagccaaggtgcacaaagaagctagctcacagggttatactgaattcttctcggaagtgcaagttctcagttttgctcgacaccgaaatattgtcatgctgcttgggtactgctgcaaagaaagctataacatcttggtgtatgagtatatatgcaacaattctctcgagtggcatttatttgacaagtcggcaagcttattagagtggcacaagaggtatgctattgctattggtatagcaaaagggctgcgatttctacacgaggaatgtcgtgctggtccaatcattcatcgcgatttgcgtccaagcaatgtactcttgacgcatgactttgttcctatgcttggtgactttggtcttgcaaaatggaaggctggcggtgacaacatccagacaaggattctgggtcaaacaggatacttggcgcctgagtatgctcagtatggcatggtttctgtcagaacggatgtctacgcctttgggattgttcttttccagctgatatctggtcgaaagttacaatacatccgcacggtccaatttcaatttccaatacgtcaacaaaaatttcaggcagagccattggtcgaaagccttgcacttcacgaactaattgatgatcgcattaaagatacaaacgatacatatgggttgtatcatctagccaaaattgcatatctttgtgccaggccaaacccagagcagcggccttctatgggagaggttgttcgccttattgagatagaaactgaacatatcagggatttgtcacgacaattcatccctcatttcatgaagtgatgaaataaccgaaggggattttgtggtgtgagctgactactaaagtatctacgctgcatttccaccgggacaaagtaaactgaaatccatactctccattcttgttggtgatattgtaacacttggcagttcgctctcttttgcctttcttcattttcttcttccaaccatgtaaggctttgttcggttattcctatgctttatggattagaatggattggaaaaaaatatgaaggattttgacttgctatggatttaatcccacctaatcccttccaatccatatggattgataggaaacccaacaggccctaacagtgtgcacatggggttactgcaccttttttttcttgctcctttcttctctttgtaaatgaaacaccttcttctcagagtgttgccataggtgtctcctggccttgccacttttctagaatgtaatgccactgtgtaattgactggctgttgaagaatttgggaggacgcgaaagatgagtgatctagtttttgtagtgcgctatttcattgaaccatcttctctgacaaggttgatggagaacacttatatttattatactgcttatccagttagccacttagcccttcaacatctataccagcagagtgagcgacgctcatgacctaaaaagcaagggccttaattttcgccgcatgtaaactacacagttcatggacagaaagttctgaatatgataagacgttgaattatattgtcacttttttcctgatcacaattgaacgagtttctgcaaaaagtcgacagatgaaag

SEQ ID NO: 31252 - DNA, 1825 bp, Zea Mays
cgtgcccgggcagcccggccccgccacccgcacgccacgtaacccccgtccccctcctcgagcctcccgtcgcgtgtcctgcgttgcgcttgctatttatcacccccgtcctcctccgtcccaaggcagtcgcagttcacaactgcgactaaaaaccatctttggggcccttcgccgcgatttgcttcgcttctcggactaggttaagttgccttttcgattctcagaaaaagactggctctgcactcggataattttaaaatggatagtgcacagcagcccactggggaattgaacaattcgttcgatactcttatggtttctggaggtgaccagagtcgacagcctcaggatgctggcaatgaaacgagcttcacgaattggaaagacctccccatggagctgctcctgcgtatcatttcactagttggagatgacaggatagtcattgtggcctccggtgtatgcacaggatggcgtgacaccttggggtggggggttgcaaatctttcactatcatggtgccaggaccgcatgaatgacttggtgatatcactggctcacaaattcacgaagctgcaagttctatctctacgccagatcaggcctcagctagaagacagcggcgtggaggccgtggcaaaccactgccacgacctgcgcgagctggatctcagcagaagcttcaggctgagcgaccggtccttgtacgccctggcgcacgggtgccctcagcttaccaggctcaacatcagcgggtgctccagtttcagcgacgtggcgctcgtgttcctctccagccagtgcgggaacctgagatgcctgaacctgtgcgggtgtgtgagggcggcctctgacagagcgctacaggccatcgcctgttactgtggccagctgcagtcgttgaacctgggctggtgtgatggcatcactgacaagggggtgaccagcctggcttcgggatgccctgaactcagggccgtcgacctgtgcggctgtgttcttataacagatgagagcgtggttgcgctggcgaacggctgccttcacctgcgctccctgggtctctactactgccagaacatcacggaccgcgccatgtactccctggccgccaacagccgcgtgaggagtcggggccggggctgggacgcgacagcgaagagcggcggcggtggcaaggaccgggagcgggacggactggcgagcctgaacatcagccagtgcacggcgctgaccccgcccgcggtgcaggcggtgtgcgactcgttcccggcgctgcacacgtgcccggagcggcactcgctcaacatcagcgggtgcctcagcctaacctccgtgcactgcgcctgtgcgctgcaccctcaccgggccgggcgagtcatcctctccaaccacgcctactgaacgcaatgcgtgaataggcggcgatgctcagatgtgtggataggccgttcaaccgtgagcgacggtgtccgctgtttatgtgaggtgcttgttttgtgtttatcgtctgtaaaaacatggactgtatctgactatctgttgtcatgtcttttgagatctttagcctggactctggagcagcgcggcgacggcgatagccactcctttggtgggggctctcagactatctccaaaccctatcatactcttatttctatcctgttcgtttagtttaatccatatcggtttctactatagaggaacaaacagtcaaacgaacgagaacaaacagtctgtaaaagcagtctaaacagtcagctttagaaacgaacagtgttacagtttatttatagtgtaaaacagcctgcatgcatttgct

SEQ ID NO: 31253 - DNA, 1707 bp, Zea Mays
ccgtccccctcctcgagcctcccgtcgcgtgtcctgcgttgcgcttgctatttatcacccccgtcctcctccgtcccaaggcagtcgcagttcacaactgcgactaaaaaccatctttggggcccttcgccgcgatttgcttcgcttctcggactaggttaagttgccttttcgattctcagaaaaagactggctctgcactcggataattttaaaatggatagtgcacagcagcccactggggaattgaacaattcgttcgatactcttatggtttctggaggtgaccagagtcgacagcctcaggatgctggcaatgaaacgagcttcacgaattggaaagacctccccatggagctgctcctgcgtatcatttcactagttggagatgacaggatagtcattgtggcctccggtgtatgcacaggatggcgtgacaccttggggtggggggttgcaaatctttcactatcatggtgccaggaccgcatgaatgacttggtgatatcactggctcacaaattcacgaagctgcaagttctatctctacgccagatcaggcctcagctagaagacagcggcgtggaggccgtggcaaaccactgccacgacctgcgcgagctggatctcagcagaagcttcaggctgagcgaccggtccttgtacgccctggcgcacgggtgccctcagcttaccaggctcaacatcagcgggtgctccagtttcagcgacgtggcgctcgtgttcctctccagccagtgcgggaacctgagatgcctgaacctgtgcgggtgtgtgagggcggcctctgacagagcgctacagatgagagcgtggttgcgctggcgaacggctgccttcacctgcgctccctgggtctctactactgccagaacatcacggaccgcgccatgtactccctggccgccaacagccgcgtgaggagtcggggccggggctgggacgcgacagcgaagagcggcggcggtggcaaggaccgggagcgggacggactggcgagcctgaacatcagccagtgcacggcgctgaccccgcccgcggtgcaggcggtgtgcgactcgttcccggcgctgcacacgtgcccggagcggcactcgctcaacatcagcgggtgcctcagcctaacctccgtgcactgcgcctgtgcgctgcaccctcaccgggccgggcgagtcatcctctccaaccacgcctactgaacgcaatgcgtgaataggcggcgatgctcagatgtgtggataggccgttcaaccgtgagcgacggtgtccgctgtttatgtgaggtgcttgttttgtgtttaggcgtcaaggcgtgtacttggggtctctactctctagggaaccgtgtagaagcaaccgagttgagttcatcgtctgtaaaaacatggactgtatctgactatctgttgtcatgtcttttgagatctttagcctggactctggagcagcgcggcgacggcgatagccactcctttggtgggggctctcagactatctccaaaccctatcatactcttatttctatcctgttcgtttagtttaatccatatcggtttctactatagaggaacaaacagtcaaacgaacgagaacaaacagtctgtaaaagcagtctaaacagtcagctttagaaacgaacagtgttacagtttatttatagtgtaaaacagcctgcatgcatttgct

SEQ ID NO: 31254 - DNA, 2631 bp, Zea Mays
cgcttctggagacgtgaatgctttcctccctaatttccgttatatttgcacccatcacaagctccccatcgaacccttcccgtctccaaccgtcgccatctccatccgcaatttaaccactcggccgccgctgagtcagagtcagtagcgagaagcagagcggctctgctcctctcggtcatgcggcgcccacacaacgccgtccaaccatcagcaatgcctcctgcagttggactccttcccctcctcctcctcctcctcctcttccatctccccgtctccctctgctcccaccaccaccatcacagcaccccacccgcttctccgtccccgtccccgtccccagcaccctcctccgcgccgctagcggtgctcctggcctgcaacgccacccggttccagccggcctgcgtctccacgctctccggcgccgcgcccgatgcctccaccgccgacctcctcgccgcgacgctctcggcgctccgcgcccgcctcccgcccgccgtctccacggccaagtccgtgctggcgtcctcctccaacgtgaacctctccaacgccgccaccaactgcctcacgttcctcgcgctctcctcccgccgcctctcgccgtccccctcggcgccgccgctgctctccgcctccacggcgctgctccacctctacgactgctggtccgcgtacaagtacgtcaacttctcccgcaccatctccgacgccatggcctacctcgacgacaccatcaccgtgaacagcaactacatctccatgctcgccgcgcggcagcggtacggcgacgagacgtccctctggcggcccccgcagacggagcgcgacgggtactggcccccgcccgccgcgagctcgggtgccgacgtggacgcgctcggcgtgcccaagggcctgccggcgaacgcgacggtgtgcggcgccgggtgcgactacaggacggtgcgggaggcggtggcggccgcgccggactacggcgacggcgcgttcgtggtgcacgtgaaggagggggcgtacagggagacggtgagcgtgccgtgggagaagaccaacgtggtcctcgttggcgacggcatggggaagacggtcatcactggcgatctcaacgctgacacgtccggcgtgtccaccttcaacaccgccaccgtagggcaaggcatacttgaagttttatagcacgttatgcagcaaattcccttcaaaagacgtcaaaagcaagaacaggaatcgatgaagcaagcaggtagattcaggcactatcagtttacagatgccattctgatttggacaggatgcataaaccattctatacatgcagaaatttcgttctaagtgtatagtcgcaaagaggatttacattccctgttttttttcttcttgttgtatctctacttctacaattttgtacgccctccttattctagtaaatgtggcaaaaaaattagttgcacaatataccaaactatatacctggttgaggaccagaataattgcactggaacatcgggacatacttgtacgctggtgcaacataggagcatcgtggctaacaactagataaatacgagtggttagtaccggggtatgcaatgcatagatttcaggcatgccactacacataaaccaaaacagtcaggctccacggttctttgttgatctgtcgacaaaaaattcccccgaggcaagatatcatgcgtcaattccgggaccagggtaagctgggagactcattatcctcttgtcaagcacaggagcgcccactgtaaaatggtacatgctctgaaagtccaaacctttcaagccaagtgcctcgtgaactgcacagaaattctagaaaattagaagctatcacaacggacggttaaactactaccaattctctgactgactggaaatatggagaatactactacatcgggtattaataattaacgtttcagacagccatgtttgcctgcatttagctgtactctgttgtctgaaacgtcgagatacaatgaccagagggcatattcaagatgtcatcatgaattataattaagaaaaagtgacattgtgcttcatgatggcaagaggaccaatcaacttgggcatgaaaatcgagcaatgtactgcaaatatgtatcgaatgccaacccatgttcttcatgggcaaaaactaaacattttgcatgtaacattgtacaaaatattagatgaaagaattgatcaaccaggtagttgagatgatgccatgagttcttaagatggacagctgaactattaggaaacataaaaaaaagcatagccatatgttcaagcattgaaataaatttgtctttcatcaaaattctcagaaataggtgtaaatgacatagtgtgtagaaattgacgagtcctagtggtgagacaagcgagttgggtgcataggggtatgtaaaccttttttgtttcatgacatttgacagtgattgcgcgtaataactagttcattgtctgttgacttttaattcacacaaggataagaaaagctagatagcatcacgtgaaggggattaaaggtataaggagatagacaatggatgaaatagaacgtttggattatggcaattattcttgcttgattcaaaatatatacaaaag

SEQ ID NO: 31255 - DNA, 1115 bp, Zea Mays
ctcaactctgtcgtgcactccatcgcacattcacgtgctaagaccaactccagcagactccctctccgtatccctaaaacgcacggccaacattttctctctccgtatccgtctccgtttccagcagactctgtatttgcactctgtatttgcactccgtatgcagtctatgacacctgggcccgcgagcagccgcgcgcgcatgcagtgagctgcggagaggagagagaaagcgtgtaaagggggagtgaaggcgtgctggcggacgggttcatggcgcgtgacctgacgatcgcgaacacggcgggccccgacgcgcaccaggccgtggcgttccggtccacgggcgaccgcacggtgctggacggcgtggagctgctggggcaccaggacacgctgtacgcgcacgccatgcgccagttctacacccggtgccgcgtggcgggcaccgtcgacttcgtcttcggcaactccgccgcggtgctccacgacaccgccctcgtcgtgctgccgcggcagctgcggccggagaagggcgagaacgacgccgtcacggcgcagggccgcaccgacccggcccagcccacggggatcgtgctcagccgctgctccgtcaacggcagcgaggagtacatggcgctgtaccgcgagaggcccggcgtgcaccacgtctacctgggccgcccgtggaaggagtactcccgcaccgtgtacgtcgggtgcacgctcgcggagatcgtgcagccgcaggggtggatgccgtggaacggggacttcgcgctccagacgctctactacggcgagtacgacagcgccggccccggcagcgccgcgggccggagggtggcgtggagcagccaggttcccaaggtccacgtcgacgcgtacagcgtcgccagcttcatacaggggcacgagtggatacccagagtgtagtgcagtaccgcgtaacaactgtagagaatgtatttaccagcaatcgtgtcccacaattgacacggtgtccctggtgttgagcttgagcattgcagttactcctaataatacggagagagcaagtcaaagacatggaaataataaacctaccgcgataacgatcgcaacggacaagaaca

SEQ ID NO: 31256 - DNA, 1362 bp, Zea Mays
gccgcggacacccccgccaacaagtacgccaggtgccatttcccggcgcatgattgccctgcactagctgtggcctgtgggggagtgggcacgtgaacgcgcaacgcatgaaggctggagatgtgagcctgtaataaagcggtctctatgtacgtgcctatcgctggggcctggggagctggaggctggagctagatcggcatgcaggcgaagtcgttctcacgctagtggcgttgctgggctcaactacgacaacaagatttctgtcaccttttctgcctgtcgcaatgagctaactttgcactgggatatatgagaaatctgtgggttcctccttccagcttgtgtttgcaccgattgatgagcattttccggatgatgctccattgatttcctctagctttcgtgtcataccacttgatatgaaaacagatggtgtatcctctggtaggacactagatttggcatctagtcttgatgtgggttctgctgcaccccaagcctcaggggatgcatctccagatgactgtaatttgagatatgtgctgacaatcgcctttcaattcccttatgagacgcaccttcaggacagtgttgctactatggcccatcaatatgtgtgtagtgttgtttctgctgtgcaaagggtgtcaatggctatatctccctccaaatctggtctaaatgatgggcaaaggatgctttccggcttccctgaagctgccacacttgctagatgggtttgccagagttatcactaccatctaggtgtggaaaccctcttcgctagtggaggtatcgaccatcactcgtcactgtaacacgatagtgatcgacgatcgtgagcttccatgttatgtgttctgatacttgagacttttattatgactatgtatgagatattgtctcttattagtactggatgagatgtgtcttattatgactatggatgagacttttgtgatgtaattgatgagactatggatttaaatattgttatgtgattgtgtgtgagatgttttatgtgaaaatatgttgtgctatatagctgttgatatatttgttatgttgtggaatgtggtgtaaaataaaaataaacaacatttgtaatgctggtcaaattaacttcctagaggcttattaagtcgtaggaagttagccagctaacttcctaggggctacagtaagctgtaggaagttatccagctaacttcctaggggctacaataagtcgtaggaagttagccagctaacttcctagggtctacagtcagccgtaggaagttagtcgtaggaagttagtcagctgacggcgctgacggcgtgaagctactaacttccgagaatctactaaattccgag

SEQ ID NO: 31257 - DNA, 1799 bp, Zea Mays
gccgcggacacccccgccaacaagtacgccaggtgccatttcccggcgcatgattgccctgcactagctgtggcctgtgggggagtgggcacgtgaacgcgcaacgcatgaaggctggagatgtgagcctgtaataaagcggtctctatgtacgtgcctatcgctggggcctggggagctggaggctggagctagatcggcatgcaggcgaagtcgttctcacgctagtggcgttgctgggctcaactacgacaacaagatttctgtcaccttttctgcctgtcgcaatgagctaagctaatcatccctccctgccgtgccgcgcattgtgtttttgcctttcaataaagaacatcatacttggtctagtagcagatgtctcggacaaaatttatttaacgtttaaatttaaatcgctcggttatagtaataatcaagagatatgttttttgtgtaattaatttcataatagtttacaggccgtttaggtaaacgtgaacttatttttgacactttctgtgtaacatctccagccttcatgatgaacgtgaacttatttttaggtaaaacgtgaacttatttttaacttattcatgttgtccgccttgaaggacaacctcttactcatgatgaagcccttctttcaagggacatccaccttctccagtaaatatttgagccccatctattcttttgattcgaaattctgcaccgcctctcactgaaccaaaagctttgcactgggatatatgagaaatctgtgggttcctccttccagcttgtgtttgcaccgattgatgagcattttccggatgatgctccattgatttcctctagctttcgtgtcataccacttgatatgaaaacagatggtgtatcctctggtaggacactagatttggcatctagtcttgatgtgggttctgctgcaccccaagcctcaggggatgcatctccagatgactgtaatttgagatatgtgctgacaatcgcctttcaattcccttatgagacgcaccttcaggacagtgttgctactatggcccatcaatatgtgtgtagtgttgtttctgctgtgcaaagggtgtcaatggctatatctccctccaaatctggtctaaatgatgggcaaaggatgctttccggcttccctgaagctgccacacttgctagatgggtttgccagagttatcactaccatctaggtgtggaaaccctcttcgctagtggaggtatcgaccatcactcgtcactgtaacacgatagtgatcgacgatcgtgagcttccatgttatgtgttctgatacttgagacttttattatgactatgtatgagatattgtctcttattagtactggatgagatgtgtcttattatgactatggatgagacttttgtgatgtaattgatgagactatggatttaaatattgttatgtgattgtgtgtgagatgttttatgtgaaaatatgttgtgctatatagctgttgatatatttgttatgttgtggaatgtggtgtaaaataaaaataaacaacatttgtaatgctggtcaaattaacttcctagaggcttattaagtcgtaggaagttagccagctaacttcctaggggctacagtaagctgtaggaagttatccagctaacttcctaggggctacaataagtcgtaggaagttagccagctaacttcctagggtctacagtcagccgtaggaagttagtcgtaggaagttagtcagctgacggcgctgacggcgtgaagctactaacttccgagaatctactaaattccgag

SEQ ID NO: 31258 - DNA, 2082 bp, Zea Mays
cttcagcttcccaatagaagataaaaaaatgtgacgacgctaccgaggccacaaatcgactaatctagaagcggccaaccagggaggcgacgctgccaccgatagcagcagtgacgctgcagcttcgccctccacatcctctcgcgaccgccgacgacaacgacgccgcagctgcctccgcatcctctcgcgaccgccacttttccagttaggattcaaggcgtacattcactggaattggatctttgagtgaccagaatcataaaggatggtagttaaaacacttactgaattgtctctgcaagacaaagatgtaaccgttcaggttgaagtcaacagaagatgggaatttagaggaattggcgatgatggtcctgttttacatgttgacatgattctaacagatgcaacgggaaatgcaatctatgctgaattacctgccaaattattggaacaaaaaggttcattgttacagtcgaacaaagtgtactacatccgacgctttcgagttgcaaatgcaaagtcacaatacaaagttatcgatgcccctctcatgatctacttcactgtttattcgataattgaagtttgtcgtgatcctccatctacatttccactttacgtgtataatcttattccatatgaggctattgatgcaaatggaccaaagagtaaagacttccatgacatacttggaatgatcaatgaagtttctgagataaatccaatacaactaagcggaaagtcatctatctaccggaatgtgttcatcaagaacctcagtaatgacataattaaagttactctttggggaaatcaagctctaaaattttcatatgaagctatatatgatcagaaaatacaacatgctgttgttgttctatttgttggatgcttaccgaaggaatacaaaggatctgtatatctaagtggtggtgcagcttgccactggtatttcaatccatccattaatgaagctcaaccatactatcaaaggattcataatgaaaatgtaacaatcaagctccctccactaacgaacgaacaagcggcgtttgttaaccctcctgaaacacaacacaaggatttaaaagagctattagagtctgaaccattgacactaccagaggaaggttttaaatgcactgtaaccattacaagattgcttgatgatcatccatggtggtacaaagcatgtaatacatgtccaaacaaaccatccatgcggtcatcagtgtcatcatgtcctacatgtggctcgacagatgctattctaaggtacaaactcaatttcatggctactgatgacattgctgaaatgcggatgttttgtttcgacaatgttgctaaaagaatcattggaaaaacatgcacttctctcctaacatcagttacagatacctcaaatatccctcctgatttagcagccattgtgtctctcaaattcacattcgtagttgtttataatctaatgtcttttcaaaatcaagaaaaagaactcctaatcaagtcagtcatagcttcacatggaagagacctatccttgccatcaaccaaattgagcattccaatgcatccgtcaactccaacaaaacttctatcgagaacaagacagacaatttcaccctctacggcattgtccaacctatctacatccagttctctagagcaacatagcagttttgaagctgaagacagtcttgaagaccaaaatccagagtcttttgaatcgccaccgaaaaggactaagcacaaatctttaagattcgattgcggtgaggatgcgactaacaaggataaatgatctattgtccatggaaacaaaatgatggggctggtgttcctaatattagtcactaagcgcaccaacttttgtctaacatagatgtttatgtcttatttggaaaacagtatccaaatattttttgtctatgcatcatagacttaatgttgtcgaagacatactgtttgtacgtacgtcgacacatcctatgatgaccatattatgtaatgagcactactatctttatatgctaatcatattacgtaataatcactactatctttctatgggacgctaat

SEQ ID NO: 31259 - DNA, 1909 bp, Zea Mays
ctggaattggatctttgagtgaccagaatcataaagcgtatgcattttgggctgattgtatcttacaaagactcgcagatgcaccttctgttaggatggtagttaaaacacttactgaattgtctctgcaagacaaagatgtaaccgttcaggttgaagtcaacagaagatgggaatttagaggaattggcgatgatggtcctgttttacatgttgacatgattctaacagatgcaacgggaaatgcaatctatgctgaattacctgccaaattattggaacaaaaaggttcattgttacagtcgaacaaagtgtactacatccgacgctttcgagttgcaaatgcaaagtcacaatacaaagttatcgatgcccctctcatgatctacttcactgtttattcgataattgaagtttgtcgtgatcctccatctacatttccactttacgtgtataatcttattccatatgaggctattgatgcaaatggaccaaagagtaaagacttccatgacatacttggaatgatcaatgaagtttctgagataaatccaatacaactaagcggaaagtcatctatctaccggaatgtgttcatcaagaacctcagtaatgacataattaaagttactctttggggaaatcaagctctaaaattttcatatgaagctatatatgatcagaaaatacaacatgctgttgttgttctatttgttggatgcttaccgaaggaatacaaaggatctgtatatctaagtggtggtgcagcttgccactggtatttcaatccatccattaatgaagctcaaccatactatcaaaggattcataatgaaaatgtaacaatcaagctccctccactaacgaacgaacaagcggcgtttgttaaccctcctgaaacacaacacaaggatttaaaagagctattagagtctgaaccattgacactaccagaggaaggttttaaatgcactgtaaccattacaagattgcttgatgatcatccatggtggtacaaagcatgtaatacatgtccaaacaaaccatccatgcggtcatcagtgtcatcatgtcctacatgtggctcgacagatgctattctaaggtacaaactcaatttcatggctactgatgacattgctgaaatgcggatgttttgtttcgacaatgttgctaaaagaatcattggaaaaacatgcacttctctcctaacatcagttacagatacctcaaatatccctcctgatttagcagccattgtgtctctcaaattcacattcgtagttgtttataatctaatgtcttttcaaaatcaagaaaaagaactcctaatcaagtcagtcatagcttcacatggaagagacctatccttgccatcaaccaaattgagcattccaatgcatccgtcaactccaacaaaacttctatcgagaacaagacagacaatttcaccctctacggcattgtccaacctatctacatccagttctctagagcaacatagcagttttgaagctgaagacagtcttgaagaccaaaatccagagtcttttgaatcgccaccgaaaaggactaagcacaaatctttaagattcgattgcggtgaggatgcgactaacaaggataaatgatctattgtccatggaaacaaaatgatggggctggtgttcctaatattagtcactaagcgcaccaacttttgtctaacatagatgtttatgtcttatttggaaaacagtatccaaatattttttgtctatgcatcatagacttaatgttgtcgaagacatactgtttgtacgtacgtcgacacatcctatgatgaccatattatgtaatgagcactactatctttatatgctaatcatattacgtaataatcactactatctttctatgggacgctaat

SEQ ID NO: 31260 - DNA, 3105 bp, Zea Mays
atctgtcacacccggttttagaaggcaaaaccgaatgcgaaccatgtacgtgtcaggatcagcaattcacgtacacagcagttacataattggacatcatcacacagtgctcaaataataacataaaaggggaataatagtcgattacatcataatgtcggagacatccacatagtctttaataataatcaaagtgcgaaaacgaaacgtagatacacgcggccttcacaggcagccgactgggggttgccgctaacccacgcctagaactcgtcgtaatcttggaactcctggaagtctccttccacggcttcatcttcttctgagcagtggttgcaatgcggacaacctggggaagggggggggggggttggtgtgtagagcaagggtgagtacacatcaacatactcagcaagtgtcctgtttggctgtagtggactagctctatatggggataagtcaagcagttgcttttagttggtcagattattattactagtaaagagagccagattttagtattaacccaagtttttaacccaaaagtaccctttccaaacggaaagaataccacttaccatcaccagagtcaataccaaaaccaccattctcatcgtcacttgtaatccgaacatctctgatcaagtatcactaatcaatggagctcccttggtcgctcataaccgcgagcacgactgatatatcagttttcaaacactctgcagaagttgcgcactttacccacaagccgtgattccctttctgcccggagatcatgactctccattgatcactaccaaggtgacccagcagggtatcactacgtagcctttacaaagattccccggggctgtagccgcccgttaggtttcctaaatgtaccgcactactccccaaggggcaaaccaaccttggtagagcgagccgcatacaccgagccccattaacggcacgacggtgaagtaaactacatcctggttcctctaattattcagctaagggcgtcccatttcaccctcatggttgcactgttctcccgggcggtcatccaacgaacaggtccttacggagaggcactcgagaaactgctcgagcccccttaaattccataagtatatcatcataaataagaagggaaacaatgtatcatagataaatctcatcatattcattaattaatgttaagcactagcataaagctaaaccataataatccaacccaaataggtaagcaaggacatgaataacaaaagctagtcaatctttaggtataactgtgtaaatgcgggaagtgaattatagaattgtataggacatagttgggtcaagggacacttgcctccaccaaccagctactgctcaggggcttctcctgcgagttcttcggactcctcaaccagaccgttttctatgcgagcgcaaacatacatccatccatttgaattaggaaataaacagtacaccatactagagagcagataaactgaatatgcataagatatgacatacggttttgcattcgcaactgctagaaaaggaagaaggaaggtcttgcagtggtcaaagctataatcgaagcgtattacgggtagatgtataattaatcattgcttcatctagttctatctagttatactaacaagtattaataacatgtgctactagagttataactatttccaattggttgacattaaacaaagtcaatgattaactacatgaaataactaacgtaatcaatttctgagttgagtttccatttcattaatataaataacatgatcaatgcgcataaaatacacggggggtagacatgcacgtccaggggtagacgagcacgtcacccacgacaggacgctacgcgtcgtgccgtgtgacagccctcccaagttatcaggcccacatgcaccaatccttgccttaatggcctcagatggatgtgcacgtgtaccgggtaacttaacaaggctatcgagttcgccaactggaactcatcatcccaaggatctcccacataacaggtatattacagtaatcacatttgatacacacacattggagatagagcggaagactttcacaaagtacactttacattccagaactcaagttttacatggtagaaagcgatgtatttattacaagtcctgatagtactcgaagggcataacttaactacaataattggaagggtgaagcctttccataagagatatatataaaaaccttctaagcttcaagtcctccacatgaagtaactaacccaaagataggggaataaaacttctcctacaaaaacaacaagggataaaaccctgagtatgcaattactcagcaagacttacccgactaaagaaaagactctcaaggatatgctggtttgttgggaatcaaggtaaggcttgtcaaatttcaaagactcattttgcagaagagcttactagtagtgaatctttatgccaaacttttacttcacaagttaattatttttcctgaatctagatttgcctaatctagagcattcacttgtcctatactagcttcctttcaaccaaaccacaatcatgtttcacttattaaactacgatgcagggcagtgatccagtcttcatatccgagaagtacgatgatccgaaccgattaatacccagctggggatctccaaccacacgacatatgtagcacttaacccttgcatatgtcaaccattcccatggatcctccactacatgaacaggtccgcgctacccgggagcacattaccctaccatccagcctcttgccaggaggataactgctactcccaccatctcccacgcccagtgcgcggttgtcttttcacgtatggaatagccgggttcaggcttacccatggtgaggtatgtggccagttaaagggtcctagatcagcaggccaacaatcggtacggtccttaatcgactcagacgaagacactacatcgagactcctttctcgtgcaagtcaactgcccgatctcagctttattattttcaacccaaagtttggtacctggcagaggtacatcttttccgacgttgaacccatcccggccgtgatggatccaccatcaagttttatttttg

SEQ ID NO: 31261 - DNA, 2374 bp, Zea Mays
cggacaggccgcgcgagtgcgctacgattcacactgccaacgtgaagaagacgaagcagacaagatctcgcgcggaagagcgcaaaagccataaacgcctccctcttcgtcccctcctgatggagctctggccgtttcaaaaccccctaccccctgcccggtgccacgcggccgcgtccccgcagcctcagcccccggcccgcgtcgcctcgcgccggacgccgcgctgcttctgatttccgaccgttcctactcggtgtcggccggattccctagtccttgtcgtacgggagggtgcggtttcctggcgcggatgtaagtgaaggccgtggcaggggcagggaaggaatgcagaggtcgcggcgagcccttctgcggaggacggcggcagcccaggagcagagcgctgtggcggaggctgccgctaacggaaggaggaggcgtttgtacggcttctccgcctccctcgtcgtcgcctcgtgggtcgccgtgctcctcctccactccctcgtcggacacggcgacggtcaacgagatggaggaggctctactgtagatcttactgttgtagagcctactgtaaatgttggtcctattaatccggttgtacaggaagagcatggaggtgatttggagatgccaggtgatagctgtgttaattctgacgaaaacgctgtgctttcagaggatacactggtgcaagcagatcaattgtgttccagtgatgaggtgcagaatgagaacacagaagctgtaaccatagacagtcaggttgagctttcaggagatcagggtgggtatcttcctcagtcgggtgttgattctggagttcaaccaggggagaaggtagagagtaaagatttgcctagaccaccgagactatcacgggttgctcctcctgatctcgatgaattcaagacaagagcaattgctgaaaggggacctggtatttctagtcaacctggtaatatcatccaccgaagggagcctagtgggaagttgtataattatgctgcagcttctaaaggggccaaggttctggatttcaataaggaggctaagggtgcttccaacatcttagataaagacaaagacaagtacctccgcaatccttgctcagcagaggggaagtttgtcatcatagagctttctgaagaaaccttagtagatacaatcgcaattgcaaattttgagcattattcttctaatccaaaagaatttgaactgctgagcagtctgacatatcccacagaaaactgggaaactcttggaagattcactgccgcgaatgcaaaacttgctcaaaatttcacttttcttgaaccaaagtgggctagatatttgaaactgaacttggtaagccattatggttctgagttctactgtactctcagtgtgcttgaagtgtatggaatggatgctgtagaaaagatgcttgaaaacttgattccagttgagaataagaaaacggaacctgatgacaagactaaggaacccattgagaaaatttatttgaaagatcctgctggaggaaaagaattctcacaggaaacccttgatgaagatgaatttgaactagaagatgataaaccaaacggtgattcattgaagaatggtgctaatgatccagtttcagaggcaaggacacttcaggctggcaggattcctggagatacagttcttaaggtgctaatgcagaaagttcaatctcttgatgtgagcttctctgttttggagaggtacctagtggagttgaacagcagatatgggcaaatctttaaggatttcgatgccgatattgatagcaaagatgtcttgttagagaagatccaatcagagctgaagaatcttgagagcagcaaagataacattatgaatgaagttgatggattcctctcatggaagttagttgcttcctcgcaactaaaccagctggtcctggataatgctctactcagattggaatttgaaatatttcggcaaaaacagactgacatggagaacaggagtcttgctgttatatttctcagttttgttttcgcttgcttagctcttgctaagctgtctataggcatcatgtccagattttgtagattctataactttgaaaagttccataattccatgttcagctggctccctggcttgtgcacatggcctcaacactggactgctcttaaaggcaccattgcgctggttttcagctggaaaggtgtcgctgataacttcagtcagcagcactcagcggcaaagtcaatcccgaaaatactgcacaattgtgtgaagtgaaatctactcgtgctggagctctttgagttggttgatatttgagacttgagaccgtagttggtttgcagtaggttgctgtggtttt

SEQ ID NO: 31262 - DNA, 3082 bp, Zea Mays
atgccgctgctccgcctccgcctggcctctcctaggtcaggcctccccgccgcgctcgatgggtccgcggtctccgtccacttccgccggatgtccgtgttcgcctccacccgccccgtcacggccgccctcggtgccgccgcgttcgaggaggtgctcacgctgcggtccccggtctacttctcccgcggcgccaaggccgtcgtcaagtacgagccccacgcctttgctgtctccgtcgccgcctccactctcgacctcggtaagcacgaggtcgacctcacccgcctgctcccgctctcattcgaggatctcgaggacggcggcgactccggcttcgggaagtggagcaccagcttccggctgtccggccccgtccgcggcgcgcggcttaacgtaaccttctcttgctcgctcctcgcgggcggcggcaccagcgagcagcacaggggcggggaagtggcggggctgcggcgcggctcgatggcacgggcagtgtcagtgcaagcgccgacgcctttgcccgcgcggagcaggggcgtgagggttctccacgaggtgctgcccagcttgaggtctgccaggccggtgccttcttctgttgctgacgggggtcctgatgcgaggaaggaggaggtggcagcaccggactgcacggaagaggggtctccggaggcaaagcactgcacatcggtagaggcaaagtgtggcacagttagccgcgaaccaaacatgcccttcgtgcgtccagatggtgattggggcacggtggagttcaatgttgttgagcatggagttgacttaccgcttgcaccttaccagtcacttaccagccaagctgcgtactgacggaacgccttgagcgagagcgaggttgcgctccactccactccactccactagccagttcagttcttgcttcctgctcctgtcgtggtgccctgagtccctgactgcgaggagctagctatgcatccctgccgtggccgacgaactgcgtagcctgatcaaataggtaccgaatatgttttctcactttggttttgatgctcttctgtttcggattattgggatgtctttgtcatgttgaatgctgggtttcagttttacaactacattggtgtagcctgtgttcgtcagctttagtggatagttaatatatttttttttttgaacaaaatggcacctgaaatgtttcaattttcgcacgaatgtttaatagcgagtttgtgtctcaacctttgcatgtaaatatgtgcgttcgtggcaatgtacgggcacagtactagtgtatcagttaagtccataaacatggtatgttgtatcgtttttgacttcgaactctcgttagtgcgctcaaatgtgtcacgccacgttggcatgcagttactttgagcaaacctgattacccatttttcttgttttaaaagttcatagatcgtggatgcattttaccctataataaaaataacgagtgcatgtagtaaattgtcatattgcatcagttgataagttggtatctccagtgcaacttgcttgagtagttgagttgttgccaacactcaaaacactccacttgaaccacatattcttaaacattactagaacatcgaagagacacactacgcttacacaccttcgtggaagaataattgaatagccccaataccacagtaatcgtgatctataaaggacaacaacatgccgttcaaggtgccatgtagtattaaaggtattttcagttttactactaattgtttttctttagtttatttcgacgaacactgtctttgactgtttttttttggtattttatcgaccttttagtaacccgagcattgtggttgtggacttgttggtactgggtaggcaacgaaacacttgggccccaatgctatttccggctcgtcggcaaagccgaatcaggccagcgcgctggccaaatggcgcgagaacggaaacaaccagacctgtatgagatgcgtgccttctttctccgaaccgaacgcccactcctcctcgacgcgcctctggaccatgtcgaacgccagcagcttccacggcgaccacaggtacaccacctcccgctcggggtggaacgccatgaacaggaacgtgatgggctgggacgcggcgccggggacgacgtcggcgaccccgatctcgtgcttgagcgcccactcgcctccggtggcgtccctgagctcccagatcctgaggcgcgctccgtcgctggacgcgaagcgcaggcggccgcggcagtgcccggcgcgcgcccggcagctgacgggggccgggagctcggtggccgcggacgccatggtgtccaggtcgacgcggacgacgtggcccgagtaggccagcacgtggagcgcgccgccggagtagtgcatggtggcggacatggcgtcggtgtcgaggccgaagtcgacctcgtggtcggtccacgcgccgcgctccgagtcgaacacctcgagggtcgcgccccgggggagccacccggtgaagcacaccacccggtagcgcggggacgcgcaggggtcgaacgccagcacggagagcagcgtcctcgcgcgcggcgccggcagctccgcccaccgccgcgtggtcgggttcacgacgtggaacgccgccgtcgggcgggacgcgtagtagagcagcagcccgttgcagccgtcgatgatggtggacgtgtcgtggcgcgggaagaagcccatgtcgggggcctccgccgtggcggtggcggtggcggtggcgccgccgcctgacgcgcacgcgtacgtgtacacctgctgcctcctgccgccgtccgcgccgccgcggcacgtgtcgtcgtggtagagcacccccgacgtgatgagcggcagccggcggcggaggtagtcgctcgagatgatgcggcgccacgacgtggagacgcactggaaccgcgccagcgacctgcacggcagcctcgcaaggatctccgtcagcgcgtcctcgtccatctcgccgtccatcttctaatcttaatttggaccttccagagacttatgacgccatgagagctcctcctgaagctgcacctttctgctgattctgc

SEQ ID NO: 31263 - DNA, 4470 bp, Zea Mays
gtcgcattttaatagttgattctactggccatgagcactcgagtctcgacggggttgcaaactgacgaaactagttgcaagccccagtacaatttaccaaatatcatcgtctaataattagccagaaaccatatggttaaagcttattcagcctcggcaacaaacaggtgtcaaaaggcaacaaagggttctgttgtagtgacaagaaaatatctcctataggaacccgtcataccaaggttcactgcatacataattcatcacaacttgctgtacataattgtttgaatcaaccatctagaccgtctaccatcaaataaaaaaaaactccctaatcattgtgcagttgaaagcaatagttgctagtattggagtaacggaaaggatggcaatgttgctgtgaatctgataattgctgactacgtatatatgcacattcatacatcaaaacctggcatcgcaaactgtgacgcaaatgcctcaacctgatttcggagttctataacatcattattgttctgtaggcctcttagaaactccttttgcactttgccatgttctttcagaacattgttagcaatttgagtagcccttatgaggaagtctgcaatcacctcgaagtcctcttctaagcaacctctagtagtcattgcagaactaaccaatccgcacaccacctggcgatatcgagccattatctccatatattggtgtcttgttgacagatatgtggcatgcctcgcaaaccttctcgaagatcttgcctgtccaaaattaaagaataacatcatgagcaatacacaccagcacttcacatataatatacaaactacagtgcacaagaaagataaaacgtagaaacatttgtacggaagtggacatttgaatggacagacacaaaggaagcagaattataccagtcaagccaagagttctgaggtcccaaagtactaagtgattatctgtgccacctgtaaccaatctgcattttcttctgatcaaagctgatgccaaagcctgagcatttttcttgacttgttgaatgtatgctttatattcagaagttgctacctgcttcagagttatagccaagccagcaatatgattattatggggccctccttgcattgaagggaaaacaccaaaatttatcctatcctcgaagtcgtattcattctcatctccttgagaaaaagatccagctcgtttccttaaatttttccctttcctgaagaatattataccacctctagggcccctaagattcttgtgagtagttgacgtaacaacatcacagtagtcgaaagggctacggcattcctacaaaggcacaacaatccagtgtcaacaggcagttatccacaatgatcaatctatgggtctctaatacaaccgtacaaaaacagcaaggacaaacaatctatatgccatatgaataacattaaaacattaaactagtactccattccaaattaaaagatgctttggcttttctagatacattgtttttaccatgttcctagatatagtatgtacataattgcatagcaaacctgtgtatgtaagaagcctaaacatcttacaatttaaaatagagggagtaggatatatcacccaaccaaacatggtgcgcaagagaaggaccataatacacaagttgaattgtttctccaatatgaacacgatttacataacatggaacaagtgaacaaccacagatgccatgctacatcaacaagggaacacttttcacttatgtactttcaggcatatgtaggtagtgtgtgggggaataatacagatgttaaatgttttcttcaatacaaacatgatttgcataacatggaacaaccataagtagcatgctacagtgaacaagggaacacttcaacacttccacttatgcttttttcaaagaggttaagtactcaagtgtgtgttaagatgaaggaatttgattcaattagtttcattggacaatggttcttgccacctaatgagatcatcaagctccagatatttgaataaccacatggtatttttcaaacttgtttagagctacaacaagcgataagaataatagaaatatatatatttatttatatttattttataatcataaaccccactagccttctatcttaaaatgcaagccatccacagcaggagcccaccagtgcatgtaattatgacatttcatgcaatctaaccatgtcagcaagccacatcatccacaaacctgcatttatttgccacatcagcataccacaccatccactaaaatcattttacaatagtttatccctttaagtcaaatgattgtattcgaaaccatccacgatccctgcagcaacacatgggtatccttctagtacatatgctaaagcaaaacaaaatgcttatttcacctgccctgctacattcttagttataaaagggattgggttaggtttctcattgcactgagaagtaacaaacatgtgaatcatgattcatcactatggtaagcaaattcaaaaacaccttaaattatcatttacaataacaagaaagtttccatcattgacaaaacacaacaatggatactattcatataaagcatattcatcgtacaggtaaattgagaattggccaagcaggcaagcaaagtcctaattcacattcagctgacagcagatactaaaaccaaactcagcaccgccaaattcaaatggaaatgatactttatgcactcaaacatcaaatccatgcattgagtagtttaaaattcctgatgaacaaggtagcaagaaccttggacaagggaaaaaatggatgtcctagaatcagtactaacttccatggaccagaaaatgaatgatgtgctgtgcaatctttgtcaagcttcaaggtttaaacagtaggatttacttctaatcaagtaatcaacacaacaaactctagctttttgacaaatcttctagagggtaataaagtactagaatgtgaggtgtctctaagacactaccattcgaccaaattgtttagcaagatacagtcaaattaactgcaagaaatagtaacctaaatggcaacaaaaaccttctaatttttggaaacaagagcacaagggtagctggcaactgcaatcctgactcatacaagtgtacagcactaagggcctgtttgattgcttgcatatggcttagccaggctcacggatgcaaccttcacgtgtttggttgtctggccagcctctacagtctggctctgcagatgcaaagattccctctgggcctggctctcgagatacgcaaaaaatgggtgtttcaacaaagccaggttgtgcgggtgcaatcattagtctttcctaatgatggattaccatgtaattaatgtctaataaacaattttacttcatttaaaagtgtattaaggtttggtatggtaaattatagactattacaacatcatcccacgaaaatataataaacttcatagctttagagctcatgcaccaactcaccaagtattcatgcaagcaactaaataacacctctaatgggtcaggctgaacacatgcaagcaaccaacatagggacgttgcatgctcttagccaggccagcaagagctgggttccctagatacgagccaggcttgaccatgcaggcaactaatcaaaccctaagaggtacaattccgttcgttgctcagtagtatacagtcatagtaactgtaccatcaaaaaatgaggacctaagagtaactccaatagttatgtaaaacactccctaaacattgatttaaggagttgttaagaaaaatgcttctccaacagttatgtaaaagtcatcctaaattataaacaccctaaatttctctaaaacctccctacatttagcaaccttgtaaggagctcctaaatccgctaccaagtaccaccaattccatctggaaaaataattgtgagccatccttgcctagccgatacacacaattaaacaattgtgccacctaacaattaaacaattgtcaatgcaaatgaacggccgcacatgcacaactaacgactaaacaattgcggcagcaaatcaagagaccatcacagctcaccaggttgaaagtcatcgctcacgaggtcacaatttttagatcgaattgtggattggagataaaacagaaggagaaaaatagaatggtcccactcaaaccggtaacatagcaagttttatttaggaagtaatatatagggaattgttgaaggagaggagttttttgcttcctatattgtttgaggacttgctaaatctagaatttagggagtataattatacataactattggagctgctcgaggttctcctattactagtgcgcacattgttaagcaggatacaataaactaactgtaagataaaaataaatgtttcaacataactatgtacctttgctgcgacaagcccactgatatgtgccatgtcgcaaagaag

SEQ ID NO: 31264 - DNA, 1923 bp, Zea Mays
tttcggtcggcgcttctatccacaaaccccagccgcagcgtccgtgtaccagtgatgttgccactgcccaccgtgggcgtgggggcggtcgccgcgtcgccggccaccgccgcaggggtagcggcgcccataaggtttcgtccgctccgcctcgtcgcgagtcgagccagcactaccccttcttctccctctacgtccagctcggctatatccagcgcgtcaccagcggggcattcccgcgagcacctgtcgggcagggacggctccccatcgaagaccagcaagccccgggtgttcttcctcgacgtcaaccctctatgcttccgcggctcccaacgtagcctcggcgccttcgcgcgctggctggccctcttcttcgcacacgtcagcatccgtgaccccgtcgtcgctgttttggacggggatggagggaacgagtaccggaggcggctgctgccttcgtacaaggcgcatagggctcgcggcgtcggcactggcgctgacacgcgcgtcgtcgacgttctccgccaatgcaatgtcgcggttgtaagagtcgatggatatgaggctgatgatgtggtggctaccttaacagaacaggttttacagaaaggttacagagttgccattgcctcaccggataaagacttcaagcagctgatatctgatgatgttcagctagtcgtgcccattcctgagatcggccgatggtctttctatacattaaggcattatgttgctcaatacaagtgtgatccaactgcagacttaagccttaggtgcttcatgggcgatgaagcagatggtgttccaggaatccagcacttagttcctggattcggcagaaagaccgcggtgaaactactgcaaaaacatggttcgttagaaaacttgctaaacacggctgcaatcagaactgtcggcagaggttatgcccaggatgctctcactaagcatgcagattacttacggaaaaattaccaagttcttagcctgaagagggatgtaaatgttcagtttgacgacagttggttatccccgaggaacacatgcagtgacgccaatgttctagctgactttcttcttaaactgagtggccaaggcagaagctaaatagctggtacaacgacgcatttgcacaagctggacttgttcctcaccaaccacaggatttaacaagaaaagggagatgcataaaggttgaaggagccggttgctgtaaaaaaaattgcgtatatccttgctccaaagtagtagccatcacacattctcgcttgtgattcgtggaactggagcagccctacctgggttgaagctgggtggaaaaatggaagtttggaaggtctgtctgggtgggtacatggtgacgggacaagcttaagaatatacagggataagctatagtggtagtactactgtgctgtaggccgtaaagtccacaagtaccttgccaggagattacagatggcgtacttcgtactggctgccagccgcgccgcaagtgtggcaggatttatttgttttggcgcacagaaatagcgccacacttcaggcgagctacgggctacagcacgcaaaatgtgaagtatgggcggcgataaggtgggtgcgtggtggtcaggtggtctatggaaacctctgctaatggatcaaacacgtggtggtgaagtcttcagtactcagtagccgaggatgaaaccgttgcgctcgcgcgtactgatgtgcgcgtctgcggctcaaaaaatctatcaaactgtgggcatcgcctttgcgaatggaatccaatgcccgacccttcctgccttctcggtccgctgtaactggaaacctactgtcagataaatctccgggttataatttattcagataaccatataacagggtgtatattctgcttagacgcactttgctagtaaataaagg

SEQ ID NO: 31265 - DNA, 1197 bp, Zea Mays
tttcatgtggctctggctcaccattcacactatattttgcaagttctttgagccacagaggtatgcatacaccttccagaattatgtatttgtgacaagggtcatgcaagagaaggaatctgcgtgtggaataaaacctcttaggctgatggaaagaagcgttttcagtgatcgaatggtttttgttcgtgctgtgcatgaagcaaactggatgaacgagatggaaatcagcatttatgactcttggtttgacccagttgtgtcatcactcccaggtcttgtacctgatggttttatttatctaagagctagccctgatacttgtcacaaaagaatgatggtgcgaaaaagatcagaggaggctggtgttactcttgattaccttcgaggtttgcatgagaaacatgagagctggttacttccatccaagggaggaggttctggcgtgttgtccatcagtcagcttccagttcatatggagggctccctgcatgcggatatacgagatagggtattctacttggaaggagatcacatgcattcaagtatccagaaggttcctgctcttatcctggactgtgaacatgacattgattttaacaaggacatcgaagccaaacgacaatatgctcggcaagttgcggagttctttgactttgtgaagaaaaagaaggaatctcttacagcagagtcagagacggctgatggtgataagagtataaacaaacagattgtgctgccgcacggaggtggtttgtgggtgcccggaagcagcccgttaccagaatcagctctaaaatcatttgatttcaggagaacgatgtcttcctcgacttaaggtgggcaaacatcccaatggcgctatcaatttctgccgacaacctgcattggtgtggtccagcagcgtatcttgattgatatatatataccctgtaaatatttaaagattatataaagatttaggcttttagctagtgttggcgtacaatgtattatactagtggtatccaactctgttgcctgtagatgatcgagctgctttctgtttgcctggaaatgttgatcgaaccgctttcgagacagtgcttttgtaaatttggggtgcatcataggcgcagaatcttttgttttatcgttgtctcgccgcacaatctcacttctctggtttgttattagttactatgtgtctgattggtt

SEQ ID NO: 31266 - DNA, 1521 bp, Zea Mays
tttcatgtggctctggctcaccattcacactatattttgcaagttctttggcaagtctaatgagaagatgattgaattcttgcaaaattcagttggcatcattcacaagaatcatgctgagagtataactttgttcattaaagagagtgttgatgaagagctgaaaggcaccgatacatctaagcttcctaaaaataggaggttgaccttttgtatagaagggaatatcagtgttgggaaaactaccttccttcaaagaatagctaatgaaactatcgaactacgtgaccttgtagaaattgtacctgaacctattgctaagtggcaggatgttggccccgaacacttcaatgtacttgatgctttctatgcagagccacagaggtatgcatacaccttccagaattatgtatttgtgacaagggtcatgcaagagaaggaatctgcgtgtggaataaaacctcttaggctgatggaaagaagcgttttcagtgatcgaatggtttttgttcgtgctgtgcatgaagcaaactggatgaacgagatggaaatcagcatttatgactcttggtttgacccagttgtgtcatcactcccaggtcttgtacctgatggttttatttatctaagagctagccctgatacttgtcacaaaagaatgatggtgcgaaaaagatcagaggaggctggtgttactcttgattaccttcgaggtttgcatgagaaacatgagagctggttacttccatccaagggaggaggttctggcgtgttgtccatcagtcagcttccagttcatatggagggctccctgcatgcggatatacgagatagggtattctacttggaaggagatcacatgcattcaagtatccagaaggttcctgctcttatcctggactgtgaacatgacattgattttaacaaggacatcgaagccaaacgacaatatgctcggcaagttgcggagttctttgactttgtgaagaaaaagaaggaatctcttacagcagagtcagagacggctgatggtgataagagtataaacaaacagattgtgctgccgcacggaggtggtttgtgggtgcccggaagcagcccgttaccagaatcagctctaaaatcatttgatttcaggagaacgatgtcttcctcgacttaaggtgggcaaacatcccaatggcgctatcaatttctgccgacaacctgcattggtgtggtccagcagcgtatcttgattgatatatatataccctgtaaatatttaaagattatataaagatttaggcttttagctagtgttggcgtacaatgtattatactagtggtatccaactctgttgcctgtagatgatcgagctgctttctgtttgcctggaaatgttgatcgaaccgctttcgagacagtgcttttgtaaatttggggtgcatcataggcgcagaatcttttgttttatcgttgtctcgccgcacaatctcacttctctggtttgttattagttactatgtgtctgattggtt

SEQ ID NO: 31267 - DNA, 2944 bp, Zea Mays
ctccattttttttacaaatacaattttagacagctcaaaagattatacattaaacaccactgtacctaataactgcgtagacacggacggcaacacggccgccgcgaaaccgcgttaatttatgagcgcccgctgatgtgcctgttcctgtgcctgtgcgtgcgcctcctgcgtgtggcaatagcagcgggcagcggcagttggtcaccgtggtcgtggagtctgcagtgggctggaccctccctgccgcagttccgctgttggaccctccttgcccggctactgctgtaccctccaacaaggcaaaaagaagaacgaagctcacccaccctgcccatcggcctcatcacttccctcaaatccaccgatccccttccagaggttagggcctctgcgcccgatttcgtcccgcctcgccgatccacccgccgcaggtgagcggcttcgccggttggagtgtagtactgcggtcgcgaccttcgttccgagctggttcattttcgcttggataggtttggtacggatgggagccggcggcgcggggatcaggaatgtttcggtgcgtgggaggtgagagccgccggtgggcactgagggcctagggtttggttgaagagggagcaacgaaatggggggcttttgctccaaggggtcggcggtggacaagtcacccagcgacactacgctcggccccggccgggaggttgaccgccatgaccgtctagtggtgaaggaggagaagaaagctgtggtgggggaggctgctgccaagaggatgcaagaagagcaacatcaacagcagcagcagcagcagcagccagcagcgccaccactgcctgtatcggtgtcgcaaacggcagtgcctggagctaccgcggataacactgcagcaccatgggatggggtgccaccactggcacggttgccatctcagaagtcggggatgggtgtggcgaataaggtttcggaagtaagctcaattctgggtagagctagtactgctggccttggaaaagcagtggaagtgcttgacacacttggcagtagcatgacaaatttgaatataagtagttttggatcaggcactgcaacaaaggggaacaaaatatctattttagcatttgaggttgccaataccatagtcaaaggttgcagtctaatgcgcgccctttcaaaagatagcataaaacatttaaaagaaacagtgcttcactctgaaggtgttcagaatcttatatccaaagatatggatgagttactcaagattgctgctgctgacaaaagggaagagttgaaagtgttctctacagaagttgttcgctttggaaatcgttgcaaggatcctcagtggcacaacttggaccgctactttgataagttgacatcagaacagactcctcaacatcaactgaaagaagaggcagaatcagtaatgcaggaattagtgacttctgttcagtttacagctgaactataccatgaaatgcatgccctggatagatttcaacaagattatcagcgtaaacagcatgaagaggatggttctagtgttgtgcaaagaggtgataacatgcacatactaaagcaggaagtgaaaagccaaagcaagcatgttaaaagtttgaggaaaaagtctctgtggtctaagaatttggaagaggtcatgggaaagcttgtggacattgtgcacttcttacatttggagatccataatgtatttgggcgttcagacagtgaagaatcacaggaacctaccaaacgacgtaatagattgggtccagcaggtcttgcactgcattatgcaaatatcatcagtcagattgatactcttgtttctcgttcaagctctgttcctccaaatacaagggatgcattataccaaagtttgccaccaaccataaagtcatctctccgttctaagctacactcctttggagttaaggaagagcttactgtttctcaaatcaaggctgaaatggagaagaccctgcggtggcttgtccctattgcaagtaacaccaccaaggctcaccatggtttcggttgggttggagagtgggcaaatactggatgtgaactgcaagccaaatgggcagatagacctgatccgaattgagacactgtaccacgctgacaaggagaagactgaagcatatatcctcgagcttgttatttggcttcatcatcttatcagcctatccaaaactgcaaatggtgaaaggtctccaatcaagtctcctgttcggtctcctacacaaagaggggcctcaatcacattatctccaaacaaaaacagcagcaattcatcacctcttctgacgcaagaagatcaagatatgctaagggatgtcaagtacaggaaattcatccctggtataagcaaaagccaggagtttgacactaaggaaaggcataataagcaaagcaggttaagcaaaagtaatagccattcaccaagcagtggcaaccggaaagagacgctatcaatcaggaggctgcttcctgtgatcgactttgagatcgacaggataaaagcccttgatatgatcgacagagttgacgatctgagagtacaatgatgaacctagattaagcaatggcaaagtctgaaaaatgcaccctcaatctatgatcctgaaaatcaagattgcttgaaagatacaagtaatcagctgagctgaattggcatgctgtcagcacttctgcagcaatgtccctgcttgaggtgaacaggcatcatggtgccagtttgaaggcaccacgagggttagagatggtggcagcatgttctggccaactttgtatgatatatggcagggttaataggaaagtgaaattttattgtaaaaagggatttgttgtgttacttagctcatgtacaaggaatacaagttttgagagggcggagggggatcaaagatctgactgtgtttcttgctgtttt

SEQ ID NO: 31268 - DNA, 2736 bp, Zea Mays
atgtgcctgttcctgtgcctgtgcgtgcgcctcctgcgtgtggcaatagcagcgggcagcggcagttggtcaccgtggtcgtggagtctgcagtgggctggaccctccctgccgcagttccgctgttggaccctccttgcccggctactgctgtaccctccaacaaggcaaaaagaagaacgaagctcacccaccctgcccatcggcctcatcacttccctcaaatccaccgatccccttccagaggttagggcctctgcgcccgatttcgtcccgcctcgccgatccacccgccgcaggtttggtacggatgggagccggcggcgcggggatcaggaatgtttcggtgcgtgggaggtgagagccgccggtgggcactgagggcctagggtttggttgaagagggagcaacgaaatggggggcttttgctccaaggggtcggcggtggacaagtcacccagcgacactacgctcggccccggccgggaggttgaccgccatgaccgtctagtggtgaaggaggagaagaaagctgtggtgggggaggctgctgccaagaggatgcaagaagagcaacatcaacagcagcagcagcagcagcagccagcagcgccaccactgcctgtatcggtgtcgcaaacggcagtgcctggagctaccgcggataacactgcagcaccatgggatggggtgccaccactggcacggttgccatctcagaagtcggggatgggtgtggcgaataaggtttcggaagtaagctcaattctgggtagagctagtactgctggccttggaaaagcagtggaagtgcttgacacacttggcagtagcatgacaaatttgaatataagtagttttggatcaggcactgcaacaaaggggaacaaaatatctattttagcatttgaggttgccaataccatagtcaaaggttgcagtctaatgcgcgccctttcaaaagatagcataaaacatttaaaagaaacagtgcttcactctgaaggtgttcagaatcttatatccaaagatatggatgagttactcaagattgctgctgctgacaaaagggaagagttgaaagtgttctctacagaagttgttcgctttggaaatcgttgcaaggatcctcagtggcacaacttggaccgctactttgataagttgacatcagaacagactcctcaacatcaactgaaagaagaggcagaatcagtaatgcaggaattagtgacttctgttcagtttacagctgaactataccatgaaatgcatgccctggatagatttcaacaagattatcagcgtaaacagcatgaagaggatggttctagtgttgtgcaaagaggtgataacatgcacatactaaagcaggaagtgaaaagccaaagcaagcatgttaaaagtttgaggaaaaagtctctgtggtctaagaatttggaagaggtcatgggaaagcttgtggacattgtgcacttcttacatttggagatccataatgtatttgggcgttcagacagtgaagaatcacaggaacctaccaaacgacgtaatagattgggtccagcaggtcttgcactgcattatgcaaatatcatcagtcagattgatactcttgtttctcgttcaagctctgttcctccaaatacaagggatgcattataccaaagtttgccaccaaccataaagtcatctctccgttctaagctacactcctttggagttaaggaagagcttactgtttctcaaatcaaggctgaaatggagaagaccctgcggtggcttgtccctattgcaagtaacaccaccaaggctcaccatggtttcggttgggttggagagtgggcaaatactgggtcagatgtgaactgcaagccaaatgggcagatagacctgatccgaattgagacactgtaccacgctgacaaggagaagactgaagcatatatcctcgagcttgttatttggcttcatcatcttatcagcctatccaaaactgcaaatggtgaaaggtctccaatcaagtctcctgttcggtctcctacacaaagaggggcctcaatcacattatctccaaacaaaaacagcagcaattcatcacctcttctgacgcaagaagatcaagatatgctaagggatgtcaagtacaggaaattcatccctggtataagcaaaagccaggagtttgacactaaggaaaggcataataagcaaagcaggttaagcaaaagtaatagccattcaccaagcagtggcaaccggaaagagacgctatcaatcaggaggctgcttcctgtgatcgactttgagatcgacaggataaaagcccttgatatgatcgacagagttgacgatctgagagtacaatgatgaacctagattaagcaatggcaaagtctgaaaaatgcaccctcaatctatgatcctgaaaatcaagattgcttgaaagatacaagtaatcagctgagctgaattggcatgctgtcagcacttctgcagcaatgtccctgcttgaggtgaacaggcatcatggtgccagtttgaaggcaccacgagggttagagatggtggcagcatgttctggccaactttgtatgatatatggcagggttaataggaaagtgaaattttattgtaaaaagggatttgttgtgttacttagctcatgtacaaggaatacaagttttgagagggcggagggggatcaaagatctgactgtgtttcttgctgtttt

SEQ ID NO: 31269 - DNA, 2793 bp, Zea Mays
atgtgcctgttcctgtgcctgtgcgtgcgcctcctgcgtgtggcaatagcagcgggcagcggcagttggtcaccgtggtcgtggagtctgcagtgggctggaccctccctgccgcagttccgctgttggaccctccttgcccggctactgctgtaccctccaacaaggcaaaaagaagaacgaagctcacccaccctgcccatcggcctcatcacttccctcaaatccaccgatccccttccagaggttagggcctctgcgcccgatttcgtcccgcctcgccgatccacccgccgcaggtgagcggcttcgccggttggagtgtagtactgcggtcgcgaccttcgttccgagctggttcattttcgcttggataggtttggtacggatgggagccggcggcgcggggatcaggaatgtttcggtgcgtgggaggtgagagccgccggtgggcactgagggcctagggtttggttgaagagggagcaacgaaatggggggcttttgctccaaggggtcggcggtggacaagtcacccagcgacactacgctcggccccggccgggaggttgaccgccatgaccgtctagtggtgaaggaggagaagaaagctgtggtgggggaggctgctgccaagaggatgcaagaagagcaacatcaacagcagcagcagcagcagcagccagcagcgccaccactgcctgtatcggtgtcgcaaacggcagtgcctggagctaccgcggataacactgcagcaccatgggatggggtgccaccactggcacggttgccatctcagaagtcggggatgggtgtggcgaataaggtttcggaagtaagctcaattctgggtagagctagtactgctggccttggaaaagcagtggaagtgcttgacacacttggcagtagcatgacaaatttgaatataagtagttttggatcaggcactgcaacaaaggggaacaaaatatctattttagcatttgaggttgccaataccatagtcaaaggttgcagtctaatgcgcgccctttcaaaagatagcataaaacatttaaaagaaacagtgcttcactctgaaggtgttcagaatcttatatccaaagatatggatgagttactcaagattgctgctgctgacaaaagggaagagttgaaagtgttctctacagaagttgttcgctttggaaatcgttgcaaggatcctcagtggcacaacttggaccgctactttgataagttgacatcagaacagactcctcaacatcaactgaaagaagaggcagaatcagtaatgcaggaattagtgacttctgttcagtttacagctgaactataccatgaaatgcatgccctggatagatttcaacaagattatcagcgtaaacagcatgaagaggatggttctagtgttgtgcaaagaggtgataacatgcacatactaaagcaggaagtgaaaagccaaagcaagcatgttaaaagtttgaggaaaaagtctctgtggtctaagaatttggaagaggtcatgggaaagcttgtggacattgtgcacttcttacatttggagatccataatgtatttgggcgttcagacagtgaagaatcacaggaacctaccaaacgacgtaatagattgggtccagcaggtcttgcactgcattatgcaaatatcatcagtcagattgatactcttgtttctcgttcaagctctgttcctccaaatacaagggatgcattataccaaagtttgccaccaaccataaagtcatctctccgttctaagctacactcctttggagttaaggaagaggctgaaatggagaagaccctgcggtggcttgtccctattgcaagtaacaccaccaaggctcaccatggtttcggttgggttggagagtgggcaaatactgggtcagatgtgaactgcaagccaaatgggcagatagacctgatccgaattgagacactgtaccacgctgacaaggagaagactgaagcatatatcctcgagcttgttatttggcttcatcatcttatcagcctatccaaaactgcaaatggtgaaaggtctccaatcaagtctcctgttcggtctcctacacaaagaggggcctcaatcacattatctccaaacaaaaacagcagcaattcatcacctcttctgacgcaagaagatcaagatatgctaagggatgtcaagtacaggaaattcatccctggtataagcaaaagccaggagtttgacactaaggaaaggcataataagcaaagcaggttaagcaaaagtaatagccattcaccaagcagtggcaaccggaaagagacgctatcaatcaggaggctgcttcctgtgatcgactttgagatcgacaggataaaagcccttgatatgatcgacagagttgacgatctgagagtacaatgatgaacctagattaagcaatggcaaagtctgaaaaatgcaccctcaatctatgatcctgaaaatcaagattgcttgaaagatacaagtaatcagctgagctgaattggcatgctgtcagcacttctgcagcaatgtccctgcttgaggtgaacaggcatcatggtgccagtttgaaggcaccacgagggttagagatggtggcagcatgttctggccaactttgtatgatatatggcagggttaataggaaagtgaaattttattgtaaaaagggatttgttgtgttacttagctcatgtacaaggaatacaagttttgagagggcggagggggatcaaagatctgactgtgtttcttgctgtttt

SEQ ID NO: 31270 - DNA, 2810 bp, Zea Mays
atgtgcctgttcctgtgcctgtgcgtgcgcctcctgcgtgtggcaatagcagcgggcagcggcagttggtcaccgtggtcgtggagtctgcagtgggctggaccctccctgccgcagttccgctgttggaccctccttgcccggctactgctgtaccctccaacaaggcaaaaagaagaacgaagctcacccaccctgcccatcggcctcatcacttccctcaaatccaccgatccccttccagaggttagggcctctgcgcccgatttcgtcccgcctcgccgatccacccgccgcaggtgagcggcttcgccggttggagtgtagtactgcggtcgcgaccttcgttccgagctggttcattttcgcttggataggtttggtacggatgggagccggcggcgcggggatcaggaatgtttcggtgcgtgggaggtgagagccgccggtgggcactgagggcctagggtttggttgaagagggagcaacgaaatggggggcttttgctccaaggggtcggcggtggacaagtcacccagcgacactacgctcggccccggccgggaggttgaccgccatgaccgtctagtggtgaaggaggagaagaaagctgtggtgggggaggctgctgccaagaggatgcaagaagagcaacatcaacagcagcagcagcagcagcagccagcagcgccaccactgcctgtatcggtgtcgcaaacggcagtgcctggagctaccgcggataacactgcagcaccatgggatggggtgccaccactggcacggttgccatctcagaagtcggggatgggtgtggcgaataaggtttcggaagtaagctcaattctgggtagagctagtactgctggccttggaaaagcagtggaagtgcttgacacacttggcagtagcatgacaaatttgaatataagtagttttggatcaggcactgcaacaaaggggaacaaaatatctattttagcatttgaggttgccaataccatagtcaaaggttgcagtctaatgcgcgccctttcaaaagatagcataaaacatttaaaagaaacagtgcttcactctgaaggtgttcagaatcttatatccaaagatatggatgagttactcaagattgctgctgctgacaaaagggaagagttgaaagtgttctctacagaagttgttcgctttggaaatcgttgcaaggatcctcagtggcacaacttggaccgctactttgataagttgacatcagaacagactcctcaacatcaactgaaagaagaggcagaatcagtaatgcaggaattagtgacttctgttcagtttacagctgaactataccatgaaatgcatgccctggatagatttcaacaagattatcagcgtaaacagcatgaagaggatggttctagtgttgtgcaaagaggtgataacatgcacatactaaagcaggaagtgaaaagccaaagcaagcatgttaaaagtttgaggaaaaagtctctgtggtctaagaatttggaagaggtcatgggaaagcttgtggacattgtgcacttcttacatttggagatccataatgtatttgggcgttcagtgaagaatcacaggaacctaccaaacgacgtaatagattgggtccagcaggtcttgcactgcattatgcaaatatcatcagtcagattgatactcttgtttctcgttcaagctctgttcctccaaatacaagggatgcattataccaaagtttgccaccaaccataaagtcatctctccgttctaagctacactcctttggagttaaggaagagcttactgtttctcaaatcaaggctgaaatggagaagaccctgcggtggcttgtccctattgcaagtaacaccaccaaggctcaccatggtttcggttgggttggagagtgggcaaatactgggtcagatgtgaactgcaagccaaatgggcagatagacctgatccgaattgagacactgtaccacgctgacaaggagaagactgaagcatatatcctcgagcttgttatttggcttcatcatcttatcagcctatccaaaactgcaaatggtgaaaggtctccaatcaagtctcctgttcggtctcctacacaaagaggggcctcaatcacattatctccaaacaaaaacagcagcaattcatcacctcttctgacgcaagaagatcaagatatgctaagggatgtcaagtacaggaaattcatccctggtataagcaaaagccaggagtttgacactaaggaaaggcataataagcaaagcaggttaagcaaaagtaatagccattcaccaagcagtggcaaccggaaagagacgctatcaatcaggaggctgcttcctgtgatcgactttgagatcgacaggataaaagcccttgatatgatcgacagagttgacgatctgagagtacaatgatgaacctagattaagcaatggcaaagtctgaaaaatgcaccctcaatctatgatcctgaaaatcaagattgcttgaaagatacaagtaatcagctgagctgaattggcatgctgtcagcacttctgcagcaatgtccctgcttgaggtgaacaggcatcatggtgccagtttgaaggcaccacgagggttagagatggtggcagcatgttctggccaactttgtatgatatatggcagggttaataggaaagtgaaattttattgtaaaaagggatttgttgtgttacttagctcatgtacaaggaatacaagttttgagagggcggagggggatcaaagatctgactgtgtttcttgctgtttt

SEQ ID NO: 31271 - DNA, 4567 bp, Zea Mays
cgtccatagaagtgctagaacgccagaacccgccgccggcgaacccgaagactgcgcccagctatggacgcgccgggagagctgcagtgcgtgggcaggctcgaggtcgccgcgccgccgccggcgcgctaccttcgcgttggctccctccccgtccccaccgactcctctgcctctctcccagtcctcctgccttctccgtccccgattggtgctccaaggtatcaaatgctgccattagagactgatctgaacacactccctatgattccaaacatcccagagaaggttttttcaagtgatgctaagagtactgaaggattacggtatgacagtggtcatatcaaccagaacttatcaaggaagtgtgaagcattagctgtgtcaggtttggcagaatatggtgatgaaatagatgtgattgccccagctgatatcatgaagcagattttcaaaattccatactccaaggcacaagtatctattgctgtaaaccgtataggagatacactcattctaaacacagggcctgatgttgatgaaggtgaaaagatattcagaagacaaggtaaccagcctaaaggatctgatccatcaatatttctgaacttcgcaatgcactctgtgcgagcagaagcttgtgattgtcccccaagtcatcaaccttcacagaagaagcaaacagcatctgcagtattgcgtggatcttttggctgtgacgagggttcttttgattcatccccatcatctagttttagcacatcaccttatctggatcagaatgacagtaaaagtagaaaagcttctcatagtactcatgaaagcctgtacctgggagcaatggaaaacaatcgaaaagtcaaagggtctgatcctattaaaaaaacgactcgtgttggtgaaaaaaacagctgtgaggtgcaagaatctgagaagagcaagagagtgggaaataatggatttcggaaggtttgcttttggcaattccacaatttccatgtgcttttgggtagtgacttgcttatatttagcaacgagaaatatattgcagtcagtttgcacctatgggatgtttctagacaggttactccattgaactggctcgaagcttggcttgacaatgtaatggcaagtgttccagaattggccatatgttaccatcagaatggtgttgttcaaggttatgagcttttaaagaatgatgatatatttctccttaagggtgtctcggatgatggcacacctgcatttcatccacaggttgtccagcaaaatggccttgctgtcctgaggttcattcaggataactgtaagcaagaccctggtgcatattggctgtacaaaggcgctgaagaagatgtcatacagttatatgatctgtctatcttacctgaaaaacatacagctggtgatcatagatctccatgcggtcctatgtcatcttttatagacaagggaagaaaggagtcattgttctctttgggtacactcctttatcgtgttgctcacaggatgtccttgtcaaaggtgcctagtaatagagcaaaatgtgcaaaattcttcagaaaatgttttgattttcttagtgagcaggatcacctggttgtccgggcatgtgctcatgaacaatttgcaagactcatccttaaatgttatgaggatctggaactgacttctgaatcatttatgattgaatctgaagtcacccttactgatttggatgacgattctccagaattgagacttgagaatttaccagcaaaacaaaatgtactgccagaacttggcaagaatgagccagcagtgttagatgaagtgttggaatgcacaacatcagtgtcttctggtatgacaagcagcttagtggaaccaagccaagttgatggtggttcttcatcttcagttacaaaagaagatgtttctctggacagcttggtgatgtgtcaggctggtatatcaaaaacaattgctgatgcaatctcctctaagttggctgccatacaccacgtatctcaagctatcaaatcccttagatggaatcgacagctgcagaataatactcagcatggttgcggggacagtgcagataccatttgggagaggtcagtcgacttctctttatgccgatgtggtgatgttgattgtattgaggtctgtgatatcagggagtggctgccaaaatcaaaaatggaccataagctgtggaagcttgttcttttgctaggagaatcttatttggcacttggagaggcatacaagaatgatgggcagcttcagcgcacccttaaagttgttgaattagcttgtttggtatatgggtctatgcctggacatattgatggcgacgagttcatctcatccatgtccaacagttcattgagtcgagaagatcttgccctaaaaactaaacttgtactggacgaggcagactattgcaataacaaaagatgcttcagttatgaagtttcttcccaccaattgccaccaaattatttgttctgggcaaaggcatggatgcttgttggtgatgtctatgcagaatatcacagattgaatagtcatcaagcaaagttggcaccagaacagaagtctcatggcgaagttagaatgtcaaatgaagttgcattggaggtcaaacgccttaagagaaaactgggaaaggataagcagaattgtgacacatgctctttgataaactgtagctgccaaagtgacagggcaagtagtggcagcagtgctagcagcagtagttctgaggcctctaaactttacagccgaaagaaaaacaaaaaatcacttggtaagaaccttcaacttcaatcacaatatagagaagccagcaagaaccccaatgcacaagaagctacacaaggttctgaaagtaaacagcatgatgtgaatgatacttgtattgagaacaactcagtattaaatgatgatattggtcactacagtcaggccagggaaaatcagtcaagaaatgttgatggtgttcctgataaatctcaagcaagtgttcctactgtgagggatggtggtatcttcaagttccttggtggtccaaaaccaggagatgttgagtacaacttgtcttctgctattcactgctatggtgcagccaagggagcattgttcgcatttcctgtgcattcagtagaaacttccatggttcttaagaaaagaggctggggatttaatgaactgggccgttgtagacttgagaatagaaatctggttagcgccgagattgcttttgcggatgctattaaagcatttgaagaggtgtttgaccacacaaatgttatactgatcaactgtaacttaggtcatggtaggagagctttagcagaggaatgtgtatccaggattgatgaatttcagaaacataatcttcctgaaggcacatatatgcaatcctttaagtcggccaagtcagaatattttcaagcaataaactactattccgcagctaagaggcaactgaagtatgtcaatactgaggccgataaagtactataccatgaggtttacacacagtatgcccatacctacctgaggcttggaatgcttttggcaagggaaagcttcttaactgacagttatgaaggtggacttgtcaatgagtcatctaacagaacagctgtagagattttagcgagtgatgcttttcgggaggctttgtctacgtatgaatcccttggtgaacatcgcaaacaggaagctgcttttggtcattttcagcttgcttgttatcagagggatctgtgcttaaggtttctggatttagttgacaaggaggttaaacagaaaaacgaggataaatatcgtcagaaaagtaagtggtatggttcactagctgagaagaactggcagaaggctttagaattttatgggccgaagacacatcctactatgtttcttaacatccttatggcgcagtctgccctttctattaatatttctaattccttccactcaaccgcggccggcatgtggttgaagcaaatgaagacaactccaacgatatggatctggacataaaaccgaagttctggtgccagctgcagagcctgctgaagaggatgctggcgggatccctgcctagcagcacgggcagagcagcctctgtcagccaagccagcactagcagcagaacagaaacttctaagctgaaagagatgtatcgtttgtcgctcaaatcttctaccctgggccagctgcatgcgttgtacaagctttgggtatcttaacacctttattttacaaatggttgctgctcatgttttatatcgtcggcatctatctcttgaattacagagtttttatttggtgttcacggcacgttttttttgttttgatttccagccaacttttaaaactaaatattaagtgtaaccatggaatgtcatggacgggacacactagctactacagtctacaactgttttgtagacttatataaacagcaaataatggcatcctatgtgaagacagtgtattatatgtattgtatcatagagagccaatgccaaaatatctgaatgtatgtgccctgcttcaccgggaa

SEQ ID NO: 31272 - DNA, 4452 bp, Zea Mays
cgtccatagaagtgctagaacgccagaacccgccgccggcgaacccgaagactgcgcccagctatggacgcgccgggagagctgcagtgcgtgggcaggctcgaggtcgccgcgccgccgccggcgcgctaccttcgcgttggctccctccccgtccccaccgactcctctgcctctctcccagtcctcctgccttctccgtccccgattggtgctccaaggtatcaaatgctgccattagagactgatctgaacacactccctatgattccaaacatcccagagaaggttttttcaagtgatgctaagagtactgaaggattacggtatgacagtggtcatatcaaccagaacttatcaaggaagtgtgaagcattagctgtgtcaggtttggcagaatatggtgatgaaatagatgtgattgccccagctgatatcatgaagcagattttcaaaattccatactccaaggcacaagtatctattgctgtaaaccgtataggagatacactcattctaaacacagggcctgatgttgatgaaggtgaaaagatattcagaagacaaggtaaccagcctaaaggatctgatccatcaatatttctgaacttcgcaatgcactctgtgcgagcagaagcttgtgattgtcccccaagtcatcaaccttcacagaagaagcaaacagcatctgcagtattgcgtggatcttttggctgtgacgagggttcttttgattcatccccatcatctagttttagcacatcaccttatctggatcagaatgacagtaaaagtagaaaagcttctcatagtactcatgaaagcctgtacctgggagcaatggaaaacaatcgaaaagtcaaagggtctgatcctattaaaaaaacgactcgtgttggtgaaaaaaacagctgtgaggtgcaagaatctgagaagagcaagagagtgggaaataatggatttcggaaggtttgcttttggcaattccacaatttccatgtgcttttgggtagtgacttgcttatatttagcaacgagaaatatattgcagtcagtttgcacctatgggatgtttctagacaggttactccattgaactggctcgaagcttggcttgacaatgtaatggcaagtgttccagaattggccatatgttaccatcagaatggtgttgttcaaggttatgagcttttaaagaatgatgatatatttctccttaagggtgtctcggatgatggcacacctgcatttcatccacaggttgtccagcaaaatggccttgctgtcctgaggttcattcaggataactgtaagcaagaccctggtgcatattggctgtacaaaggcgctgaagaagatgtcatacagttatatgatctgtctatcttacctgaaaaacatacagctggtgatcatagatctccatgcggtcctatgtcatcttttatagacaagggaagaaaggagtcattgttctctttgggtacactcctttatcgtgttgctcacaggatgtccttgtcaaaggtgcctagtaatagagcaaaatgtgcaaaattcttcagaaaatgttttgattttcttagtgagcaggatcacctggttgtccgggcatgtgctcatgaacaatttgcaagactcatccttaaatgttatgaggatctggaactgacttctgaatcatttatgattgaatctgaagtcacccttactgatttggatgacgattctccagaattgagacttgagaatttaccagcaaaacaaaatgtactgccagaacttggcaagaatgagccagcagtgttagatgaagtgttggaatgcacaacatcagtgtcttctggtatgacaagcagcttagtggaaccaagccaagttgatggtggttcttcatcttcagttacaaaagaagatgtttctctggacagcttggtgatgtgtcaggctggtatatcaaaaacaattgctgatgcaatctcctctaagttggctgccatacaccacgtatctcaagctatcaaatcccttagatggaatcgacagctgcagaataatactcagcatggttgcggggacagtgcagataccatttgggagaggtcagtcgacttctctttatgccgatgtggtgatgttgattgtattgaggtctgtgatatcagggagtggctgccaaaatcaaaaatggaccataagctgtggaagcttgttcttttgctaggagaatcttatttggcacttggagaggcatacaagaatgatgggcagcttcagcgcacccttaaagttgttgaattagcttgtttggtatatgggtctatgcctggacatattgatggcgacgagttcatctcatccatgtccaacagttcattgagtcgagaagatcttgccctaaaaactaaacttgtactggacgaggcagactattgcaataacaaaagatgcttcagttatgaagtttcttcccaccaattgccaccaaattatttgttctgggcaaaggcatggatgcttgttggtgatgtctatgcagaatatcacagattgaatagtcatcaagcaaagttggcaccagaacagaagtctcatggcgaagttagaatgtcaaatgaagttgcattggaggtcaaacgccttaagagaaaactgggaaaggataagcagaattgtgacacatgctctttgataaactgtagctgccaaagtgacagggcaagtagtggcagcagtgctagcagcagtagttctgaggcctctaaactttacagccgaaagaaaaacaaaaaatcacttggtaagaaccttcaacttcaatcacaatatagagaagccagcaagaaccccaatgcacaagaagctacacaaggttctgaaagtaaacagcatgatgtgaatgatacttgtattgagaacaactcagtattaaatgatgatattggtcactacagtcaggccagggaaaatcagtcaagaaatgttgatggtgttcctgataaatctcaagcaagtgttcctactgtgagggatggtggtatcttcaagttccttggtggtccaaaaccaggagatgttgagtacaacttgtcttctgctattcactgctatggtgcagccaagggagcattgttcgcatttcctgtgcattcagtagaaacttccatggttcttaagaaaagaggctggggatttaatgaactgggccgttgtagacttgagaatagaaatctggttagcgccgagattgcttttgcggatgctattaaagcatttgaagaggtgtttgaccacacaaatgttatactgatcaactgtaacttaggtcatggtaggagagctttagcagaggaatgtgtatccaggattgatgaatttcagaaacataatcttcctgaaggcacatatatgcaatcctttaagtcggccaagtcagaatattttcaagcaataaactactattccgcagctaagaggcaactgaagtatgtcaatactgaggccgataaagtactataccatgaggtttacacacagtatgcccatacctacctgaggcttggaatgcttttggcaagggaaagcttcttaactgacagttatgaaggtggacttgtcaatgagtcatctaacagaacagctgtagagattttagcgagtgatgcttttcgggaggctttgtctacgtatgaatcccttggtgaacatcgcaaacaggaagctgcttttggtcattttcagcttgcttgttatcagagggatctgtgcttaaggtttctggatttagttgacaaggaggttaaacagaaaaacgaggataaatatcgtcagaaaaatgcttgacaccgctctgactcacttgttggaaggccggcatgtggttgaagcaaatgaagacaactccaacgatatggatctggacataaaaccgaagttctggtgccagctgcagagcctgctgaagaggatgctggcgggatccctgcctagcagcacgggcagagcagcctctgtcagccaagccagcactagcagcagaacagaaacttctaagctgaaagagatgtatcgtttgtcgctcaaatcttctaccctgggccagctgcatgcgttgtacaagctttgggtatcttaacacctttattttacaaatggttgctgctcatgttttatatcgtcggcatctatctcttgaattacagagtttttatttggtgttcacggcacgttttttttgttttgatttccagccaacttttaaaactaaatattaagtgtaaccatggaatgtcatggacgggacacactagctactacagtctacaactgttttgtagacttatataaacagcaaataatggcatcctatgtgaagacagtgtattatatgtattgtatcatagagagccaatgccaaaatatctgaatgtatgtgccctgcttcaccgggaa

SEQ ID NO: 31273 - DNA, 2788 bp, Zea Mays
cacacgcccgcccgcatgcttaaatcctgccccttcacgtgcgttcgggagggcatccttggaagttggaagcaggcctcacctgcccccaaaggcccaaactcccgaaccgccccgcaccacgcatggccgccacagccgccgccgccgcgacggcctccacgccttcctctcccctccgccgccgagcctctgcggcgcctaccacaagacacaactcccagctcaaatgctccatcaagccctcgcagttcgagctgcggcaccgcgccgcgggtctcgctccggcgcgagctctgctccctgaccgcgtcacgccgttttccttcgacgcggacggcgacgaccatccccgagaggagtgcggcgtgttcggagtcattggcgacccagacgcgtcgtcgctctgctacctcggcctgcagaagctgcagcaccgcggggaggagggcgcgggcatcgttgcgtcggacgccgacggcaagctcaattcagtgacggacctgggtcttgtcggggacgttttccgcgatccggcgcgcctcgccaagctccccggaaacgccgccatcggccacgtgcgctactcaaccgccggcgcctcttcgaggcgcaacgtacaaccgttcctcgccgcgtaccgattcgggcagttggctgtggcacacaacggcaacctcgtgaactaccaggcgctgcgcaacaaactcgaggcgcagggttccatcttcaacacctcgtcggacacggaggtcatcctgcacctcatctcaacctcgctctcgcgcccgctgctctcgcgcatctgcgacgcctgcgagcgcctcgccggtgcgtactcgctgttgttcatgactgccgacaagctttttgccgtgcgcgatccgttcggcttccggcccctggtgatgggccgacgccccaacggcgccgtggtgttctcgtcagagacctgcgcgctcgacctcatcgacgccacctatgagcgcgaggtggagcccggggaggtggtggtcgtggaccgccgcgacatgtcggtgtcctacgcctgcctcgtcccacatcgcccgcgcaagtcatgcgtgttcgagcacatctacttcgcccttcccaactccgtcgtgtttgggcacgccgtccacgagcgccgcaccgcgtacggccgcgcgctcgccgaggagtcgcccgccccgaccgcggacgtcgtcatccccgtgcctgactcggggttctatgcggcgctcggcttcgcgcaggcgtcgggactcgagttccagcaaggtcttatccggtggcactacagcggccgcagcttcatacagccatcgcaggcaatccgtgaccttgccgtcaagctcaaactcgcgcccgtgcgcggcgtcattaccggcaagagcgtggtcgtcgtcgacgactcgctcgtgcgcggcaccacctctagcaagattgtgcgcctgctccgcgatgccggcgcgcgcgaggtgcacatgcgcatctccagccccccagtcgtcgggtcctgcctctacggcatcgacacgccgagcgaaggcgagctgatatccaacaggatggacctcgagggtgtgaggaggaccattggctgcgactcgctcgccttcctctctctcgacaagctccacagcatctacggcaatgaagcacatgagttctgtgacgcctgcttctcacggaactacccggtgctgcccacagtgccggagccagtcccggagctggtgtctgccttcgaagactaacaagaaggggagtggatctatactctgcatgcttactattaccatagaatctagactcaattttgggcatagcatttttgcctttgcaaatgcattcatccatctgaattttgaggttacaaagtttagacactgatcgaactgctattgtgggttcgatctaatctattgtattgctatatgatgatgacgacgacaatgaatgatagaaaaattatttcaatggtacatgtttaccttttcactatatcaggtttagggtctgtttagtttgtggctaattgtattgaataactaaccttagacagaaaagttaggcaaaatataaagttaggcagcaaaccaaacatgccttaatctgctgctgtttagagtttcttcagaggtcgtcctcaccttcttggatcctgcttaacgttcttgcataacttccatatttggctgagtgtctatcgctaacaatggaccagtttaggatatggcaaatatgcattcagagttagtttgtgctagctgaaggctgatgtgtataagcgagtcaaagttaaggaatgcaattgtctagcttttcaaaattcttagcttctacgaattcgttgcaaagtttgcatcaccagagttcgtgatcctttttctagagttgggttgggctgtccataaaatgcgccaacctgaatcactagtgaagtgccttttcctaggtattgttgcattggaccgcgaatagtatatgctacatatattttctaaattttcttaatgtcccaaggcaagcaaggaattcctaggaccttgctgcactagactagcactagtggtatgataccctacacattgtaatcaggactgactacaatactactcccatagttctgaattttaagtgatttcaactcttttggagagtgaaaacaccttaatttagccgaagttaagagaattacaaagattcacgacatcaaggctgtttgagatgcatatattatatgatccaacttattttgaactaacacttagttcaaaataag

SEQ ID NO: 31274 - DNA, 2077 bp, Zea Mays
atccttccatcattcgattacacacacccgaccaaaggtccaaagcacacgagacaatcgcaagacaacaacagcagcagaggaaccaagaggaaagcaaacctcgccggccgcacccctccatctctgatcgcccgctcattctcattcattcattcattcccctcgcgtcgcgtgattcgattggattccgttcccccgccccgttccgttccttcagcgccgctgccgctgccgctgcggctgcgccgaggccccagcgagtccccgaggcccgaccccaaaggctgcggcctgcggccgtcgcagtcccatcgattcctcccgcttggctttcccacccctcgaagccgaatccgatggttccacccgttgaccgcctccgccatcggaggccgcgccgcctcctccccgccttcttcctcggtccccgcgcccgcctcctcctatagatataccgcccgcgcatcgctccatggcggtcggcggcgacgacgacagcatggagcgggacttcgccgccaggctgcgcctcgcgcattcgccctccccggccacgcctgccgccgccgcctcatcctcccccaccgccgctggggggatcgccttccgcgcgccgcaggagcagttcaccgccgacgacttcgtactcggcaagatctacggcgtcggctcgtactccaaggtggtgcgggccaagaagaaggacactggtcgcgtctacgcgcttaagatcatggacaagaagttcatcaccaaggagaacaagatctcctacgtcaagatggagcgtattgtactcgaccagctcgaccaccctggcgtcatcaggctcttcttcactttccaggacacatactccctctacatggcgctcgagtcgtgcgaaggcggggagttattcgaccaaattgttcggaaaggtcggctctctgaggacgatgcacggttctatgctgctgaaattgttgatatattggagtacttgcatggccttggcctaattcatcgggatgtcaagccagaaaatctactgcttacttctgatgggcacatcaagattgctgactttggtagtgtgaagcctacaagggatactcctatcaaagttctcccaaattcaactactgaaagggcctgtacatttgttggaaccgctgcatatgtaccacctgaggtcctgaactctgccccagcaacctttggaaatgatttatgggcattgggatgcacactgtaccaaatgctttctggctcttcgccatttaaagatgctagtgagtggttaattttccagagaatcattgcaagggacctcaaatttccagagtatttttcagctgaagctagagatcttgttgacaaattgctggcaagaattcctggaccccggcgagtctgtagtcttaatatcaaagctgaagaagattaataagctagcaaacaagaagatccagttgatcctcactgacaaacctcaattgatctgtgttgacccttcaaaaatggtggccaagggaaacattatttggtctgatgacccaagtgaactcagtgtgcaagtatcagattcttcacattttagaatatgcacgccaaagaaggtgtcaacatttgaggatgcgaaacagcgtgcttggcaatggaagaaggcaattgaagacctccaacgctgccaaaggaattaattttcaattcaaatcaaaactctaaaatgtcgaattaggcactgttaatacatcatatccttttcacttgggaggaacatgagggggtttatttctcctgcatcctgctccaatgcctggttgcaaggaacttgctactcgctaattcacacactgaatgatggcccccaattttttcccttcccatccatgttttcaaatagtacacaattttgtttgtcacttttgtgaaccgttggagcagatatcttcaaaacaggctgcagtctggaaatattgacacaggaaactattttaacagtctgccatacttgattctctttgttgtcttttgttcaagagcatctatatcagagtaattctttggttttgccagatatcgaatgata

SEQ ID NO: 31275 - DNA, 2375 bp, Zea Mays
atccttccatcattcgattacacacacccgaccaaaggtccaaagcacacgagacaatcgcaagacaacaacagcagcagaggaaccaagaggaaagcaaacctcgccggccgcacccctccatctctgatcgcccgctcattctcattcattcattcattcccctcgcgtcgcgtgattcgattggattccgttcccccgccccgttccgttccttcagcgccgctgccgctgccgctgcggctgcgccgaggccccagcgagtccccgaggcccgaccccaaaggctgcggcctgcggccgtcgcagtcccatcgattcctcccgcttggctttcccacccctcgaagccgaatccgatggttccacccgttgaccgcctccgccatcggaggccgcgccgcctcctccccgccttcttcctcggtccccgcgcccgcctcctcctatagatataccgcccgcgcatcgctccatggcggtcggcggcgacgacgacagcatggagcgggacttcgccgccaggctgcgcctcgcgcattcgccctccccggccacgcctgccgccgccgcctcatcctcccccaccgccgctggggggatcgccttccgcgcgccgcaggagcagttcaccgccgacgacttcgtactcggcaagatctacggcgtcggctcgtactccaaggtggtgcgggccaagaagaaggacactggtcgcgtctacgcgcttaagatcatggacaagaagttcatcaccaaggagaacaagatctcctacgtcaagatggagcgtattgtactcgaccagctcgaccaccctggcgtcatcaggctcttcttcactttccaggacacatactccctctacatggcgctcgagtcgtgcgaaggcggggagttattcgaccaaattgttcgggtcggctctctgaggacgatgcacggttctatgctgctgaaattgttgatatattggagtacttgcatggccttggcctaattcatcgggatgtcaagccagaaaatctactgcttacttctgatgggcacatcaagattgctgactttggtagtgtgaagcctacaagggatactcctatcaaagttctcccaaattcaactactgaaagggcctgtacatttgttggaaccgctgcatatgtaccacctgaggtcctgaactctgccccagcaacctttggaaatgatttatgggcattgggatgcacactgtaccaaatgctttctggctcttcgccatttaaagatgctagtgagtggttaattttccagagaatcattgcaagggacctcaaatttccagagtatttttcagctgaagctagagatcttgttgacaaattgctggatgttgatccaggcaaaaggccaggtgcaggacctgatggttattcttccttgaaggagcatcctttcttcagaggcatagactggaagaacctgaggaagacacggccacctaagctcgcaatcgatgcaaatgcaaatgaagatgaggatagccaagattcaaattggttggcacacatgggaagtgtggcagtcaaccaacagtcaaatactgttggtaataatggtgccccgtcatcatctgaagtgcgctcccatatatctaaattagcttccatcgactcctttgactcaaaatggcaagaattcctggaccccggcgagtctgtagtcttaatatcaaagctgaagaagattaataagctagcaaacaagaagatccagttgatcctcactgacaaacctcaattgatctgtgttgacccttcaaaaatggtggccaagggaaacattatttggtctgatgacccaagtgaactcagtgtgcaagtatcagattcttcacattttagaatatgcacgccaaagaaggtgtcaacatttgaggatgcgaaacagcgtgcttggcaatggaagaaggcaattgaagacctccaacgctgccaaaggaattaattttcaattcaaatcaaaactctaaaatgtcgaattaggcactgttaatacatcatatccttttcacttgggaggaacatgagggggtttatttctcctgcatcctgctccaatgcctggttgcaaggaacttgctactcgctaattcacacactgaatgatggcccccaattttttcccttcccatccatgttttcaaatagtacacaattttgtttgtcacttttgtgaaccgttggagcagatatcttcaaaacaggctgcagtctggaaatattgacacaggaaactattttaacagtctgccatacttgattctctttgttgtcttttgttcaagagcatctatatcagagtaattctttggttttgccagatatcgaatgata

SEQ ID NO: 31276 - DNA, 2375 bp, Zea Mays
atccttccatcattcgattacacacacccgaccaaaggtccaaagcacacgagacaatcgcaagacaacaacagcagcagaggaaccaagaggaaagcaaacctcgccggccgcacccctccatctctgatcgcccgctcattctcattcattcattcattcccctcgcgtcgcgtgattcgattggattccgttcccccgccccgttccgttccttcagcgccgctgccgctgccgctgcggctgcgccgaggccccagcgagtccccgaggcccgaccccaaaggctgcggcctgcggccgtcgcagtcccatcgattcctcccgcttggctttcccacccctcgaagccgaatccgatggttccacccgttgaccgcctccgccatcggaggccgcgccgcctcctccccgccttcttcctcggtccccgcgcccgcctcctcctatagatataccgcccgcgcatcgctccatggcggtcggcggcgacgacgacagcatggagcgggacttcgccgccaggctgcgcctcgcgcattcgccctccccggccacgcctgccgccgccgcctcatcctcccccaccgccgctggggggatcgccttccgcgcgccgcaggagcagttcaccgccgacgacttcgtactcggcaagatctacggcgtcggctcgtactccaaggtggtgcgggccaagaagaaggacactggtcgcgtctacgcgcttaagatcatggacaagaagttcatcaccaaggagaacaagatctcctacgtcaagatggagcgtattgtactcgaccagctcgaccaccctggcgtcatcaggctcttcttcactttccaggacacatactccctctacatggcgctcgagtcgtgcgaaggcggggagttattcgaccaaattgttcggaaaggtcggctctctgaggacgatgcacggttctatgctgctgaaattgttgatatattggagtacttgcatggccttggcctaattcatcgggatgtcaagaaaatctactgcttacttctgatgggcacatcaagattgctgactttggtagtgtgaagcctacaagggatactcctatcaaagttctcccaaattcaactactgaaagggcctgtacatttgttggaaccgctgcatatgtaccacctgaggtcctgaactctgccccagcaacctttggaaatgatttatgggcattgggatgcacactgtaccaaatgctttctggctcttcgccatttaaagatgctagtgagtggttaattttccagagaatcattgcaagggacctcaaatttccagagtatttttcagctgaagctagagatcttgttgacaaattgctggatgttgatccaggcaaaaggccaggtgcaggacctgatggttattcttccttgaaggagcatcctttcttcagaggcatagactggaagaacctgaggaagacacggccacctaagctcgcaatcgatgcaaatgcaaatgaagatgaggatagccaagattcaaattggttggcacacatgggaagtgtggcagtcaaccaacagtcaaatactgttggtaataatggtgccccgtcatcatctgaagtgcgctcccatatatctaaattagcttccatcgactcctttgactcaaaatggcaagaattcctggaccccggcgagtctgtagtcttaatatcaaagctgaagaagattaataagctagcaaacaagaagatccagttgatcctcactgacaaacctcaattgatctgtgttgacccttcaaaaatggtggccaagggaaacattatttggtctgatgacccaagtgaactcagtgtgcaagtatcagattcttcacattttagaatatgcacgccaaagaaggtgtcaacatttgaggatgcgaaacagcgtgcttggcaatggaagaaggcaattgaagacctccaacgctgccaaaggaattaattttcaattcaaatcaaaactctaaaatgtcgaattaggcactgttaatacatcatatccttttcacttgggaggaacatgagggggtttatttctcctgcatcctgctccaatgcctggttgcaaggaacttgctactcgctaattcacacactgaatgatggcccccaattttttcccttcccatccatgttttcaaatagtacacaattttgtttgtcacttttgtgaaccgttggagcagatatcttcaaaacaggctgcagtctggaaatattgacacaggaaactattttaacagtctgccatacttgattctctttgttgtcttttgttcaagagcatctatatcagagtaattctttggttttgccagatatcgaatgata

SEQ ID NO: 31277 - DNA, 3366 bp, Zea Mays
ggagaacacgagtgccgttgattagataggaaatggtcgtgatcaaatcaaggtttacatgaccgtcatggccgtagatcggtaaacggacggtcgagattaactagtggcgcgtatcgattcggtgtagtggggagccgtccgatcttgatcggaggggtgcgctcaggtattgtttatttaaatctggtccgtagatctcgggatcaaaagctgttgtgcgtacccgttcacatgaaactctatctaatctggaccgctcagatcagatcttgcggccagggatcacagatacccctttgcccgaaccatttgtcacatgagcccctcgatttctataaaaataacccgcagtacgactgagtctggtagattttacagaataaaccttatgcttcttggtattggtgcacgtagtccaggaaataatgaaaataggaaaaaggaatttagaaattgattttgggtataaaaataattacataaactcatttaattcatagaaaattcatattaaatcctttttgatccattcctgtggcattaattttattttaatgttgtttatcacctagcaactttgtttagccatgaaatttgaattaaaattattcactagatttattctatattaaacacttaaaacttgtaaatccctaactccttcgttttaactccgatttgatccgttcaagttgcgttagtctcgtataaatatttaatatgcaataaccatatttattataccttgtctcattattttataattagatctgtagttaactgatgttagttagtctggttaaactgcttatcactattgactacgagaatatgatctatggtcaatttataacttaaattaaagtttatatagttatttatagaataacctctcttatgaattatattaaccaatttataatacagtttaatattttaatcatacagatcttttataaaatcataactccttaatcgtaactttgattttagtggttcttgatccctcgatctcgtagcgacgcgtagattattattattcagtttgtacttatgtttgatgtgatgttaattttgtctataccatgtctgtttgtactgctacgactagcagcgaggtttcgagtcacctaaagttcatcctgtcacctggaatctcaagtgtcaggcaagttgtgcccttgatcacttcttttacccattcatgttcttgttattcataatgatctgcataggataattttgctgggacccaataggttaccctagattttgactatctttataccttgttgaaacactggttttactactaaagttttgggtagtacatgcttgtcacacccggtttcagaaggcaaaccgaatgcgaactatgtacgtgccaggatcagaattcacgtacacagcgattacataaatgaacatcatcgcacagtgctcgaataataacataaaagagtattaacttattacatcacagggtcatagacatccacatagtcatcaagcttaacagttaaattaaagtgctagcgaaacacagtaaagataaggccttcacaggcagctgactgggggttgccgccaacccacacctagaattcgtcgtaatcttggaactcctggaagtctccttccacggcttcgccttctcctgagcagtgattacaatgcggacaacctggtgtttggtggtaaagcaaggatgagtacacatcaacgtactcagcaaatgtctcgtttggctgaagtggactagctttatgtggggttaagctcaagcagttgcttttagttggtcaggtatttattattagtggaagccaagttttatcagataaccaacccatgaaccatttcctcaccgaggaaacaccaatatcagcatcgaaccaaaaccataaataaagccattgtatctcgaaccatttgtatctctaatcaaagaggatcccaaggctgctcttaaccgtgagcacggctgatataccagtttcactaccctctgcagaggttgcacactttacccatgagtcatgattccctttctacccggggagagctaatccccattgaccactacctaggtggtccggcagggcatcactacgtagcttttacaaagattccctagagatcatagctgcccgttaggtttctccagtttgataaacacagtactcctccccgcaggagagtgactaacaaagagcaaaacgaaagaacctcggcactcagcctcggtagagcaagcactgtgcctggaccccattgacggcacgacggctaagcaactacacctctagttcatctaattaatcagctaagggcatcccatttcaccctcatggttgcactgttatcccgggtggtctctcaacgaacaagtccttacggagaggtactcaggaaacagcctgagccccctagagtatcacaagatcatcaacatcatcaggataacagtatcataaatagtcacatcatgttcattgattaagttaaggcaatagcagagtgctaaccataacagcccgtaaggtcatcgaggataaagtaaagtgtaaagctagtcaatccttaggtttcaagtaagtaatgcagggtagtaagttataaatgaataggacataatgggacagaggacacttgccttcaccaaactgctgatcagggacttcctctgcaacttcctcgggaaacacagactgctcgttgtctacgtaaagtaatcattcacactatgcacttgggaagataacaaacaaaagcaacataccaaacatatgcagcaaagagatcacaagttcatagcagaaaaagggataggcactctggtgttccctaggtctggggtagaggactatacaaagtggttcattatccactaatcaggtttaagtcagtggtgggattaaattattacatggttttaagctcctaaacctatgtgtttaagtccctaaacttaagtactccaacttttattaaagtctaccaacatctaattatctcaaatagggttccaataaccttaatcctatcctagtgattaatcattaattggtacatggaaacagcagggaaacattgtttaaatagatagacaaaaacatcatgagcattttgcaatttgaagcacctcatttggagttcatatgacaaagttatgaattttacaagtttaggggttaaaaatataccctaaatacctattttgaattaaataaatggcccagggacctaaccgagagaaaccaggggcggcgggttcaaattccataaaaccgagggtctctttaagaaaacgcgcgggcgaaggggtatcgggctactacagccgtcaaatctaaagcgaac

SEQ ID NO: 31278 - DNA, 748 bp, Zea Mays
cgaaaggctgaggggggcgggggagtgggcttctttcctcttttcttttattctgggattgttttctcttttctttttattttctctatttgattcaaatccaaataagccacaaattcaaattagactttccaagaattatgcaccaagcaaaagtgaaatctagggttcgacatgatgcaacaactcatactcccttagggtttaaccatattaaactataattacaaataaaataagcacttttctcctatagaaatgaaaaagaaaagaatgaggaaggatgagaaaagggaagtaacacctgaatttgtgaatatgagcaaagaaattttatacccccaaattcagggtgttacaatgctattgctttatatggttttgggtatagaggtattcactactcatgattacacttgttattatttgttcattattctatgttcatgataagatcattatgttaatgggaacatggagaaccacccgggaaaacagtgctaccacaagggtataatgggacgcccttggctgattaactaggaaagctagtggagggctaccttacccgaaaggggcaagggcagtaggggagtggtcagtgtagggaggtccttggttgattttgctgcgatggcggtcaggcaagaaccctgcactggagcttcctataaactgtagcgggtagtctgaagctagtggaactttgtaaaggcctcgtagtggtaccctgcctcgcttccttggt

SEQ ID NO: 31279 - DNA, 6088 bp, Zea Mays
cctagtataacaaccatgatctaatccaaataatcagatcttaactagtttaatctagtcacaccaacctaatctagattctatctaatctattatgatctaatctagagagagttagttaatactggtacaaaagataaggccatacccctaagcctaaattggtgacttagatcaactcggccatacacaacaacttgacctacataataggttacataacctatcccacccatctggaatcaaacaaccaaaccagattcagactaatctgatttaatctcatagccatctactaaactagctgctctacctacgtgttaacctcttctcccaaacccggaaggagacaccaaggctcaagaaggaaaagatcaacctcgtcaaggctaaactataagtaaagcttttcacatccctgtccttacaaatctcgaggacgagattatttttaagggggtaggatttgtaaagccctaaaattcgtataaggcaaaaataataaaataataaaaaatacatgtatttttcatgaaagtgtttttggaattatttaaattcattgttgtgcatactcacttaagagaagtaaagtagacaaatagcaaataaataaatatagaaatatgcatctcatgccgaggttcttgtaattgtgcatttgtgtttaaattcgcaagacaagtttaagttaaaaaatatagaatttgaaaagggaggaggaaaacaatatacactatgaagaaatatatatatatatatatataggaatgaatatattcttttaggctaatacatgttggccgaagtcctaatcgcagccagcccacgggcacgttcgtttttttcttctttattgtgttggcggcattctgcttcatcctgacatatggtatgacatcagccatgcatgtgggccccagccggcagattcatcccctttccctggatcagctcgtacggtacccgtactgaatgcccgttaatccggatctgagcgaaacaaactcagctatgtggccgagatcgtgccccgccgtttgggtcctagggattcctcagggctataaagaaacgcatcaggcagcctcttccatcgcaccgccatggaccttccatcttctcctccacggtactttctccacccagtacgacagtaccccaggtcgacctccatggcgcgtggcaactcaagcgctggctctctccctcccttcaacactccagggccaccggcccctgcgcctccctctactccacacggccagcatggcagccggacgctgagatccatggcgagctcctcgcgccgtctactttcctcatcggccgtgacttctcgacgctcgtcctcaagctcggccgtgtcggtcgtccctgaccccaccttggtgcagcgctaccagccgccatgacgtcgtcatcttcgtcgccgagccagacgccgccactgtccatacctgtcgccatggtggatcgaagggtcccgtcttgcccctctgctcggcttcctgctcccacgtccgtttcacccgtcggcagagggcttcggcactccaatccttggtatggatcttccccatctagttcacttgctcactgcggcgtgtagaatatttttgtttggtatctgggttgccggtcagagttacccgatgaacttgccgccatgggtgctctgctccgccatgtctgctggaggggagaacacgagtgccgttgattagataggaaatggtcgtgatcaaatcaaggtttacatgaccgtcatggccgtagatcggtaaacggacggtcgagattaactagtggcgcgtatcgattcggtgtagtggggagccatccgatcttgatcggagaggtgcgctcaggtattgtttatttaaatctggtccgtagatctcgggatcaaaagctgttgtgcgtacccgttcacatgaaactctatctaatctggaccgctcagatcagatcttgcggccagggatcacagatacccctttgcccgaaccatttgtcacatgagcccctcgatttctataaaaataacccgcagtacgactgagtctggtagattttacagaataaaccttatgcttcttggtattggtgcacgtagtccaggaaataatgaaaatagaaaaaaggaatttagaaattgattttgggtataaaaataattacagaaactcatttaattcatagaaaattcatattaaatcctttttgatccattcctgtggcattaattttattttaatgttgtttatcacctagcaactttgtttagccatgaaacttgaattaaaattattcactagatttattctatattaaacacttcaaacttgtaaatccctaactccttagttttaactctgatttgatccgttcaagttgcgttagtctcgtataaatatttaatatgcaataaccatatttattataccttgtctcattattttataattagatctgtagttaactgatgttagttagtctggttaaactgcttatcactattgactacgagaatatgatctatggtcaatttataacttgaattaaagtttagatagttatttatagaataacctctcttatgaattatattaaccaatttataatacagtttaatattttaatcatacagatcttttataaaatcataactccttaatcgtaactttgattttagtggttcttgatccctcgatctcgtagcgacgcgtagattattattattcagtttgtacttatgtttggtgtgatgttaattttgtctataccatgtctgtttgtactgctacgactagcagtgaggtttcgagtcacctgaagttcatcctgtcacctggaatctcaagtgtcaggcaagttgtgcccttgatcacttcttttacccattcatgttcttattattcataatgatctgcataggataattttgctgggacccaataggttaccctagattttgactatctttataccttgttgaaacactggttttactactaaagttttgggtagtacatgctattgctttatatggttttgggtatagaggtattcactactcatgattacacttgttattatttgttcattattctatgttcatgataagatcattatgttaatgggaacatggagaaccacccgggaaaacagtgctaccacaagggtataatgggacgcccttggctgattaactaggaaagctagtggagggctaccttacccgaaaggggcaagggcagtaggggagtggtcagtgtagggaggtccttggttgattttgctgcgatggcggtcaggcaagaaccctgcactggagcttcctataaactgtagcgggtagtctgaagctagtggaactttgtaaaggcctcgtagtggtaccctgcctcgcttccttggtagaggtgtatggagtctgatcaactccgtggcaaatgggtaacacgacttgtgggtaaagatgggcaacctctgcagagcgtaaaactggtatactagccgtgctcacggtcatgagcggctcggacactcacatgattaatctatggaacttaaacttaatctgtcatttcattgcatttgggattattttattattacttttatttattatttctaaggtttggtatttacttacacttagtaactgctaataaaattttgaccaacttataaaagcaatgctcagcttcagcctttatttcattgatcagccttacacttcatgaactcccacctttggcgagttcatgcacattattccccacaacttgttgagcgatgaacgtatgtgagctcactcttgctgtctcacacccccccacaggtcaagaacaggtaccacaggatgaggcacatggaggatgctgcgatgtgttcgtgagaggtctaggccgtcgtcttccagtcaactttgggttgctggaccgctgtctccttataatgtaattatttattttgtatagaacttctattatgtagtaaagatgtgacattcgatcctgtgccatgattcatcatatgtgtgagacttggtcccagcacacatggtgattatgttcgcgcccgggtcttggtgcccctgaaatccgggtgtgacagaagtggtatcagaggaatgttgactgtaggacgaaacctagatagaactagacaacccttacctacttaccttactctgattctttcctaagcttatcttgatcatttctcatctatttccgctttattctgattattcttaccttttctttctaaagacaaatgtggatttcacactttgaaatcccatggctaaagtgaccattatgtataggagacctaatcttaaagaacaaaaaaaccaaaactatttttatacatatctatttgctgcaatgtttgttcttatgataattgtgtgatttggatctttgattgagtgggatgagttgtggagtagtgtccacaattgcatctgcatatacttaggcatatatataactaatcaaacttagattgtccctcattaaaaatgtatctagcctaatagatccatcttatcttgaaagactctatcttatcttaatggattcatcttatcttgaaggaatcatcttatcctaaccactgtacttatctcatcctagtataacaaccatgatctaatccaaaataatcagatcttaactagtttaatctagtcacaccaacctaatctagattctatctaatctattatgatctaatctagagagagttagttaatactggtacaaaagataaggccatacccctaagcctaaattggtgacttagatcaactcggccatacacaacaacttgacctacataataggttacataacctatcccacccatatggaatcaaacaaccaaaccagattcagactaatctcatttaatctcatagccatctactaaactagctgctctacctacgtgttaacctcttctcccaaacccggaaggagacaccaaggctcaagaaggaaaagatcaacctcgtcaaggaaggagaggaagtcaaactcgatcttccgatgcgttaccactcaacacggaattctttcccatcataaacttgcttaccctaggttatccttgccctaacctaccttttatcctatacaatcaggtgactatacatatatatacccatgctttcataaccacttttaacatgaaacttattattcttaaactaattagaagttaaaggctaaactataagtaaagcttttcacatccctgtccttacaaatctcgaggacgagattatttttaagggggtaggatttgtaaagccctaaaattcgtataaggcaaaaataataaaataataaaaaatacatgtatttttcatgaaagtgtttttggaattatttaaattcattgttgtgcatactcacttaagagaagtaaagtagacaaatagcaaataaataaatatagaaatatgcatctcatgccgaggttcttgtaattgtgcatttgtgtttaaattcgcaagacaagtttaagttaaaaaatatagaatttgaaaagggaggaggaaaacaatatacactatgaagaaatatatatatatatatagaaatgaatatatttttttaggctaatacatgttggccgaagtcctaatcgcagccagcccacgggcacgttcgttttttttcttctttattgtgttggcggcattctgcttcatcctgacatatggtatgacatcagccatgcatgtgggccccagccggcagattcatcccctttccctggatcagctcgtacggtacccgtattgaatgcccgttaatccggatctgagcgaaacaaactcagctatgtggccgagatcgtgccccgccgtttgggtcctagggattcctcagggatataaagaaacgcatcaggcagcctcttccatcgcaccgccatggaccttccatcttctcctccacggtactttctccacccagtacggcagtaccccaggtcgacctccatggcgcgcggcaactcaagcgctggctctctccctcccttcaacactccagggccaccg

SEQ ID NO: 31280 - DNA, 3223 bp, Zea Mays
tcgaagggtcccgtcttgcccctctgctcggcttcctgctcccatgtccgtttcacccgtcggcagagggcttcgacactccaatccttggtatggatcttccccatctagttcacttgctcactgcggcgtgtagaatatttttgtttggtatctgggttgccggtcagagttacccgatgaacttgccgccatgggtgctctgctccgccatgtctgctggaggggagaacacgagtgccgttgattagataggaaatggtcgtgatcaaatcaaggtttacatgaccgtcatggccgtagatcggtaaacggacggtcgagattaactagtggcgcgtatcgattcggtgtagtggggagccatccgatcttgatcggaggggtgcgctcaggtattgtttatttaaatctggtccgtagatctcgggatcaaaagctgttgtgcgtacccgttcacatgaaactctatctaatctggaccgctcagatcagatcttgcggccagggatcacagatacccctttgcccgaaccatttgtcacatgagcccctcgatttctataaaaataacccgcaggacgattgagtctggtagattttacagaataaaccttatgcttcttagtattggtgcacgtagtccaggaaataatgaaaataggaaaaaggaatttagaaattgattttgggtataaaaataattacagaaactcatttaattcatagaaaattcatattaaatcctttttgatccattcctgtggcattaattttattttaatgttgtttatcacctagcaactttgtttagccatgaaacttgaattaaaattattcactagatttattctatattaaacacttaaaacttgtaaatccctaactccttcgttttaactccgatttgatccgttcaagatgcgttagtctcgtataaatatttaatatgcaataaccatatttattataccttgtctcattattttataattagatctgtagttaactgatgttagttagtctggttaaactgcttatcactattgactacgagaatatgatctaaggtcaatttataacttgaattaaagtttagatagttatttatagaataacctctcttatgaattatattaaccaatttataatacagtttaatattttaatcatacagatcttttataaaatcataactccttaattgtaactttgattttagtggttcttgatccctcgatctcgtagcgacgcgtagattattattattcagtttgtacttatgtttggtgtgatgttaattttgtctataccatgtctgtttgtactgctacgactagcagtgaggtttcgagtcacctgaagttcatcctgtcacctggaatctcaagtgtcaggcaagttgtgcccttgatcacttcttttacccattcatgttcttattattcataatgatctgcataggataattttgctgggacccaataggttaccctagattttaactatctttataccttgttgaaacactggttttactactaaagttttgggtagtacatgctattgctttatatggttttgggtatagaggtattcactactcatgattacacttgttattatttgttcattattctatgttcatgataagatcattatgttaatgggaacatggagaaccacccgggaaaacagtgctaccacaagggtataatgggacgcccttggctgattaactaggaaagctagtggagggctaccttacccgaaaggggcaagggcagtaggggagtggtcagtgtagggaggtccttggttgattttgctgcgatggcggtcaggcaagaaccctacactggagcttcctataaactatagcgggtagtctgaagctagtggaactttgtaaaggcctcgtagtggtaccctgcctcgcttccttggtagaggtgtatggagtctgatcaactccgtggcaaatgggtaacacgacttgtgggtaaagatgtgcaacctctgcagagcgtaaaactggtatactagtcgtgctcacggtcatgagcggctcggacactcacatgattaatctatggaacttaaacttaatctgtcatttcattgcatttgggattattttattattacttttatttattatttataaggtttggtatttacttacacttagtaactgctaataaaattttgaccaacttataaaagcaatgctcagcttcagcctttatttcattgatcagccttacacttcatgaactcccacctttggcgagttcatgcacattattccccacaacttgttgagcgatgaacgtatgtgagctcactcttgctgtctcacacccccccacaggtcaagaacaggtaccacaggatgaggcgcatggaggatgctgcgatgtgttcgtgagaggtctaggccgtcgtctcccagtcaactttgggttgctggaccgctgtctccttataatgtaattatttattttgtatagaacttctattatgtagtaaagatgtggcattcgatcatgtgccatgattcatcatatgtgtgagacttggtcccagcacacctggtgattatgttcgcgcccgggtcttggtgcccctgaaatccgggtgtgacaggataccttagtaaaaatatcaacgtcatccacgagagtttgcatctctacttttctctttaagtttccgcatttatgagagcacctagaggggggtgaataggtgatcctgtaaaaatcaaatacttgtagccacaaaaacttggttaagtgttagtgcaatatgaccaagtggctagggaccgagcttttgtaaaacacaatggtcacaaagaaagacaacacaaaagacacagtgatttatcccgtggttcggccaagtataacacttgcctactccacgttgtggcgtcccaatggacgagggttgcactcaacccctttcaagtgatccaatgatcaacttgaataccacgatgttttcctttcttatgctttctcccattcacgaggaatctccacaacttggagcctctcacccttacaattgatgatcacaaagaagcatgaaagtgagggagggaagagtaagacacacaagactcaaaacaagagcacaatcacgcacacaagccacaacttgagctcacaacacaactcgaggagttctctactcaaatggggctcaagtcact

SEQ ID NO: 31281 - DNA, 144 bp, Zea Mays
ccgagagcgccgtccgcgtcgaatggtactcgccatcgaactccgtcatggtggtgatcgcaatctgtcttcaagcttcgagggatcaaagatcaagcgttggcgaccaagtgatccagttcttcgagttctgcgagattgaag

SEQ ID NO: 31282 - DNA, 455 bp, Zea Mays
cccctgcccgcctgccccgacgaggcgacgacagatgcacagtactactgtgtcatttgcgaaatccagttgagcgatctgcacgtcacctgttgctgcaccagcatgtggctttctactgagctagcgcggccggtgatgtaaaaattcgcgtaggcgtgttgttcacaacctcgtttgccgcttgtctagtatgccatggaatgaacagcccttcaaactctttagaagctactcagcttcgagctcagaggggaaaaaccggtgtggagctgtagtagcttgcctatctcggacgtcaaaggtagccccttctcaatttcgaaaatttcctgtttttcgctggggggccgaaattttttcttttacgaaactgtaaacccttctcggcgctcaatcaaggttggacaaaaactatctggcaggacaagccatcgcttgataaatttactggc

SEQ ID NO: 31283 - DNA, 3389 bp, Zea Mays
cgcctggttgtgcctcctcctgttcggcttcggccgttccctgcttgatctcgacttgctgtagcggtttacagttacgtgtgcctccattagctaaaggccaaacggctccgcatcgcgcggtgggtgtgtcttacaggtagggacgctaagaggtggcccgcgggtcagagtcgctggtgaagtggggttagtgggggcgggtatgtaatcatcgcagggttaaagggccatttgggtgtggtttattattaccacgaggggaggggagctcgagctcgctgctagtgctaatggcggagagcgatggtggcagcgaggcgcagagtccgagccctgatccaaggtccggggacggggcgaaccctgacccgcgcccgccgcggccgcagctcaccaagtcgcgcaccatctctggttctgttgcagcctccatattggccgctgatagggtagcaggaggaggaggcggaagcggcggaggcggtctaagggacagcatcctcgttcgccgctcctccacggcgcccctcccgccgtatacggcgtcagcggcgggggcgtcctcggcgccgcggcggctcaccgtcgccgtggacgacccctcctacgcggcacccaacggcggcgtgcttgaccgggactggtgctacccgtcgttcctaggtccgcacgcctcgcgcccccgcccgccgcggcagcagcagaccgcgacgactaccgaacgccgaagcgctaaccccaccgtgccggtgccgccgagggtggcggtgtcgcagcgggaggaggagaagagcctggcctccgtggtgaagcgcccggcgctgcttgaggagcggaggacgcctcctcctacgctcccgcccccacgcgctccgcgatttgatctctctccgtatctctcactcctgctggtcataactatcgcaagctctaccctcgctgtttggcaatggataaaagttatgggcctccaggaaaagatcagatcatgcagcgaggccaatgctggggaccgtgatggtaccgagaaggtgtcttggattgacagggaccatggctctgctttttttggttcgcggagatggaatttagctcaatctagtaccatctttgctcttgcaattcctttgtttctgtttaagtacattgatctgctccgacgcagacaaacaaattccatgagaggaagaagtggtgaggaagaagtacctctcaagaagaggatcgcctacaaagttgatgtgttcttctcaggacacccatatgccaagcttcttgccctcctattagccaccataattctcattgctttgggtggaattgcgctgtatgttgttagtggaagtggattcctggaggctctctggctttcctggacttttgtggcagattctggaaaccatgccgaccagattggcttggggccgaggattgtatccgtgtcaattagctctggaggcatgctggtgtttgccacaatgcttgggcttgtgtcagatgcaatatcagagaaggtggattcttggcgcaagggaaaaagtgaggtgatagagatcaaccacatactaatcctcggatggagtgataagctgggctctcttctgaagcagctagctatagcaaacaagagtattggtggtggtgtagttgttgttctagctgaaagggacaaggaagagatggagatggacatagcaaagttagaatttgacttcatgggaacatctgtaatatgcaggagtggcagtcctctaattctagcagacttgaagaaggtttctgtttctaaagcacgggccattattgttttagcatctgatgaaaacgcagaccaaagtgatgcacgggcattgcgtgttgtgctgagtctgactggagtcaaggagggtctaagaggccatgttgttgtagagatgagtgatcttgataatgaacctttagtgaaactggttggtggtgaactaattgaaacagttgttgcccatgacgtgattggacgtctgatgatacaatgtgcactccaacctggccttgcacagatatgggaagacatattgggatttgaaaatgcagagttttatattaagcaatggccagaattggatggcatgcggtttggggatgtgttgatctcatttcctgatgccgtaccttgtggagtcaaggttgcttcaaaatctggaaagatcttgatgaatcctgatgatggttatgttttaagagaaggagatgaggtccttgttattgcagaagatgatgatacttatgctcctgcccctctaccagaggtgaataagggttttctgcctaacataccaacccctcccaaatatccagagaaaattttgttctgtggttggcgccgtgacatccatgatatgataatggttctggaagcatttcttgctccaggttctgaattatggatgttcaatgaagtgccggagaaggagagggagataaaactgactgacggtggtttggatataggcgggttaataaacattaaacttgtacataaagaaggcaatgctgttatcaggcgacacttggaaagcttgcctctggagacatttgactctatgagtcagtagaggactccattgtacattctgattcgcgttctttggccacacttcttcttattcgtgacattcagtctaagcgtctcccatcgaaggagctgaagtcacctcatcgttacaatggcttctctcacagtgcctggattagagaaatgcaacatgcatcagacaaatctataatcatcagcgaaatacttgattctagaacaagaaaccttgtatctgtctccaaaatcagcgattatgttctatcaaatgagcttgtaagtatggcactagcaatggtagcggaagacaaacaaataaacagagttcttgaagaactttttgctgaggagggaaatgagatgtgcattcggtctgctgaattttacctttatgagcaagaggaattgagtttctttgatattatggttagggcgcgtgagagagatgagattgtgattggctaccgtcttgctaacaccgaccaggctatcattaacccagaatataagtctcagattaggaagtggtcactagatgatgtctttgttgtcatctcaaaaggtgactaattttcaggagcgtcacttttttgtgtaagtgtatattctaatgctaatccgtgctaattgaaatgataaccggtcaaacatactgtaaagtacagtcctgatccaaacagtcagctatgtacatgttaaattgtagcattcaaccaatcttggcacaaaacaattccctgtccgcgactgaaaatttgctaaatttgtcgtagcaaatgatactacctccgttcccgaatatttgtcgtccgct

SEQ ID NO: 31284 - DNA, 3331 bp, Zea Mays
ctcgacttgctgtagcggtttacagttacgtgtgcctccattagctaaaggccaaacggctccgcatcgcgcggtgggtgtgtcttacaggtagggacgctaagaggtggcccgcgggtcagagtcgctggtgaagtggggttagtgggggcgggtatgtaatcatcgcagggttaaagggccatttgggtgtggtttattattaccacgaggggaggggagctcgagctcgctgctagtgctaatggcggagagcgatggtggcagcgaggcgcagagtccgagccctgatccaaggtccggggacggggcgaaccctgacccgcgcccgccgcggccgcagctcaccaagtcgcgcaccatctctggttctgttgcagcctccatattggccgctgatagggtagcaggaggaggaggcggaagcggcggaggcggtctaagggacagcatcctcgttcgccgctcctccacggcgcccctcccgccgtatacggcgtcagcggcgggggcgtcctcggcgccgcggcggctcaccgtcgccgtggacgacccctcctacgcggcacccaacggcggcgtgcttgaccgggactggtgctacccgtcgttcctaggtccgcacgcctcgcgcccccgcccgccgcggcagcagcagaccgcgacgactaccgaacgccgaagcgctaaccccaccgtgccggtgccgccgagggtggcggtgtcgcagcgggaggaggagaagagcctggcctccgtggtgaagcgcccggcgctgcttgaggagcggaggacgcctcctcctacgctcccgcccccacgcgctccgcgatttgatctctctccgtatctctcactcctgctggtcataactatcgcaagctctaccctcgctgtttggcaatggataaaagttatgggcctccaggaaaagatcagatcatgcagcgaggccaatgctggggaccgtgatggtaccgagaaggtgtcttggattgacagggaccatggctctgctttttttggttcgcggagatggaatttagctcaatctagtaccatctttgctcttgcaattcctttgtttctgtttaagtacattgatctgctccgacgcagacaaacaaattccatgagaggaagaagtggtgaggaagaagtacctctcaagaagaggatcgcctacaaagttgatgtgttcttctcaggacacccatatgccaagcttcttgccctcctattagccaccataattctcattgctttgggtggaattgcgctgtatgttgttagtggaagtggattcctggaggctctctggctttcctggacttttgtggcagattctggaaaccatgccgaccagattggcttggggccgaggattgtatccgtgtcaattagctctggaggcatgctggtgtttgccacaatgcttgggcttgtgtcagatgcaatatcagagaaggtggattcttggcgcaagggaaaaagtgaggtgatagagatcaaccacatactaatcctcggatggagtgataagctgggctctcttctgaagcagctagctatagcaaacaagagtattggtggtggtgtagttgttgttctagctgaaagggacaaggaagagatggagatggacatagcaaagttagaatttgacttcatgggaacatctgtaatatgcaggagtggcagtcctctaattctagcagacttgaagaaggtttctgtttctaaagcacgggccattattgttttagcatctgatgaaaacgcagaccaaagtgatgcacgggcattgcgtgttgtgctgagtctgactggagtcaaggagggtctaagaggccatgttgttgtagagatgagtgatcttgataatgaacctttagtgaaactggttggtggtgaactaattgaaacagttgttgcccatgacgtgattggacgtctgatgatacaatgtgcactccaacctggccttgcacagatatgggaagacatattgggatttgaaaatgcagagttttatattaagcaatggccagaattggatggcatgcggtttggggatgtgttgatctcatttcctgatgccgtaccttgtggagtcaaggttgcttcaaaatctggaaagatcttgatgaatcctgatgatggttatgttttaagagaaggagatgaggtccttgttattgcagaagatgatgatacttatgctcctgcccctctaccagaggtgaataagggttttctgcctaacataccaacccctcccaaatatccagagaaaattttgttctgtggttggcgccgtgacatccatgatatgataatggttctgaattatggatgttcaatgaagtgccggagaaggagagggagataaaactgactgacggtggtttggatataggcgggttaataaacattaaacttgtacataaagaaggcaatgctgttatcaggcgacacttggaaagcttgcctctggagacatttgactctattttaattcttgcagatgagtcagtagaggactccattgtacattctgattcgcgttctttggccacacttcttcttattcgtgacattcagtctaagcgtctcccatcgaaggagctgaagtcacctcatcgttacaatggcttctctcacagtgcctggattagagaaatgcaacatgcatcagacaaatctataatcatcagcgaaatacttgattctagaacaagaaaccttgtatctgtctccaaaatcagcgattatgttctatcaaatgagcttgtaagtatggcactagcaatggtagcggaagacaaacaaataaacagagttcttgaagaactttttgctgaggagggaaatgagatgtgcattcggtctgctgaattttacctttatgagcaagaggaattgagtttctttgatattatggttagggcgcgtgagagagatgagattgtgattggctaccgtcttgctaacaccgaccaggctatcattaacccagaatataagtctcagattaggaagtggtcactagatgatgtctttgttgtcatctcaaaaggtgactaattttcaggagcgtcacttttttgtgtaagtgtatattctaatgctaatccgtgctaattgaaatgataaccggtcaaacatactgtaaagtacagtcctgatccaaacagtcagctatgtacatgttaaattgtagcattcaaccaatcttggcacaaaacaattccctgtccgcgactgaaaatttgctaaatttgtcgtagcaaatgatactacctccgttcccgaatatttgtcgtccgct

SEQ ID NO: 31285 - DNA, 3114 bp, Zea Mays
taaagggccatttgggtgtggtttattattaccacgaggggaggggagctcgagctcgctgctagtgctaatggcggagagcgatggtggcagcgaggcgcagagtccgagccctgatccaaggtccggggacggggcgaaccctgacccgcgcccgccgcggccgcagctcaccaagtcgcgcaccatctctggttctgttgcagcctccatattggccgctgatagggtagcaggaggaggaggcggaagcggcggaggcggtctaagggacagcatcctcgttcgccgctcctccacggcgcccctcccgccgtatacggcgtcagcggcgggggcgtcctcggcgccgcggcggctcaccgtcgccgtggacgacccctcctacgcggcacccaacggcggcgtgcttgaccgggactggtgctacccgtcgttcctaggtccgcacgcctcgcgcccccgcccgccgcggcagcagcagaccgcgacgactaccgaacgccgaagcgctaaccccaccgtgccggtgccgccgagggtggcggtgtcgcagcgggaggaggagaagagcctggcctccgtggtgaagcgcccggcgctgcttgaggagcggaggacgcctcctcctacgctcccgcccccacgcgctccgcgatttgatctctctccgtatctctcactcctgctggtcataactatcgcaagctctaccctcgctgtttggcaatggataaaagttatgggcctccaggaaaagatcagatcatgcagcgaggccaatgctggggaccgtgatggtaccgagaaggtgtcttggattgacagggaccatggctctgctttttttggttcgcggagatggaatttagctcaatctagtaccatctttgctcttgcaattcctttgtttctgtttaagtacattgatctgctccgacgcagacaaacaaattccatgagaggaagaagtggtgaggaagaagtacctctcaagaagaggatcgcctacaaagttgatgtgttcttctcaggacacccatatgccaagcttcttgccctcctattagccaccataattctcattgctttgggtggaattgcgctgtatgttgttagtggaagtggattcctggaggctctctggctttcctggacttttgtggcagattctggaaaccatgccgaccagattggcttggggccgaggattgtatccgtgtcaattagctctggaggcatgctggtgtttgccacaatgcttgggcttgtgtcagatgcaatatcagagaaggtggattcttggcgcaagggaaaaagtgaggtgatagagatcaaccacatactaatcctcggatggagtgataagctgggctctcttctgaagcagctagctatagcaaacaagagtattggtggtggtgtagttgttgttctagctgaaagggacaaggaagagatggagatggacatagcaaagttagaatttgacttcatgggaacatctgtaatatgcaggagtggcagtcctctaattctagcagacttgaagaaggtttctgtttctaaagcacgggccattattgttttagcatctgatgaaaacgcagaccaaagtgatgcacgggcattgcgtgttgtgctgagtctgactggagtcaaggagggtctaagaggccatgttgttgtagagatgagtgatcttgataatgaacctttagtgaaactggttggtggtgaactaattgaaacagttgttgcccatgacgtgattggacgtctgatgatacaatgtgcactccaacctggccttgcacagatatgggaagacatattgggatttgaaaatgcagagttttatattaagcaatggccagaattggatggcatgcggtttggggatgtgttgatctcatttcctgatgccgtaccttgtggagtcaaggttgcttcaaaatctggaaagatcttgatgaatcctgatgatggttatgttttaagagaaggagatgaggtccttgttattgcagaagatgatgatacttatgctcctgcccctctaccagaggtgaataagggttttctgcctaacataccaacccctcccaaatatccagagaaaattttgttctgtggttggcgccgtgacatccatgatatgataatgtgccggagaaggagagggagataaaactgactgacggtggtttggatataggcgggttaataaacattaaacttgtacataaagaaggcaatgctgttatcaggcgacacttggaaagcttgcctctggagacatttgactctatgagtcagtagaggactccattgtacattctgattcgcgttctttggccacacttcttcttattcgtgacattcagtctaagcgtctcccatcgaaggagctgaagtcacctcatcgttacaatggcttctctcacagtgcctggattagagaaatgcaacatgcatcagacaaatctataatcatcagcgaaatacttgattctagaacaagaaaccttgtatctgtctccaaaatcagcgattatgttctatcaaatgagcttgtaagtatggcactagcaatggtagcggaagacaaacaaataaacagagttcttgaagaactttttgctgaggagggaaatgagatgtgcattcggtctgctgaattttacctttatgagcaagaggaattgagtttctttgatattatggttagggcgcgtgagagagatgagattgtgattggctaccgtcttgctaacaccgaccaggctatcattaacccagaatataagtctcagattaggaagtggtcactagatgatgtctttgttgtcatctcaaaaggtgactaattttcaggagcgtcacttttttgtgtaagtgtatattctaatgctaatccgtgctaattgaaatgataaccggtcaaacatactgtaaagtacagtcctgatccaaacagtcagctatgtacatgttaaattgtagcattcaaccaatcttggcacaaaacaattccctgtccgcgactgaaaatttgctaaatttgtcgtagcaaatgatactacctccgttcccgaatatttgtcgtccgct

SEQ ID NO: 31286 - DNA, 2537 bp, Zea Mays
ggggagctcgagctcgctgctagtgctaatggcggagagcgatggtggcagcgaggcgcagagtccgagccctgatccaaggtccggggacggggcgaaccctgacccgcgcccgccgcggccgcagctcaccaagtcgcgcaccatctctggttctgttgcagcctccatattggccgctgatagggtagcaggaggaggaggcggaagcggcggaggcggtctaagggacagcatcctcgttcgccgctcctccacggcgcccctcccgccgtatacggcgtcagcggcgggggcgtcctcggcgccgcggcggctcaccgtcgccgtggacgacccctcctacgcggcacccaacggcggcgtgcttgaccgggactggtgctacccgtcgttcctaggtccgcacgcctcgcgcccccgcccgccgcggcagcagcagaccgcgacgactaccgaacgccgaagcgctaaccccaccgtgccggtgccgccgagggtggcggtgtcgcagcgggaggaggagaagagcctggcctccgtggtgaagcgcccggcgctgcttgaggagcggaggacgcctcctcctacgctcccgcccccacgcgctccgcgatttgatctctctccgtatctctcactcctgctggtcataactatcgcaagctctaccctcgctgtttggcaatggataaaagttatgggcctccaggaaaagatcagatcatgcagcgaggccaatgctggggaccgtgatggtaccgagaaggtgtcttggattgacagggaccatggctctgctttttttggttcgcggagatggaatttagctcaatctagtaccatctttgctcttgcaattcctttgtttctgtttaagtacattgatctgctccgacgcagacaaacaaattccatgagaggaagaagtggtgaggaagaagtacctctcaagaagaggatcgcctacaaagttgatgtgttcttctcaggacacccatatgccaagcttcttgccctcctattagccaccataattctcattgctttgggtggaattgcgctgtatgttgttagtggaagtggattcctggaggctctctggctttcctggacttttgtggcagattctggaaaccatgccgaccagattggcttggggccgaggattgtatccgtgtcaattagctctggaggcatgctggtgtttgccacaatgcttgggcttgtgtcagatgcaatatcagagaaggtggattcttggcgcaagggaaaaagtgaggtgatagagatcaaccacatactaatcctcggatggagtgataagctgggctctcttctgaagcagctagctatagcaaacaagagtattggtggtggtgtagttgttgttctagctgaaagggacaaggaagagatggagatggacatagcaaagttagaatttgacttcatgggaacatctgtaatatgcaggagtggcagtcctctaattctagcagacttgaagaaggtttctgtttctaaagcacgggccattattgttttagcatctgatgaaaacgcagaccaaagtgatgcacgggcattgcgtgttgtgctgagtctgactggagtcaaggagggtctaagaggccatgttgttgtagagatgagtgatcttgataatgaacctttagtgaaactggttggtggtgaactaattgaaacagttgttgcccatgacgtgattggacgtctgatgatacaatgtgcactccaacctggccttgcacagatatgggaagacatattgggatttgaaaatgcagagttttatattaagcaatggccagaattggatggcatgcggtttggggatgtgttgatctcatttcctgatgccgtaccttgtggagtcaaggttgcttcaaaatctggaaagatcttgatgaatcctgatgatggttatgttttaagagaaggagatgaggtccttgttattgcagaagatgatgatacttatgctcctgcccctctaccagaggtgaataagggttttctgcctaacataccaacccctcccaaatatccagagaaaattttgttctgtggttggcgccgtgacatccatgatatgataatggttctggaagcatttcttgctccaggttctgaattatggatgttcaatgaagtgccggagaaggagagggagataaaactgactgacggtggtttggatataggcgggttaataaacattaaacttgtacataaagaaggcaatgctgttatcaggcgacacttggaaagcttgcctctggagacatttgactctgtgagtacaaattactctcttttagagatattctgcacaatgtttattcaataaatgaaatagttgatgaattggtcattgctccctctgttccaaaatggaggttgttttagttttttactatgtcaaacttttctaactttgacctaacatctacaaccatacaagtgcactacaagactttccatgctgtatttaatgaaagtaaccaattcaa

SEQ ID NO: 31287 - DNA, 2326 bp, Zea Mays
ccgatagacctcgaaaggtagccatggctcgctggccgactccgcgctgtctgtgactgtgactgtgattgtgagacacttctcttctatctcctccatttcatggcctcccgcctaaccctcatttacccgcccgttctcccgccgctcagcattctagggttttcagtttttcgagctccagtgcgccgcggccgccgcccgtgatgcctgactcaccggagctagtcgtgagggcgctcgggaagcgcctggcgcagccgcgcttaggcaaggacgcccttatcaagctcctcaagcaagctgaaagtgcattatcagagtttagtcaatcatcctctctgcaggatcctcttcatgctctgagcaaatctcttgtccagaccactttactcaaccataaggataaggatgtcaagcttcttgtttctgtttgtttaatcgaagttatgcgtgttcttgcacctgatccaccttttagtgatgaaatacttaaggaaatatttaagctatttatcagcatatttgcggaccttgctgaaactagcagtccatttcttactagaaggatgaaaattttggaaaatgttgctgcacttagatgttctatgatcatgctcaacattggctgcgaggacttgattcttgatatggtcaaaattttcttctccacagtgaaatggttatttggtaagattcttgatcctatcacggctgtgaaatgcgtaggaatgcatggtcttcaaaagagtgtgcaccaagctatgctatcaatgatgacacaaatattgaatgagaaagttactcagtctcttgtagatgtgattttacgcaatttagtaaaagatgacaagggagcatcccacaagctagcttttaacatcattgaaaattgtgctgacaaattggagcctatcattcacagttttttgtcctcatgcatttttaacaaggacatgcctgttactgaacttaggagattatatcataaaattattcttgaaatattccagtgtgcaccccagatccttttcgctgtcattccgagcttgacgcatgaacttcttagtgaccaagttgatataaggctggaggcagttcaccttattgggaggcttcttgccctatctaatcttcagtttggtcaagaaaacaagatggtttttatagaatttctaaggagattctctgacaaatctgcagaagttagaattgccgcaattgatgcagccaaagcgtgctatatggatgtgtctagggatgaagcacaacatatactttcatcacttgaagggaggttactagattttgatgagaaagtgaggatccgagctgttcacacagtctgtgatttagccaaatcaaaccttagctcttctgctaaactgatattacatgcagctgagagactacgtgacaaaaaattatttctctacaatgcttcacccaaacatgcttttcaggcatccgttagaaaaaatgtaatgcacaagttgttggagctgtatcgggattactgtgagaaatgctcaaaaggaactgccacagtcaacactcattatgaacaaatcccagctaaacttatagttctttgtttcgataatgatattgaatccttcaggccacagaatatggagcttatatttgctgaagaactctttccattctctctttctccaaaagagagggcgacccattggattgcgttcttttcttatttcaaaccagaacatattaaggctttgaacatcattttttctcagaagagacggttacaactggagatgcaaacatatttatcacttcgagcaaggaagcctgcttgtgctgtaggaggaatcatcagaagaaatgcagaagagaatccgtgcggcattcagaaagatggcaacatcctttccagatatttccaaagctgaagagtgctttgaaaatttgcaccagatgaaagataataacatatttaaggatttggatgaactaataaatgagggaaccagttttgcaaaaggccgcgtgaccagagatatgtttctcaagagaatcgggcagaaacacccaatttacacattttccagagtgctgtctataaaatgtttgcattcaatatttaatcaggagatgatctgtgccatcctcgaatctcttttgtcccgcggaaatgaattaattgattatgttgagtctgcttgtgatctattactgcaatgttgtgtacccattattggagcaaaagtgcattgaaggtactcgtgctgaatcaaaatacgcaatcactgcaattgctgcactccactcagatgataagaaatttgctaaattattt

SEQ ID NO: 31288 - DNA, 2472 bp, Zea Mays
ccgatagacctcgaaaggtagccatggctcgctggccgactccgcgctgtctgtgactgtgactgtgattcattctagggttttcagtttttcgagctccagtgcgccgcggccgccgcccgtgatgcctgactcaccggagctagtcgtgagggcgctcgggaagcgcctggcgcagccgcgcttaggcaaggacgcccttatcaagctcctcaagcaagctgaaagtgcattatcagagtttagtcaatcatcctctctgcaggatcctcttcatgctctgagcaaatctcttgtccagaccactttactcaaccataaggataaggatgtcaagcttcttgtttctgtttgtttaatcgaagttatgcgtgttcttgcacctgatccaccttttagtgatgaaatacttaaggaaatatttaagctatttatcagcatatttgcggaccttgctgaaactagcagtccatttcttactagaaggatgaaaattttggaaaatgttgctgcacttagatgttctatgatcatgctcaacattggctgcgaggacttgattcttgatatggtcaaaattttcttctccacagtgaaatggttatttggtaagattcttgatcctatcacggctgtgaaatgcgtaggaatgcatggtcttcaaaagagtgtgcaccaagctatgctatcaatgatgacacaaatattgaatgagaaagttactcagtctcttgtagatgtgattttacgcaatttagtaaaagatgacaagggagcatcccacaagctagcttttaacatcattgaaaattgtgctgacaaattggagcctatcattcacagttttttgtcctcatgcatttttaacaaggacatgcctgttactgaacttaggagattatatcataaaattattcttgaaatattccagtgtgcaccccagatccttttcgctgtcattccgagcttgacgcatgaacttcttagtgaccaagttgatataaggctggaggcagttcaccttattgggaggcttcttgccctatctaatcttcagtttggtcaagaaaacaagatggtttttatagaatttctaaggagattctctgacaaatctgcagaagttagaattgccgcaattgatgcagccaaagcgtgctatatggatgtgtctagggatgaagcacaacatatactttcatcacttgaagggaggttactagattttgatgagaaagtgaggatccgagctgttcacacagtctgtgatttagccaaatcaaaccttagctcttctgctaaactgatattacatgcagctgagagactacgtgacaaaaaagcatccgttagaaaaaatgtaatgcacaagttgttggagctgtatcgggattactgtgagaaatgctcaaaaggaactgccacagtcaacactcattatgaacaaatcccagctaaacttatagttctttgtttcgataatgatattgaatccttcaggccacagaatatggagcttatatttgctgaagaactctttccattctctctttctccaaaagagagggcgacccattggattgcgttcttttcttatttcaaaccagaacatattaaggctttgaacatcattttttctcagaagagacggttacaactggagatgcaaacatatttatcacttcgagcaaggaaggaggaatcatcagaagaaatgcagaagagaatccgtgcggcattcagaaagatggcaacatcctttccagatatttccaaagctgaagagtgctttgaaaatttgcaccagatgaaagataataacatatttaaggatttggatgaactaataaatgagggaaccagttttgcaaaaggccgcgtgaccagagatatgtttctcaagagaatcgggcagaaacacccaatttacacattttccagagtgctgtctataaaatgtttgcattcaatatttaatcaggagatgatctgtgccatcctcgaatctcttttgtcccgcggaaatgaattaattgattatgttgagtctgcttgtgatctattactggtaattgcaatggtgtttccatcattattccgaggctcagaggagtacttgcttaagttgttcttagaagaaccaattctgataaatgtgaagactctccagatgttggcacatttggcaaaatctacacactgtttgtctactaattttagcaatgttgtgtacccattattggagcaaaagtgcattgaaggtactcgtgctgaatcaaaatacgcaatcactgcaattgctgcactccactcagatgataagaaatttgctaaattatttaagctgccgcattttcatccaagccggataacttcttgaaaggaaaaaagaaattcttatcgctgcacaagtttctagatgacattgaccatttttctgttctagctcacccaactttgcttatcttattc

SEQ ID NO: 31289 - DNA, 2402 bp, Zea Mays
cgaaaggtagccatggctcgctggccgactccgcgctgtctgtgactgtgactgtgattgtgagacacttctcttctatctcctccatttcatggcctcccgcctaaccctcatttacccgcccgttctcccgccgctcagcattctagggttttcagtttttcgagctccagtgcgccgcggccgccgcccgtgatgcctgactcaccggagctagtcgtgagggcgctcgggaagcgcctggcgcagccgcgcttaggcaaggacgcccttatcaagctcctcaagcaagctgaaagtgcattatcagagtttagtcaatcatcctctctgcaggatcctcttcatgctctgagcaaatctcttgtccagaccactttactcaaccataaggataaggatgtcaagcttcttgtttctgtttgtttaatcgaagttatgcgtgttcttgcacctgatccaccttttagtgatgaaatacttaaggaaatatttaagctatttatcagcatatttgcggaccttgctgaaactagcagtccatttcttactagaaggatgaaaattttggaaaatgttgctgcacttagatgttctatgatcatgctcaacattggctgcgaggacttgattcttgatatggtcaaaattttcttctccacagtgaagcatggtcttcaaaagagtgtgcaccaagctatgctatcaatgatgacacaaatattgaatgagaaagttactcagtctcttgtagatgtgattttacgcaatttagtaaaagatgacaagggagcatcccacaagctagcttttaacatcattgaaaattgtgctgacaaattggagcctatcattcacagttttttgtcctcatgcatttttaacaaggacatgcctgttactgaacttaggagattatatcataaaattattcttgaaatattccagtgtgcaccccagatccttttcgctgtcattccgagcttgacgcatgaacttcttagtgaccaagttgatataaggctggaggcagttcaccttattgggaggcttcttgccctatctaatcttcagtttggtcaagaaaacaagatggtttttatagaatttctaaggagattctctgacaaatctgcagaagttagaattgccgcaattgatgcagccaaagcgtgctatatggatgtgtctagggatgaagcacaacatatactttcatcacttgaagggaggttactagattttgatgagaaagtgaggatccgagctgttcacacagtctgtgatttagccaaatcaaaccttagctcttctgctaaactgatattacatgcagctgagagactacgtgacaaaaaattatttctctacaatgcttcacccaaacatgcttttcaggcatccgttagaaaaaatgtaatgcacaagttgttggagctgtatcgggattactgtgagaaatgctcaaaaggaactgccacagtcaacactcattatgaacaaatcccagctaaacttatagttctttgtttcgataatgatattgaatccttcaggccacagaatatggagcttatatttgctgaagaactctttccattctctctttctccaaaagagagggcgacccattggattgcgttcttttcttatttcaaaccagaacatattaaggctttgaacatcattttttctcagaagagacggttacaactggagatgcaaacatatttatcacttcgagcaaggaaggaggaatcatcagaagaaatgcagaagagaatccgtgcggcattcagaaagatggcaacatcctttccagatatttccaaagctgaagagtgctttgaaaatttgcaccagatgaaagataataacatatttaaggatttggatgaactaataaatgagggaaccagttttgcaaaaggccgcgtgaccagagatatgtttctcaagagaatcgggcagaaacacccaatttacacattttccagagtaattgcaatggtgtttccatcattattccgaggctcagaggagtacttgcttaagttgttcttagaagaaccaattctgataaatgtgaagactctccagatgttggcacatttggcaaaatctacacactgtttgtctactaattttagcaatgttgtgtacccattattggagcaaaagtgcattgaaggtactcgtgctgaatcaaaatacgcaatcactgcaattgctgcactccactcagatgataagaaatttgctaaattatttaagctgccgcattttcatccaagccggataacttcttgaaaggaaaaaagaaattcttatcgctgcacaagtttctagatgacattgaccatttttctgttctagctcacccaactttgcttatcttattc

SEQ ID NO: 31290 - DNA, 1595 bp, Zea Mays
ccgcgctgtctgtgactgtgactgtgattgtgagacacttctcttctatctcctccatttcatggcctcccgcctaaccctcatttacccgcccgttctcccgccgctcagcattctagggttttcagtttttcgagctccagtgcgccgcggccgccgcccgtgatgcctgactcaccggagctagtcgtgagggcgctcgggaagcgcctggcgcagccgcgcttaggcaaggacgcccttatcaagctcctcaagcaagctgaaagtgcattatcagagtttagtcaatcatcctctctgcaggatcctcttcatgctctgagcaaatctcttgtccagaccactttactcaaccataaggataaggatgtcaagcttcttgtttctgtttgtttaatcgaagttatgcgtgttcttgcacctgatccaccttttagtgatgaaatacttaaggaaatatttaagctatttatcagcatatttgcggaccttgctgaaactagcagtccatttcttactagaaggatgaaaattttggaaaatgttgctgcacttagatgttctatgatcatgctcaacattggctgcgaggacttgattcttgatatggtcaaaattttcttctccacagtgaagcatggtcttcaaaagagtgtgcaccaagctatgctatcaatgatgacacaaatattgaatgagaaagttactcagtctcttgtagatgtgattttacgcaatttagtaaaagatgacaagagtgaccaagttgatataaggctggaggcagttcaccttattgggaggcttcttgccctatctaatcttcagtttggtcaagaaaacaagatggtttttatagaatttctaaggagattctctgacaaatctgcagaagttagaattgccgcaattgatgcagccaaagcgtgctatatggatgtgtctagggatgaagcacaacatatactttcatcacttgaagggaggttactagattttgatgagaaagtgaggatccgagctgttcacacagtctgtgatttagccaaatcaaaccttagctcttctgctaaactgatattacatgcagctgagagactacgtgacaaaaaattatttctctacaatgcttcacccaaacatgcttttcaggcatccgttagaaaaaatgtaatgcacaagttgttggagctgtatcgggattactgtgagaaatgctcaaaaggaactgccacagtcaacactcattatgaacaaatcccagctaaacttatagttctttgtttcgataatgatattgaatccttcaggccacagaatatggagcttatatttgctgaagaactctttccattctctctttctccaaaagagagggcgacccattggattgcgttcttttcttatttcaaaccagaacatattaaggctttgaacatcattttttctcagaagagacggttacaactggagatgcaaacatatttatcacttcgagcaaggaaggaggaatcatcagaagaaatgcagaagagaatccgtgcggcattcagaaagatggcaacatcctttccagatatttccaaagctga

SEQ ID NO: 31291 - DNA, 1664 bp, Zea Mays
cgcgctgtctgtgactgtgactgtgattgtgagacacttctcttctatctcctccatttcatggcctcccgcctaaccctcatttacccgcccgttctcccgccgctcagcattctagggttttcagtttttcgagctccagtgcgccgcggccgccgcccgtgatgcctgactcaccggagctagtcgtgagggcgctcgggaagcgcctggcgcagccgcgcttaggcaaggacgcccttatcaagctcctcaagcaagctgaaagtgcattatcagagtttagtcaatcatcctctctgcaggatcctcttcatgctctgagcaaatctcttgtccagaccactttactcaaccataaggataaggatgtcaagcttcttgtttctgtttgtttaatcgaagttatgcgtgttcttgcacctgatccaccttttagtgatgaaatacttaaggaaatatttaagctatttatcagcatatttgcggaccttgctgaaactagcagtccatttcttactagaaggatgaaaattttggaaaatgttgctgcacttagatgttctatgatcatgctcaacattggctgcgaggacttgattcttgatatggtcaaaattttcttctccacagtgaaatggttatttggtaagattcttgatcctatcacggctgtgaaatgcgtaggaatgcatggtcttcaaaagagtgtgcaccaagctatgctatcaatgatgacacaaatattgaatgagaaagttactcagtctcttgtagatgtgattttacgcaatttagtaaaagatgacaagagtgaccaagttgatataaggctggaggcagttcaccttattgggaggcttcttgccctatctaatcttcagtttggtcaagaaaacaagatggtttttatagaatttctaaggagattctctgacaaatctgcagaagttagaattgccgcaattgatgcagccaaagcgtgctatatggatgtgtctagggatgaagcacaacatatactttcatcacttgaagggaggttactagattttgatgagaaagtgaggatccgagctgttcacacagtctgtgatttagccaaatcaaaccttagctcttctgctaaactgatattacatgcagctgagagactacgtgacaaaaaattatttctctacaatgcttcacccaaacatgcttttcaggcatccgttagaaaaaatgtaatgcacaagttgttggagctgtatcgggattactgtgagaaatgctcaaaaggaactgccacagtcaacactcattatgaacaaatcccagctaaacttatagttctttgtttcgataatgatattgaatccttcaggccacagaatatggagcttatatttgctgaagaactctttccattctctctttctccaaaagagagggcgacccattggattgcgttcttttcttatttcaaaccagaacatattaaggctttgaacatcattttttctcagaagagacggttacaactggagatgcaaacatatttatcacttcgagcaaggaagcctgcttgtgctgtaggaggaatcatcagaagaaatgcagaagagaatccgtgcggcattcagaaagatggcaacatcctttccagatatttccaaagctga

SEQ ID NO: 31292 - DNA, 2454 bp, Zea Mays
ctgtgattgtgagacacttctcttctatctcctccatttcatggcctcccgcctaaccctcatttacccgcccgttctcccgccgctcagcattctagggttttcagtttttcgagctccagtgcgccgcggccgccgcccgtgatgcctgactcaccggagctagtcgtgagggcgctcgggaagcgcctggcgcagccgcgcttaggcaaggacgcccttatcaagctcctcaagcaagctgaaagtgcattatcagagtttagtcaatcatcctctctgcaggatcctcttcatgctctgagcaaatctcttgtccagaccactttactcaaccataaggataaggatgtcaagcttcttgtttctgtttgtttaatcgaagttatgcgtgttcttgcacctgatccaccttttagtgatgaaatacttaaggaaatatttaagctatttatcagcatatttgcggaccttgctgaaactagcagtccatttcttactagaaggatgaaaattttggaaaatgttgctgcacttagatgttctatgatcatgctcaacattggctgcgaggacttgattcttgatatggtcaaaattttcttctccacagtgaagcatggtcttcaaaagagtgtgcaccaagctatgctatcaatgatgacacaaatattgaatgagaaagttactcagtctcttgtagatgtgattttacgcaatttagtaaaagatgacaagggagcatcccacaagctagcttttaacatcattgaaaattgtgctgacaaattggagcctatcattcacagttttttgtcctcatgcatttttaacaaggacatgcctgttactgaacttaggagattatatcataaaattattcttgaaatattccagtgtgcaccccagatccttttcgctgtcattccgagcttgacgcatgaacttcttagtgaccaagttgatataaggctggaggcagttcaccttattgggaggcttcttgccctatctaatcttcagtttggtcaagaaaacaagatggtttttatagaatttctaaggagattctctgacaaatctgcagaagttagaattgccgcaattgatgcagccaaagcgtgctatatggatgtgtctagggatgaagcacaacatatactttcatcacttgaagggaggttactagattttgatgagaaagtgaggatccgagctgttcacacagtctgtgatttagccaaatcaaaccttagctcttctgctaaactgatattacatgcagctgagagactacgtgacaaaaaagcatccgttagaaaaaatgtaatgcacaagttgttggagctgtatcgggattactgtgagaaatgctcaaaaggaactgccacagtcaacactcattatgaacaaatcccagctaaacttatagttctttgtttcgataatgatattgaatccttcaggccacagaatatggagcttatatttgctgaagaactctttccattctctctttctccaaaagagagggcgacccattggattgcgttcttttcttatttcaaaccagaacatattaaggctttgaacatcattttttctcagaagagacggttacaactggagatgcaaacatatttatcacttcgagcaaggaagcctgcttgtgctgtaggaggaatcatcagaagaaatgcagaagagaatccgtgcggcattcagaaagatggcaacatcctttccagatatttccaaagctgaagagtgctttgaaaatttgcaccagatgaaagataataacatatttaaggatttggatgaactaataaatgagggaaccagttttgcaaaaggccgcgtgaccagagatatgtttctcaagagaatcgggcagaaacacccaatttacacattttccagagtgctgtctataaaatgtttgcattcaatatttaatcaggagatgatctgtgccatcctcgaatctcttttgtcccgcggaaatgaattaattgattatgttgagtctgcttgtgatctattactggtaattgcaatggtgtttccatcattattccgaggctcagaggagtacttgcttaagttgttcttagaagaaccaattctgataaatgtgaagactctccagatgttggcacatttggcaaaatctacacactgtttgtctactaattttagcaatgttgtgtacccattattggagcaaaagtgcattgaaggtactcgtgctgaatcaaaatacgcaatcactgcaattgctgcactccactcagatgataagaaatttgctaaattatttaagctgccgcattttcatccaagccggataacttcttgaaaggaaaaaagaaattcttatcgctgcacaagtttctagatgacattgaccatttttctgttctagctcacccaactttgcttatcttattc

SEQ ID NO: 31293 - DNA, 2428 bp, Zea Mays
gagacacttctcttctatctcctccatttcatggcctcccgcctaaccctcatttacccgcccgttctcccgccgctcagcattctagggttttcagtttttcgagctccagtgcgccgcggccgccgcccgtgatgcctgactcaccggagctagtcgtgagggcgctcgggaagcgcctggcgcagccgcgcttaggcaaggacgcccttatcaagctcctcaagcaagctgaaagtgcattatcagagtttagtcaatcatcctctctgcaggatcctcttcatgctctgagcaaatctcttgtccagaccactttactcaaccataaggataaggatgtcaagcttcttgtttctgtttgtttaatcgaagttatgcgtgttcttgcacctgatccaccttttagtgatgaaatacttaaggaaatatttaagctatttatcagcatatttgcggaccttgctgaaactagcagtccatttcttactagaaggatgaaaattttggaaaatgttgctgcacttagatgttctatgatcatgctcaacattggctgcgaggacttgattcttgatatggtcaaaattttcttctccacagtgaagcatggtcttcaaaagagtgtgcaccaagctatgctatcaatgatgacacaaatattgaatgagaaagttactcagtctcttgtagatgtgattttacgcaatttagtaaaagatgacaagggagcatcccacaagctagcttttaacatcattgaaaattgtgctgacaaattggagcctatcattcacagttttttgtcctcatgcatttttaacaaggacatgcctgttactgaacttaggagattatatcataaaattattcttgaaatattccagtgtgcaccccagatccttttcgctgtcattccgagcttgacgcatgaacttcttagtgaccaagttgatataaggctggaggcagttcaccttattgggaggcttcttgccctatctaatcttcagtttggtcaagaaaacaagatggtttttatagaatttctaaggagattctctgacaaatctgcagaagttagaattgccgcaattgatgcagccaaagcgtgctatatggatgtgtctagggatgaagcacaacatatactttcatcacttgaagggaggttactagattttgatgagaaagtgaggatccgagctgttcacacagtctgtgatttagccaaatcaaaccttagctcttctgctaaactgatattacatgcagctgagagactacgtgacaaaaaagcatccgttagaaaaaatgtaatgcacaagttgttggagctgtatcgggattactgtgagaaatgctcaaaaggaactgccacagtcaacactcattatgaacaaatcccagctaaacttatagttctttgtttcgataatgatattgaatccttcaggccacagaatatggagcttatatttgctgaagaactctttccattctctctttctccaaaagagagggcgacccattggattgcgttcttttcttatttcaaaccagaacatattaaggctttgaacatcattttttctcagaagagacggttacaactggagatgcaaacatatttatcacttcgagcaaggaaggaggaatcatcagaagaaatgcagaagagaatccgtgcggcattcagaaagatggcaacatcctttccagatatttccaaagctgaagagtgctttgaaaatttgcaccagatgaaagataataacatatttaaggatttggatgaactaataaatgagggaaccagttttgcaaaaggccgcgtgaccagagatatgtttctcaagagaatcgggcagaaacacccaatttacacattttccagagtgctgtctataaaatgtttgcattcaatatttaatcaggagatgatctgtgccatcctcgaatctcttttgtcccgcggaaatgaattaattgattatgttgagtctgcttgtgatctattactggtaattgcaatggtgtttccatcattattccgaggctcagaggagtacttgcttaagttgttcttagaagaaccaattctgataaatgtgaagactctccagatgttggcacatttggcaaaatctacacactgtttgtctactaattttagcaatgttgtgtacccattattggagcaaaagtgcattgaaggtactcgtgctgaatcaaaatacgcaatcactgcaattgctgcactccactcagatgataagaaatttgctaaattatttaagctgccgcattttcatccaagccggataacttcttgaaaggaaaaaagaaattcttatcgctgcacaagtttctagatgacattgaccatttttctgttctagctcacccaactttgcttatcttattc

SEQ ID NO: 31294 - DNA, 415 bp, Zea Mays
cctaaccctaattagggtgggacttctgtattatttgataggatagtatatgggttgggcctaaacccattacaactatgacacacgtctaacatatagttgttactatccttggtttaggcagagtgtcattattacccccttcaaactcaaggtggaagtgcaggatctgaagcattgagtttgatcaaattgaatcgatgttctcttgtttgtgcttttgtgaagaagtctgcaacttgcatttctgatggcgcatgttgaagagcaataatgttctgttggcaatgagaccaatgaaaatgatcattcatatataaaactggccgctggaaaatctgtgctgcaattagctacaagatgggattcacatatttcaccagaattatttcgtaacacacttctcatagcaagg

SEQ ID NO: 31295 - DNA, 1057 bp, Zea Mays
catctgatgaatcagcttgattcgtttagtgataagcttgtaaagagaattcttaaagctcatgaaccttataaccataatgacaatactaaatgttctgttgtttctgagagggtatcatatgaatttgttcctgaaaggaaagcttgctcctcattaaacaaatcagtggtacagaatgcaagtggttgtgatagcaataggaacaaatgtttggcatctgggaaagctgtgtccaagaaaaaagatcagagtaccaataatagcttggataaagaaaatatgtcatcttgtggttctggtggcacaaaggtgtcatctccaggctccttgggtttagctagggaggttgattctggaaattgtctctccctcttggataaccggaattgtcctatgactaggacctcaaaggcaaatcacaacaattgtaggcaaactgcgtagttccttcaagaaaggtcatagcaagggtttatctgaagcccagaagcatgaaaagtcgcttcctggctcttcaattgcatgtgatattgaagatgccggtgattgcaatgataaccttgtgaaagcacctttcatcaaacaacgtaacagccaactttaagaaaaagggtaagagaacactggagttggtgaatttgcagaatagctcagatttaactgatgttgtcacaaaagataacgttcgacagattagagcaaggaaggtgccagtgtaaacagctactcacatatgatcttggtatttatgtaatttccgtccgatgtaaataaatacttagttctgaaatcatttatacatgcatatccacttgagagtactgttataatggtaggaatcttggtcccggttcaccatgtaacattataatttaaatagggatgggcatgagcctcttaggctatttctagtagatcctctaccttgtatcctatttcaaatttttctgcaaacactgtcagtgtcatctacaattttgtgctccctattttccatggtctacttgagacagttttatgagtttgtgaaggcttatctaatgttacgcttgat

SEQ ID NO: 31296 - DNA, 1089 bp, Zea Mays
catctgatgaatcagcttgattcgtttagtgataagcttgtaaagagaattcttaaagctcatgaaccttataaccataatgacaatactaaatgttctgttgtttctgagagggtatcatatgaatttgttcctgaaaggaaagcttgctcctcattaaacaaatcagtggtacagaatgcaagtggttgtgatagcaataggaacaaatgtttggcatctgggaaagctgtgtccaagaaaaaagatcagagtaccaataatagcttggataaagaaaatatgtcatcttgtggttctggtggcacaaaggtgtcatctccaggctccttgggtttagctagggaggttgattctggaaattgtctctccctcttggataaccggaattgtcctatgactaggacctcaaaggcaaatcacaacaattgtaggcaaactgcggacatcttggattttaatctcagagaatgtagttccttcaagaaaggtcatagcaagggtttatctgaagcccagaagcatgaaaagtcgcttcctggctcttcaattgcatgcagtgatattgaagatgccggtgattgcaatgataaccttgtgaaagcacctttcatcaaacaacgtaacagccaactttaagaaaaagggtaagagaacactggagttggtgaatttgcagaatagctcagatttaactgatgttgtcacaaaagataacgttcgacagattagagcaaggaaggtgccagtgtaaacagctactcacatatgatcttggtatttatgtaatttccgtccgatgtaaataaatacttagttctgaaatcatttatacatgcatatccacttgagagtactgttataatggtaggaatcttggtcccggttcaccatgtaacattataatttaaatagggatgggcatgagcctcttaggctatttctagtagatcctctaccttgtatcctatttcaaatttttctgcaaacactgtcagtgtcatctacaattttgtgctccctattttccatggtctacttgagacagttttatgagtttgtgaaggcttatctaatgttacgcttgat

SEQ ID NO: 31297 - DNA, 1077 bp, Zea Mays
catctgatgaatcagcttgattcgtttagtgataagcttgtaaagagaattcttaaagctcatgaaccttataaccataatgacaatactaaatgttctgttgtttctgagagggtatcatatgaatttgttcctgaaaggaaagcttgctcctcattaaacaaatcagtggtacagaatgcaagtggttgtgatagcaataggaacaaatgtttggcatctgggaaagctgtgtccaagaaaaaagatcagagtaccaataatagcttggataaagaaaatatgtcatcttgtggttctggtggcacaaaggtgtcatctccaggctccttgggtttagctagggaggttgattctggaaattgtctctccctcttggataaccggaattgtcctatgactaggacctcaaaggcaaatcacaacaattgtaggcaaactgcggacatcttggattttaatctcagagaatgtagttccttcaagaaaggtcatagcaagggtttatctgaagcccagaagcatgaaaagtcgcttcctggctcttcaattgcatgtgatattgaagatgccggtgattgcaatgataaccttgtgaaagcacctttcatcaaacaacgtaacagccaactttaagaaaaagggtaagagaacactggagttggtgaatttgcagaatagctcagatttaactgatgttgtcacaaaagataacattagagcaaggaaggtgccagtgtaaacagctactcacatatgatcttggtatttatgtaatttccgtccgatgtaaataaatacttagttctgaaatcatttatacatgcatatccacttgagagtactgttataatggtaggaatcttggtcccggttcaccatgtaacattataatttaaatagggatgggcatgagcctcttaggctatttctagtagatcctctaccttgtatcctatttcaaatttttctgcaaacactgtcagtgtcatctacaattttgtgctccctattttccatggtctacttgagacagttttatgagtttgtgaaggcttatctaatgttacgcttgat

SEQ ID NO: 31298 - DNA, 1080 bp, Zea Mays
catctgatgaatcagcttgattcgtttagtgataagcttgtaaagagaattcttaaagctcatgaaccttataaccataatgacaatactaaatgttctgttgtttctgagagggtatcatatgaatttgttcctgaaaggaaagcttgctcctcattaaacaaatcagtggtacagaatgcaagtggttgtgatagcaataggaacaaatgtttggcatctgggaaagctgtgtccaagaaaaaagatcagagtaccaataatagcttggataaagaaaatatgtcatcttgtggttctggtggcacaaaggtgtcatctccaggctccttgggtttagctagggaggttgattctggaaattgtctctccctcttggataaccggaattgtcctatgactaggacctcaaaggcaaatcacaacaattgtaggcaaactgcggacatcttggattttaatctcagagaatgtagttccttcaagaaaggtcatagcaagggtttatctgaagcccagaagcatgaaaagtcgcttcctggctcttcaattgcatgcagtgatattgaagatgccggtgattgcaatgataaccttgtgaaagcacctttcatcaaacaacgtaacagccaactttaagaaaaagggtaagagaacactggagttggtgaatttgcagaatagctcagatttaactgatgttgtcacaaaagataacattagagcaaggaaggtgccagtgtaaacagctactcacatatgatcttggtatttatgtaatttccgtccgatgtaaataaatacttagttctgaaatcatttatacatgcatatccacttgagagtactgttataatggtaggaatcttggtcccggttcaccatgtaacattataatttaaatagggatgggcatgagcctcttaggctatttctagtagatcctctaccttgtatcctatttcaaatttttctgcaaacactgtcagtgtcatctacaattttgtgctccctattttccatggtctacttgagacagttttatgagtttgtgaaggcttatctaatgttacgcttgat

SEQ ID NO: 31299 - DNA, 997 bp, Zea Mays
catctgatgaatcagcttgattcgtttagtgataagcttgtaaagagaattcttaaagctcatgaaccttataaccataatgacaatactaaatgttctgttgtttctgagagggtatcatatgaatttgttcctgaaaggaaagcttgctcctcattaaacaaatcagtggtacagaatgcaagtggttgtgatagcaataggaacaaatgtttggcatctgggaaagctgtgtccaagaaaaaagatcagagtaccaataatagcttggataaagaaaatatgtcatcttgtggttctggtggcacaaaggtgtcatctccaggctccttgggtttagctagggaggttgattctggaaattgtctctccctcttggataaccggaattgtcctatgactaggacctcaaaggcaaatcacaacaattgtaggcaaactgcggacatcttggattttaatctcagagaatgtagttccttcaagaaaggtcatagcaagggtttatctgaagcccagaagcatgaaaagtcgcttcctggctcttcaattgcatgtgatattgaagatgccggtgattgcaatgataaccttgtgaaagcacctttcatcaaacaacgtaacaggttcgacagattagagcaaggaaggtgccagtgtaaacagctactcacatatgatcttggtatttatgtaatttccgtccgatgtaaataaatacttagttctgaaatcatttatacatgcatatccacttgagagtactgttataatggtaggaatcttggtcccggttcaccatgtaacattataatttaaatagggatgggcatgagcctcttaggctatttctagtagatcctctaccttgtatcctatttcaaatttttctgcaaacactgtcagtgtcatctacaattttgtgctccctattttccatggtctacttgagacagttttatgagtttgtgaaggcttatctaatgttacgcttgat

SEQ ID NO: 31300 - DNA, 6920 bp, Zea Mays
aagcagttgtcagatccccccccttccctagaaaggatctctctgctgcgccttctttgtttgttcgcgtcatcatatcatgttttactccagttgaattagtatggctccgtagcgtaacatataccatggatgattctggaccttactgtatgggatcaccttcccccattatgtgctgtgccttcatgtggtagcttcccccatgatatcattgaaaaaaccatgcaatgccattttataactacaattctatgcagatctgtctgtagactaggtataattggttggtcttattcactcaatgttgaatgtttcacataataagattgtttccctcacctcccaaccgcttggtgagaatcatacattctagtagaatgtgtacctgttgaacattttttaaaagttcataaaaaggtagccacattaaatttgttactagattcatcatggaatgttgtttgaatggccaaaaatttgagaaaattgcactaaatttatgttatattagagtgcattgttcctattgggcctaggccttgtatccaacccactatggggcttcgatttgtatctacacctatgtcttgatattgaattccaactcttcctctccaatatggtatcagcagcctctccctaacccaaaccctacctgttggcaacaatggctggccgccagtcgctgcttcactcttcctccccttcggcggccctccccatcactcgttgtcatccctccccacctcttggcacggcgctccatggtcggccaccgtcggcactgggagcctggctaggtctttgtcctggtcgtcggtgtcctgatcgagcccgtcctgcctctgcccgccaggctccctcttgcgcatctgttgtcccgtaggcggacaacctagcccctgccgtagtacctccatcagctggcatgctgccccctgtgttgggcgcaacacctctccctgttgcgccccatccctcgtgcagccccatcaactctgtggccactcctccatgctgaggtcgtgttgtcgtgtctgtcgggcttgatgttgctcggttgtctggcctcgaccacttcgttggtcgggcccctcatgtcgaggttgctgcatcccactccaccctcttggctacccttgtcatggccaagttcgtcgttacgggcgcacaagagtgcaagcgggtcatcgctcttggcctgggagcaagagcgcgcttctgtgtatgcccttgcctatcaactcgtggaagctgagtgttagctagaggtgatcgttgccgattgcacgtccattagctttggtgatgtcgatgccccctcactttctctagtagccagcaacccaacattcacgctcaggcaagtatccaaaacatctgctcgctggtcacagttgttttcgacctagcgtcctccaactacactccttggcgtcactggtcgtcctcaccttgcaacactacaccctcgacgaccatgtcttcactgacggttgccttcctagcgtcgtatggacagtgtggtcctatcttggatcctcgccactgcaattgtcgagttgcaggacatcgtccacgagcgtggtggcactgttcgtctggcctgggttgccatcaagaaccaatttctcggcaacagcgaggcccatgtcgtccacctcgacgtcgcttttcagatctttgtatagggcgacttctccgtcattgtgtattgtcgccagatgaagggcattgtcagatgctcttcgcgacctcggtgagccggtctccaatcgcacccttgttctcaaccttcttcatggcctcaatgagtgctacgggcctcatcggactaggattgtgtgatatgttgtgttcccctccttccagaaggcttggaatgacctcattcttgaggagctcattgagggggcctcgccttcccctacaaccgcacaagctctctacagccttggtcctagcggaccgaccgtctttgcgcctcgagccctccatttctatcgctaggacctcgtctcctcgtcatcctgccctctttggccctcctgctggctatggtggggacaaccgtcgcaggcattagcgtggcgatggaggccacactggaggcggtggtgtgtgtcggtgtttggaaccgacagtgcactacagggcgtaccacgtagtgcttttgggaggacgacgaggtcgatcgcagctcgatggttcatgtagggcatgatgagacactgagaattatataggttcaggccgcttgagcgtgtaatactctacgccgtgtgagtttgtggagttgtattgcctgctctcttggttacagtgagttccagaggtcgaagatgactatgtctactgatgtctgtctttcgttttcgtaggggctccccctccgccttattcccgtccgaggagttacaagcacgacccgatgaacgtcctgagtctacctgcctccatgagagtcgtgccgacttgcctggaggtcaacaagtctttagggaatccgcacgtaccctgcatgcacggaattcggcctaggtatcttcacgctcacgcaaccgccttcctcgcctgcttctggttacaaccgactgatgtcccctggaggttgcgcccgcggcccatcggggatctctctggcggtccacagaacatatgagtcttggtgacctgggggatatctatcccccacatgcgccctgtccatcactctacaacccgtggaccgaccaaatcactgtggcccgccccaaccccgggtggctcgacgtcgcggttgcttccgcctcaccatgcgctccttaccactccaccatttgatggtcctaggtgtcttggcgctatcggtgatgcccccatcaccgcttcttcctcacccgtcgcctcacacggctctgtcctggccgtgggctagggtgtgggaccagcggtgtcttgctaactcgtttagcacgatgaccttgaccccctgctgtgcccatcactgactgggtggtcgtctccgatacctcgttccataccactatggacattggtatccttcttccaccattgttggcaatggttctgttcttccagtcacctccatcaacgactcaaatctttttggtccttttcgtcttcgcaatgttcttgttgctcctgacaacattcggaaccttctatctattcgtcaattgactactgacatttcctgttctacggagtttgaccctttcggtttgttcatgaaggatcttgccacttggagtcttctcgcacggtgtgacagctttggcccctatacacccttcaccttcctgggtccactacatctttggcagcctcacatgttttgaccactacaacttcgtccactacttggcatcgttgtcttggccatccggatcctgatgttatgtccaagttgtctagtagttctgtcatctcttgtagttgaggcccccatgagtctatgccatgcctgtcagctgggttgtcatattaggctcgcttttcctcattcaggttgtgcgcccttttgatctcattcaccgtgatttatggatatctcttgttctgagtgtctcaggctataaatattaccttgtgattcttgatgatggctctcattacatgtggatttttctgttgcgcttgaagtccgatatgtccccccatgctttctcatttctttgcctgggtgtccactcagttcggtagcacctgccaagccattcagtgtgataactggacagactttgacaacttttctcgtgccatcttcctcaatcgtggcgtccatattcagatgtcatgcccctacacttctccctagaacagcaaggctgagcgcatgattcgcactaccaacaacatcatacgcttcctgctcttacaagtctcgattcatgttcggttctaggctaaggctctctacattgccaactacctgcttaatcgtctgcctattgaggcgatctgtgctctcacccctcactttgccttatttggctcacttctacctatgaacatcttcacgtcttcggatgtgcttgctatcccaaccttttcaccactgctcataagcttgcccacggttcgacaagttgtgtctttcttgggtactcccatgatcacaaagggtactagtatgtcgatctttccaccaaccaccttttaatctctcatgttgtcttagacgaggcttcctttcttttctctgcttccccctccacctctgttcctaaattggattcccttttcgcgaattgtcgtgtggactcccctatacaaccccacttgttttttcctctgcaggctcattctccgccgcgccatcagcggcctccgcgtcgttgtaacgtcgtgcatagcctcgttgtcccccattacaccccttgtggccctgtcatcccctgtcgtgccacacacggccttgccatcccccactgcgcccctcgcgaccttgccatcccttgtcatgccatgtgcgtccttggcgtcctctaccgcgccttgcgcagcttcagcgtctcgattcactgatcctatgcatgtctatgagtgacatgcacagagcatgcacgacctcatatttgtctcctacgcgatgaggctacgattcgccgaccctgtccatgtctatcatctctgtgcgcaggattgtccatcgacccgctcttgcatcgagccgtcggtgtaccacactcctctcctttgttgagatccctgtcacatccatccgatggtgactcgccaaaccgtgcggtcctctggcctgttgatcgtcttgtcctttcgactgttgcctcatcgtcagtggtctcccttatgccactgttcgctcgtcgtgctcttgtagatcctcactagtgttgtgctatgtaggacaagcatgtggccctgcttgccaatcacacctaggacttggttcaccgtcccactcgctgcaacattgtcactggcaaatgggtgttcatccacaagcgccacgccgacagctccttcgattggtacaaggcttagtggatccttcgggggtttactcggcttcatgtcgttgactatgatgagaccttcagtcccgtggtgaagtcacgcattgtccgcacgattctgtctttgcctctctcacggtcttgacctgtccacccgctagacgtaaaagaacgcctttctctatggcactttgactgagacaatgtattgcagccagcggatcggttttatggatcctgctcatccgaacatggtctacaaacttcacaagtcgttgtatggtctgaagcaggcaccccgctttgcttccttggtctccctaggctttgttgaggcctagtcggacacgtcgctcttcatttattgttgttgtggtggcactgtatacctacttatgtatgttgacgacattgttctcatggtcttcggtcctgctatcttgcagcgaaccatctctgccttgcagcgggagtttgctatgaaggatctgggacaacttcattacttgtcattgccgttgagccccccaccctagccgcctcatgtttcttcaacaacgggcgtacactggggatctttctgattgagctagcatgacagttgcatgctttgctccaccccagtggatacacaggctaaggtctcctccgttgttggtgtccctgttagtgattccactgcatactggaccctcttcttgcgctatccagtatctcactttcaccaggctagatattgtttatgttggttagtagttgtgcctacatatgcatgatccctaggagtcacaccttaccgctgtgaagtggatcttttagtaccttcggggcacactcgactatggccttctctaatgctcctccgcatcagcacttgtctcctacactgatgttgactaggcgcgttgctcggacacgcgtcgctctacttctggctatttcttctttttgggcagtaaccttgtatcctggtcgttgaagtggtagcaggtcgtctcccgctcgagtgtcgaggccgagtatcgtgttgtggctaatggtgtggttgacacatgatggattcgatagtttcttctggagctttagtcctatctccagcaccaacctcgtctattgtgacaacgtcaacgtcgtttacctctccaccaaccctacccaacaccaacagacaaagcatgttgagatcgacctccacttcgtccgcgagtgtgttgccattgatgatgtttgtgtccatgtgcagacgacttctcagttcgtcgacatcttcaccaagggcctcccaacgtcgttgttcttggagttacgctccagtctcaacatctgtcgctaatagagtttcgactgtgggaggaggcgagggggtgttagagtgtattgttcctattgggcctaggccttgtatccatcccactatggggcttttatttgtacctacacctatgtcctgatattgtattccaactcttcctctccaatatcttgccttggcatgggcggatcctctcctatatcttgccttggcaggggcagagctatttgtactgctctgggtgcggctgcacctacacccaaaaaaataactttggcaagaatcaatttattactatatttgcagcgtgcatgtgccacaaagcaagcgcaccctctctgatttgctctagctccacccctatgccttgacctggatttcttgttagttcttagacagttatagtatgtgtatgtgtgctaatttaaccacagttctgtttcgatcaaatggaagactaaaaatctattatagaatatgctggcattgcaagaataacaaaggggctgaatatgaacttatccagcttatttgataaaaagttggtatgtactttcctgcaagtttatctggctagatatcttccttttgatgatacttgaaccttgaaatattagtagttc

SEQ ID NO: 31301 - DNA, 3546 bp, Zea Mays
taaaacccaaatcagtagccacatgtttcgtccttctctcttcccatcgtctctctgaccctctcccctcgtcccgaactggcgaacagtaagcgaaacataaacaaacaaccacggacccaatgaaatcgagggaaggttcacgacacgctgctccccaccactaaccgcactcgattgagcgccatgctgcagctccagccccctgggttcctgcccatcccgcgccggcgcgtcaccgcccgcgggcgtcgcgcccgccctgtcatcgccttcaactcccagtggaagatccccgacgtcgacacagatgcggtgcgggagcgagtgcggtcttggatgtctctggcgcggggcgcgatcgccgacgcggggcgcgcggcgcgggagggagggaggcacaaagaggagcccgagggtgggaagaagaagcagcggaaggaggtgaccgtggaggagcaggcgttcgttgcggtgccagaggtcaccgtggagccgcgggtgccccagggttggctctcgctggacgccgtcgtctccatcgagcagttcgccaggttgaatgggttgacggggagacaggtgcagaggatatttgaatcacttgctccagagcatctgcacaatgacgctcgaagcctggttgagtatagctgcttccgctacttggcaaaagataattctgacttccatccaaacttgaaggagcttgcctttcaaaagcttatctttgtgactatgcttgcttgggaagatccatataacgaagacagcagtccactttcttcgctagacaactattctgtattgggaaggcttgttggagaagatgcctttgcccgaattgctcctgctgttgcaggtgttgctgatgtttcaacagctcattatctctttagggctcttgttggtgcagaaaagggactttcatttgatctgtggacaacatatctagcggaacttttgaaggttcatcatggcaggcaaacacatcaaacgggagataattttttgtatgatgagaaagtcttatgcattggctctagtaaaaaaagacctgttctaaaatgggaggaaaataccgcatggccaggaaaccttaccttgacggacaaggcgctgtattttgaggccattggactgtcaggtaccaagaaaccaatgaggcttgaccttacaaatcagaattcaagggctgaaaagacgaaagttggaccatttggatccaaactatttgactctgctgtctcagtttcttctggttcaatgtcagatgaatggacattggagtttgttgatttcagtggggagatgagacgagatgtgtggctcgccttcatcagtgaaattatttcagtttatagattcattcgtgaatatggtccaggtggtgatgatccagcaatacataatgtgtatggtgcgtacaaagggaagaaaagagctgttagtagtgcagcgaacagtattgcaaggctccagtctctgcagttcatacggagattatatgaagatccagctaagctagtgcagttctcttacctgtccaacgcaccatttggtgatgttgttcttcagaccctagcagtgaacttttggggtgggcctctgactacaaaagccagatctgcaaatcatagatcaactcagtggcatagatcttcagaggacccatctagcggtcgcacacatgtttacgacatagatggcagcgtgtacttgcgcaagtggatgacgtcccccagctggacatctagccactcagccaatttttggagaaattcttctgtcaagtatggtataatattgagtaaatctttagttgtagctgataaaaaccttgtagaaaaggcaatggttgactgtaaagagaagagcaaagtagttgaaaggacacaagcgacaatagttgctgctacaatcgaaggtattccaagtaacattgacctcttcaaggagcttatgcttccttttgcaatagtggctgaaaatttcaagaaactgcaacgctgggaaaatccacgttcaacattttgttttctactattggttcatactgttattttcaggaacatgctttcttatgtatttcctttcaccttgatgacgatggccctttccatgcttgctgtcaaaggactgaaagaacaaggccggttaggtagatcttttggtaaagtgacgattagggatcaatcaccttcaaacacaattcagaagatcctagcccttaaagaggcaatggcctcagtggaaaattatctccagaatctgaatgtctccctgctgaagatccgcacgatccttctagctggccaacctgaggtgacaacacaggtcgcgtttgttctcctagcatcctcagccgtccttcttgtgtttcctttcaaatatgttcttgcattctttacatgtgatcttttcacaagggagctagaattccggagggaaacggtgagagccttcatgaacttcgtgaaggaacggtgggaatcaatacatgctgcccctgtggtcgtgttgccatatgaaggcgctgaaagcagccccaagacactcccggcagaagtttcggggcaagcagaaccccagaatgtccaacgtgggagcggttatgtctcctcaaagaatggcatcagcagttgatccgtgcagctttgagggcatcttgctgtaaacttgtgtacagttaaacttgtatagattactcgagagggcagattaggtatagatcgtaccaattggtggattttgcagagtaatgttccatttacgtcgtagtgaagataactagcgtagacgagaacttaggagagaattttgggtccaattcgctgtcttggatcgttggtctggcagttagggatgtcaagtaagaattttgggtccaattcacggtcttggatcgttggtctgacagttaggaatgtcaagttgacagatgcatgtattcataatccgtttggaacgctgcaggatcggggaatatatatcagcggatgtgcctagacagacaagtgatctgggacgtggtttcagttcaggctgcagagaaagctaatgagatatcctgcacctagaaacctgcttaagtgcgttgatggcatcctgtccgtgtacagcgaacggccgttgattcccaaaggacagcagcaaacacattcggggtctcgcatatgaccgctcagcatggcactaggaggactgattggcacggcacggtaagaacatggcacgacaaatgtgcctcttagccgtgtcatgccagtaccggccctaagcattacatatgtaaaccctaaaatataattttaagaagtttaggtagctcttttgttctttgacaattaatattagagtttatattagtatgtgttttattattgagacatgttcccttaaataaatactaaatagaatttaatatcatgctggagttattttttgtgcatttattttatagtttaaaaactcaactcagatttgaaagcattgaaattaaattcaaaatctagaaccagaaataggaaataaaatagaaagggg

SEQ ID NO: 31302 - DNA, 3402 bp, Zea Mays
cgtctctctgaccctctcccctcgtcccgaactggcgaacagtaagcgaaacataaacaaacaaccacggacccaatgaaatcgagggaaggttcacgacacgctgctccccaccactaaccgcactcgattgagcgccatgctgcagctccagccccctgggttcctgcccatcccgcgccggcgcgtcaccgcccgcgggcgtcgcgcccgccctgtcatcgccttcaactcccagtggaagatccccgacgtcgacacagatgcggtgcgggagcgagtgcggtcttggatgtctctggcgcggggcgcgatcgccgacgcggggcgcgcggcgcgggagggagggaggcacaaagaggagcccgagggtgggaagaagaagcagcggaaggaggtgaccgtggaggagcaggcgttcgttgcggtgccagaggtcaccgtggagccgcgggtgccccagggttggctctcgctggacgccgtcgtctccatcgagcagttcgccaggttgaatgggttgacggggagacaggtgcagaggatatttgaatcacttgctccagagcatctgcacaatgacgctcgaagcctggttgagtatagctgcttccgctacttggcaaaagataattctgacttccatccaaacttgaaggagcttgcctttcaaaagcttatctttgtgactatgcttgcttgggaagatccatataacgaagacagcagtccactttcttcgctagacaactattctgtattgggaaggcttgttggagaagatgcctttgcccgaattgctcctgctgttgcaggtgttgctgatgtttcaacagctcattatctctttagggctcttgttggtgcagaaaagggactttcatttgatctgtggacaacatatctagcggaacttttgaaggttcatcatggcaggcaaacacatcaaacgggagataattttttgtatgatgagaaagtcttatgcattggctctagtaaaaaaagacctgttctaaaatgggaggaaaataccgcatggccaggaaaccttaccttgacggacaaggcgctgtattttgaggccattggactgtcaggtaccaagaaaccaatgaggcttgaccttacaaatcagaattcaagggctgaaaagacgaaagttggaccatttggatccaaactatttgactctgctgtctcagtttcttctggttcaatgtcagatgaatggacattggagtttgttgatttcagtggggagatgagacgagatgtgtggctcgccttcatcagtgaaattatttcagtttatagattcattcgtgaatatggtccaggtggtgatgatccagcaatacataatgtgtatggtgcgtacaaagggaagaaaagagctgttagtagtgcagcgaacagtattgcaaggctccagtctctgcagttcatacggagattatatgaagatccagctaagctagtgcagttctcttacctgtccaacgcaccatttggtgatgttgttcttcagaccctagcagtgaacttttggggtgggcctctgactacaaaagccagatctgcaaatcatagatcaactcagtggcatagatcttcagaggacccatctagcggtcgcacacatgtttacgacatagatggcagcgtgtacttgcgcaagtggatgacgtcccccagctggacatctagccactcagccaatttttggagaaattcttctgtcaagtatggtataatattgagtaaatctttagttgtagctgataaaaaccttgtagaaaaggcaatggttgactgtaaagagaagagcaaagtagttgaaaggacacaagcgacaatagttgctgctacaatcgaaggagcttatgcttccttttgcaatagtggctgaaaatttcaagaaactgcaacgctgggaaaatccacgttcaacattttgttttctactattggttcatactgttattttcaggactgaaagaacaaggccggttaggtagatcttttggtaaagtgacgattagggatcaatcaccttcaaacacaattcagaagatcctagcccttaaagaggcaatggcctcagtggaaaattatctccagaatctgaatgtctccctgctgaagatccgcacgatccttctagctggccaacctgaggtgacaacacaggtcgcgtttgttctcctagcatcctcagccgtccttcttgtgtttcctttcaaatatgttcttgcattctttacatgtgatcttttcacaagggagctagaattccggagggaaacggtgagagccttcatgaacttcgtgaaggaacggtgggaatcaatacatgctgcccctgtggtcgtgttgccatatgaaggcgctgaaagcagccccaagacactcccggcagaagtttcggggcaagcagaaccccagaatgtccaacgtgggagcggttatgtctcctcaaagaatggcatcagcagttgatccgtgcagctttgagggcatcttgctgtaaacttgtgtacagttaaacttgtatagattactcgagagggcagattaggtatagatcgtaccaattggtggattttgcagagtaatgttccatttacgtcgtagtgaagataactagcgtagacgagaacttaggagagaattttgggtccaattcgctgtcttggatcgttggtctggcagttagggatgtcaagtaagaattttgggtccaattcacggtcttggatcgttggtctgacagttaggaatgtcaagttgacagatgcatgtattcataatccgtttggaacgctgcaggatcggggaatatatatcagcggatgtgcctagacagacaagtgatctgggacgtggtttcagttcaggctgcagagaaagctaatgagatatcctgcacctagaaacctgcttaagtgcgttgatggcatcctgtccgtgtacagcgaacggccgttgattcccaaaggacagcagcaaacacattcggggtctcgcatatgaccgctcagcatggcactaggaggactgattggcacggcacggtaagaacatggcacgacaaatgtgcctcttagccgtgtcatgccagtaccggccctaagcattacatatgtaaaccctaaaatataattttaagaagtttaggtagctcttttgttctttgacaattaatattagagtttatattagtatgtgttttattattgagacatgttcccttaaataaatactaaatagaatttaatatcatgctggagttattttttgtgcatttattttatagtttaaaaactcaactcagatttgaaagcattgaaattaaattcaaaatctagaaccagaaataggaaataaaatagaaagggg

SEQ ID NO: 31303 - DNA, 3181 bp, Zea Mays
ctctctgaccctctcccctcgtcccgaactggcgaacagtaagcgaaacataaacaaacaaccacggacccaatgaaatcgagggaaggttcacgacacgctgctccccaccactaaccgcactcgattgagcgccatgctgcagctccagccccctgggttcctgcccatcccgcgccggcgcgtcaccgcccgcgggcgtcgcgcccgccctgtcatcgccttcaactcccagtggaagatccccgacgtcgacacaggttgaatgggttgacggggagacaggtgcagaggatatttgaatcacttgctccagagcatctgcacaatgacgctcgaagcctggttgagtatagctgcttccgctacttggcaaaagataattctgacttccatccaaacttgaaggagcttgcctttcaaaagcttatctttgtgactatgcttgcttgggaagatccatataacgaagacagcagtccactttcttcgctagacaactattctgtattgggaaggcttgttggagaagatgcctttgcccgaattgctcctgctgttgcaggtgttgctgatgtttcaacagctcattatctctttagggctcttgttggtgcagaaaagggactttcatttgatctgtggacaacatatctagcggaacttttgaaggttcatcatggcaggcaaacacatcaaacgggagataattttttgtatgatgagaaagtcttatgcattggctctagtaaaaaaagacctgttctaaaatgggaggaaaataccgcatggccaggaaaccttaccttgacggacaaggcgctgtattttgaggccattggactgtcaggtaccaagaaaccaatgaggcttgaccttacaaatcagaattcaagggctgaaaagacgaaagttggaccatttggatccaaactatttgactctgctgtctcagtttcttctggttcaatgtcagatgaatggacattggagtttgttgatttcagtggggagatgagacgagatgtgtggctcgccttcatcagtgaaattatttcagtttatagattcattcgtgaatatggtccaggtggtgatgatccagcaatacataatgtgtatggtgcgtacaaagggaagaaaagagctgttagtagtgcagcgaacagtattgcaaggctccagtctctgcagttcatacggagattatatgaagatccagctaagctagtgcagttctcttacctgtccaacgcaccatttggtgatgttgttcttcagaccctagcagtgaacttttggggtgggcctctgactacaaaagccagatctgcaaatcatagatcaactcagtggcatagatcttcagaggacccatctagcggtcgcacacatgtttacgacatagatggcagcgtgtacttgcgcaagtggatgacgtcccccagctggacatctagccactcagccaatttttggagaaattcttctgtcaagtatggtataatattgagtaaatctttagttgtagctgataaaaaccttgtagaaaaggcaatggttgactgtaaagagaagagcaaagtagttgaaaggacacaagcgacaatagttgctgctacaatcgaaggtattccaagtaacattgacctcttcaaggagcttatgcttccttttgcaatagtggctgaaaatttcaagaaactgcaacgctgggaaaatccacgttcaacattttgttttctactattggttcatactgttattttcaggactgaaagaacaaggccggttaggtagatcttttggtaaagtgacgattagggatcaatcaccttcaaacacaattcagaagatcctagcccttaaagaggcaatggcctcagtggaaaattatctccagaatctgaatgtctccctgctgaagatccgcacgatccttctagctggccaacctgaggtgacaacacaggtcgcgtttgttctcctagcatcctcagccgtccttcttgtgtttcctttcaaatatgttcttgcattctttacatgtgatcttttcacaagggagctagaattccggagggaaacggtgagagccttcatgaacttcgtgaaggaacggtgggaatcaatacatgctgcccctgtggtcgtgttgccatatgaaggcgctgaaagcagccccaagacactcccggcagaagtttcggggcaagcagaaccccagaatgtccaacgtgggagcggttatgtctcctcaaagaatggcatcagcagttgatccgtgcagctttgagggcatcttgctgtaaacttgtgtacagttaaacttgtatagattactcgagagggcagattaggtatagatcgtaccaattggtggattttgcagagtaatgttccatttacgtcgtagtgaagataactagcgtagacgagaacttaggagagaattttgggtccaattcgctgtcttggatcgttggtctggcagttagggatgtcaagtaagaattttgggtccaattcacggtcttggatcgttggtctgacagttaggaatgtcaagttgacagatgcatgtattcataatccgtttggaacgctgcaggatcggggaatatatatcagcggatgtgcctagacagacaagtgatctgggacgtggtttcagttcaggctgcagagaaagctaatgagatatcctgcacctagaaacctgcttaagtgcgttgatggcatcctgtccgtgtacagcgaacggccgttgattcccaaaggacagcagcaaacacattcggggtctcgcatatgaccgctcagcatggcactaggaggactgattggcacggcacggtaagaacatggcacgacaaatgtgcctcttagccgtgtcatgccagtaccggccctaagcattacatatgtaaaccctaaaatataattttaagaagtttaggtagctcttttgttctttgacaattaatattagagtttatattagtatgtgttttattattgagacatgttcccttaaataaatactaaatagaatttaatatcatgctggagttattttttgtgcatttattttatagtttaaaaactcaactcagatttgaaagcattgaaattaaattcaaaatctagaaccagaaataggaaataaaatagaaagggg

SEQ ID NO: 31304 - DNA, 3247 bp, Zea Mays
ctctgaccctctcccctcgtcccgaactggcgaacagtaagcgaaacataaacaaacaaccacggacccaatgaaatcgagggaaggttcacgacacgctgctccccaccactaaccgcactcgattgagcgccatgctgcagctccagccccctgggttcctgcccatcccgcgccggcgcgtcaccgcccgcgggcgtcgcgcccgccctgtcatcgccttcaactcccagtggaagatccccgacgtcgacacaggttgaatgggttgacggggagacaggtgcagaggatatttgaatcacttgctccagagcatctgcacaatgacgctcgaagcctggttgagtatagctgcttccgctacttggcaaaagataattctgacttccatccaaacttgaaggagcttgcctttcaaaagcttatctttgtgactatgcttgcttgggaagatccatataacgaagacagcagtccactttcttcgctagacaactattctgtattgggaaggcttgttggagaagatgcctttgcccgaattgctcctgctgttgcaggtgttgctgatgtttcaacagctcattatctctttagggctcttgttggtgcagaaaagggactttcatttgatctgtggacaacatatctagcggaacttttgaaggttcatcatggcaggcaaacacatcaaacgggagataattttttgtatgatgagaaagtcttatgcattggctctagtaaaaaaagacctgttctaaaatgggaggaaaataccgcatggccaggaaaccttaccttgacggacaaggcgctgtattttgaggccattggactgtcaggtaccaagaaaccaatgaggcttgaccttacaaatcagaattcaagggctgaaaagacgaaagttggaccatttggatccaaactatttgactctgctgtctcagtttcttctggttcaatgtcagatgaatggacattggagtttgttgatttcagtggggagatgagacgagatgtgtggctcgccttcatcagtgaaattatttcagtttatagattcattcgtgaatatggtccaggtggtgatgatccagcaatacataatgtgtatggtgcgtacaaagggaagaaaagagctgttagtagtgcagcgaacagtattgcaaggctccagtctctgcagttcatacggagattatatgaagatccagctaagctagtgcagttctcttacctgtccaacgcaccatttggtgatgttgttcttcagaccctagcagtgaacttttggggtgggcctctgactacaaaagccagatctgcaaatcatagatcaactcagtggcatagatcttcagaggacccatctagcggtcgcacacatgtttacgacatagatggcagcgtgtacttgcgcaagtggatgacgtcccccagctggacatctagccactcagccaatttttggagaaattcttctgtcaagtatggtataatattgagtaaatctttagttgtagctgataaaaaccttgtagaaaaggcaatggttgactgtaaagagaagagcaaagtagttgaaaggacacaagcgacaatagttgctgctacaatcgaaggtattccaagtaacattgacctcttcaaggagcttatgcttccttttgcaatagtggctgaaaatttcaagaaactgcaacgctgggaaaatccacgttcaacattttgttttctactattggttcatactgttattttcaggaacatgctttcttatgtatttcctttcaccttgatgacgatggccctttccatgcttgctgtcaaaggactgaaagaacaaggccggttaggtagatcttttggtaaagtgacgattagggatcaatcaccttcaaacacaattcagaagatcctagcccttaaagaggcaatggcctcagtggaaaattatctccagaatctgaatgtctccctgctgaagatccgcacgatccttctagctggccaacctgaggtgacaacacaggtcgcgtttgttctcctagcatcctcagccgtccttcttgtgtttcctttcaaatatgttcttgcattctttacatgtgatcttttcacaagggagctagaattccggagggaaacggtgagagccttcatgaacttcgtgaaggaacggtgggaatcaatacatgctgcccctgtggtcgtgttgccatatgaaggcgctgaaagcagccccaagacactcccggcagaagtttcggggcaagcagaaccccagaatgtccaacgtgggagcggttatgtctcctcaaagaatggcatcagcagttgatccgtgcagctttgagggcatcttgctgtaaacttgtgtacagttaaacttgtatagattactcgagagggcagattaggtatagatcgtaccaattggtggattttgcagagtaatgttccatttacgtcgtagtgaagataactagcgtagacgagaacttaggagagaattttgggtccaattcgctgtcttggatcgttggtctggcagttagggatgtcaagtaagaattttgggtccaattcacggtcttggatcgttggtctgacagttaggaatgtcaagttgacagatgcatgtattcataatccgtttggaacgctgcaggatcggggaatatatatcagcggatgtgcctagacagacaagtgatctgggacgtggtttcagttcaggctgcagagaaagctaatgagatatcctgcacctagaaacctgcttaagtgcgttgatggcatcctgtccgtgtacagcgaacggccgttgattcccaaaggacagcagcaaacacattcggggtctcgcatatgaccgctcagcatggcactaggaggactgattggcacggcacggtaagaacatggcacgacaaatgtgcctcttagccgtgtcatgccagtaccggccctaagcattacatatgtaaaccctaaaatataattttaagaagtttaggtagctcttttgttctttgacaattaatattagagtttatattagtatgtgttttattattgagacatgttcccttaaataaatactaaatagaatttaatatcatgctggagttattttttgtgcatttattttatagtttaaaaactcaactcagatttgaaagcattgaaattaaattcaaaatctagaaccagaaataggaaataaaatagaaagggg

SEQ ID NO: 31305 - DNA, 3465 bp, Zea Mays
ctctgaccctctcccctcgtcccgaactggcgaacagtaagcgaaacataaacaaacaaccacggacccaatgaaatcgagggaaggttcacgacacgctgctccccaccactaaccgcactcgattgagcgccatgctgcagctccagccccctgggttcctgcccatcccgcgccggcgcgtcaccgcccgcgggcgtcgcgcccgccctgtcatcgccttcaactcccagtggaagatccccgacgtcgacacagatgcggtgcgggagcgagtgcggtcttggatgtctctggcgcggggcgcgatcgccgacgcggggcgcgcggcgcgggagggagggaggcacaaagaggagcccgagggtgggaagaagaagcagcggaaggaggtgaccgtggaggagcaggcgttcgttgcggtgccagaggtcaccgtggagccgcgggtgccccagggttggctctcgctggacgccgtcgtctccatcgagcagttcgccaggttgaatgggttgacggggagacaggtgcagaggatatttgaatcacttgctccagagcatctgcacaatgacgctcgaagcctggttgagtatagctgcttccgctacttggcaaaagataattctgacttccatccaaacttgaaggagcttgcctttcaaaagcttatctttgtgactatgcttgcttgggaagatccatataacgaagacagcagtccactttcttcgctagacaactattctgtattgggaaggcttgttggagaagatgcctttgcccgaattgctcctgctgttgcaggtgttgctgatgtttcaacagctcattatctctttagggctcttgttggtgcagaaaagggactttcatttgatctgtggacaacatatctagcggaacttttgaaggttcatcatggcaggcaaacacatcaaacgggagataattttttgtatgatgagaaagtcttatgcattggctctagtaaaaaaagacctgttctaaaatgggaggaaaataccgcatggccaggaaaccttaccttgacggacaaggcgctgtattttgaggccattggactgtcaggtaccaagaaaccaatgaggcttgaccttacaaatcagaattcaagggctgaaaagacgaaagttggaccatttggatccaaactatttgactctgctgtctcagtttcttctggttcaatgtcagatgaatggacattggagtttgttgatttcagtggggagatgagacgagatgtgtggctcgccttcatcagtgaaattatttcagtttatagattcattcgtgaatatggtccaggtggtgatgatccagcaatacataatgtgtatggtgcgtacaaagggaagaaaagagctgttagtagtgcagcgaacagtattgcaaggctccagtctctgcagttcatacggagattatatgaagatccagctaagctagtgcagttctcttacctgtccaacgcaccatttggtgatgttgttcttcagaccctagcagtgaacttttggggtgggcctctgactacaaaagccagatctgcaaatcatagatcaactcagtggcatagatcttcagaggacccatctagcggtcgcacacatgtttacgacatagatggcagcgtgtacttgcgcaagtggatgacgtcccccagctggacatctagccactcagccaatttttggagaaattcttctgtcaagtatggtataatattgagtaaatctttagttgtagctgataaaaaccttgtagaaaaggcaatggttgactgtaaagagaagagcaaagtagttgaaaggacacaagcgacaatagttgctgctacaatcgaaggagcttatgcttccttttgcaatagtggctgaaaatttcaagaaactgcaacgctgggaaaatccacgttcaacattttgttttctactattggttcatactgttattttcaggaacatgctttcttatgtatttcctttcaccttgatgacgatggccctttccatgcttgctgtcaaaggactgaaagaacaaggccggttaggtagatcttttggtaaagtgacgattagggatcaatcaccttcaaacacaattcagaagatcctagcccttaaagaggcaatggcctcagtggaaaattatctccagaatctgaatgtctccctgctgaagatccgcacgatccttctagctggccaacctgaggtgacaacacaggtcgcgtttgttctcctagcatcctcagccgtccttcttgtgtttcctttcaaatatgttcttgcattctttacatgtgatcttttcacaagggagctagaattccggagggaaacggtgagagccttcatgaacttcgtgaaggaacggtgggaatcaatacatgctgcccctgtggtcgtgttgccatatgaaggcgctgaaagcagccccaagacactcccggcagaagtttcggggcaagcagaaccccagaatgtccaacgtgggagcggttatgtctcctcaaagaatggcatcagcagttgatccgtgcagctttgagggcatcttgctgtaaacttgtgtacagttaaacttgtatagattactcgagagggcagattaggtatagatcgtaccaattggtggattttgcagagtaatgttccatttacgtcgtagtgaagataactagcgtagacgagaacttaggagagaattttgggtccaattcgctgtcttggatcgttggtctggcagttagggatgtcaagtaagaattttgggtccaattcacggtcttggatcgttggtctgacagttaggaatgtcaagttgacagatgcatgtattcataatccgtttggaacgctgcaggatcggggaatatatatcagcggatgtgcctagacagacaagtgatctgggacgtggtttcagttcaggctgcagagaaagctaatgagatatcctgcacctagaaacctgcttaagtgcgttgatggcatcctgtccgtgtacagcgaacggccgttgattcccaaaggacagcagcaaacacattcggggtctcgcatatgaccgctcagcatggcactaggaggactgattggcacggcacggtaagaacatggcacgacaaatgtgcctcttagccgtgtcatgccagtaccggccctaagcattacatatgtaaaccctaaaatataattttaagaagtttaggtagctcttttgttctttgacaattaatattagagtttatattagtatgtgttttattattgagacatgttcccttaaataaatactaaatagaatttaatatcatgctggagttattttttgtgcatttattttatagtttaaaaactcaactcagatttgaaagcattgaaattaaattcaaaatctagaaccagaaataggaaataaaatagaaagggg

SEQ ID NO: 31306 - DNA, 3471 bp, Zea Mays
gtcccgaactggcgaacagtaagcgaaacataaacaaacaaccacggacccaatgaaatcgagggaaggttcacgacacgctgctccccaccactaaccgcactcgattgagcgccatgctgcagctccagccccctgggttcctgcccatcccgcgccggcgcgtcaccgcccgcgggcgtcgcgcccgccctgtcatcgccttcaactcccagtggaagatccccgacgtcgacacagatgcggtgcgggagcgagtgcggtcttggatgtctctggcgcggggcgcgatcgccgacgcggggcgcgcggcgcgggagggagggaggcacaaagaggagcccgagggtgggaagaagaagcagcggaaggaggtgaccgtggaggagcaggcgttcgttgcggtgccagaggtcaccgtggagccgcgggtgccccagggttggctctcgctggacgccgtcgtctccatcgagcagttcgccaggttgaatgggttgacggggagacaggtgcagaggatatttgaatcacttgctccagagcatctgcacaatgacgctcgaagcctggttgagtatagctgcttccgctacttggcaaaagataattctgacttccatccaaacttgaaggagcttgcctttcaaaagcttatctttgtgactatgcttgcttgggaagatccatataacgaagacagcagtccactttcttcgctagacaactattctgtattggcttgttggagaagatgcctttgcccgaattgctcctgctgttgcaggtgttgctgatgtttcaacagctcattatctctttagggctcttgttggtgcagaaaagggactttcatttgatctgtggacaacatatctagcggaacttttgaaggttcatcatggcaggcaaacacatcaaacgggagataattttttgtatgatgagaaagtcttatgcattggctctagtaaaaaaagacctgttctaaaatgggaggaaaataccgcatggccaggaaaccttaccttgacggacaaggcgctgtattttgaggccattggactgtcaggtaccaagaaaccaatgaggcttgaccttacaaatcagaattcaagggctgaaaagacgaaagttggaccatttggatccaaactatttgactctgctgtctcagtttcttctggttcaatgtcagatgaatggacattggagtttgttgatttcagtggggagatgagacgagatgtgtggctcgccttcatcagtgaaattatttcagtttatagattcattcgtgaatatggtccaggtggtgatgatccagcaatacataatgtgtatggtgcgtacaaagggaagaaaagagctgttagtagtgcagcgaacagtattgcaaggctccagtctctgcagttcatacggagattatatgaagatccagctaagctagtgcagttctcttacctgtccaacgcaccatttggtgatgttgttcttcagaccctagcagtgaacttttggggtgggcctctgactacaaaagccagatctgcaaatcatagatcaactcagtggcatagatcttcagaggacccatctagcggtcgcacacatgtttacgacatagatggcagcgtgtacttgcgcaagtggatgacgtcccccagctggacatctagccactcagccaatttttggagaaattcttctgtcaagtatggtataatattgagtaaatctttagttgtagctgataaaaaccttgtagaaaaggcaatggttgactgtaaagagaagagcaaagtagttgaaaggacacaagcgacaatagttgctgctacaatcgaaggtattccaagtaacattgacctcttcaaggagcttatgcttccttttgcaatagtggctgaaaatttcaagaaactgcaacgctgggaaaatccacgttcaacattttgttttctactattggttcatactgttattttcaggaacatgctttcttatgtatttcctttcaccttgatgacgatggccctttccatgcttgctgtcaaaggactgaaagaacaaggccggttaggtagatcttttggtaaagtgacgattagggatcaatcaccttcaaacacaattcagaagatcctagcccttaaagaggcaatggcctcagtggaaaattatctccagaatctgaatgtctccctgctgaagatccgcacgatccttctagctggccaacctgaggtgacaacacaggtcgcgtttgttctcctagcatcctcagccgtccttcttgtgtttcctttcaaatatgttcttgcattctttacatgtgatcttttcacaagggagctagaattccggagggaaacggtgagagccttcatgaacttcgtgaaggaacggtgggaatcaatacatgctgcccctgtggtcgtgttgccatatgaaggcgctgaaagcagccccaagacactcccggcagaagtttcggggcaagcagaaccccagaatgtccaacgtgggagcggttatgtctcctcaaagaatggcatcagcagttgatccgtgcagctttgagggcatcttgctgtaaacttgtgtacagttaaacttgtatagattactcgagagggcagattaggtatagatcgtaccaattggtggattttgcagagtaatgttccatttacgtcgtagtgaagataactagcgtagacgagaacttaggagagaattttgggtccaattcgctgtcttggatcgttggtctggcagttagggatgtcaagtaagaattttgggtccaattcacggtcttggatcgttggtctgacagttaggaatgtcaagttgacagatgcatgtattcataatccgtttggaacgctgcaggatcggggaatatatatcagcggatgtgcctagacagacaagtgatctgggacgtggtttcagttcaggctgcagagaaagctaatgagatatcctgcacctagaaacctgcttaagtgcgttgatggcatcctgtccgtgtacagcgaacggccgttgattcccaaaggacagcagcaaacacattcggggtctcgcatatgaccgctcagcatggcactaggaggactgattggcacggcacggtaagaacatggcacgacaaatgtgcctcttagccgtgtcatgccagtaccggccctaagcattacatatgtaaaccctaaaatataattttaagaagtttaggtagctcttttgttctttgacaattaatattagagtttatattagtatgtgttttattattgagacatgttcccttaaataaatactaaatagaatttaatatcatgctggagttattttttgtgcatttattttatagtttaaaaactcaactcagatttgaaagcattgaaattaaattcaaaatctagaaccagaaataggaaataaaatagaaagggg

SEQ ID NO: 31307 - DNA, 3348 bp, Zea Mays
cgaaacataaacaaacaaccacggacccaatgaaatcgagggaaggttcacgacacgctgctccccaccactaaccgcactcgattgagcgccatgctgcagctccagccccctgggttcctgcccatcccgcgccggcgcgtcaccgcccgcgggcgtcgcgcccgccctgtcatcgccttcaactcccagtggaagatccccgacgtcgacacagatgcggtgcgggagcgagtgcggtcttggatgtctctggcgcggggcgcgatcgccgacgcggggcgcgcggcgcgggagggagggaggcacaaagaggagcccgagggtgggaagaagaagcagcggaaggaggtgaccgtggaggagcaggcgttcgttgcggtgccagaggtcaccgtggagccgcgggtgccccagggttggctctcgctggacgccgtcgtctccatcgagcagttcgccaggttgaatgggttgacggggagacaggtgcagaggatatttgaatcacttgctccagagcatctgcacaatgacgctcgaagcctggttgagtatagctgcttccgctacttggcaaaagataattctgacttccatccaaacttgaagggaaggcttgttggagaagatgcctttgcccgaattgctcctgctgttgcaggtgttgctgatgtttcaacagctcattatctctttagggctcttgttggtgcagaaaagggactttcatttgatctgtggacaacatatctagcggaacttttgaaggttcatcatggcaggcaaacacatcaaacgggagataattttttgtatgatgagaaagtcttatgcattggctctagtaaaaaaagacctgttctaaaatgggaggaaaataccgcatggccaggaaaccttaccttgacggacaaggcgctgtattttgaggccattggactgtcaggtaccaagaaaccaatgaggcttgaccttacaaatcagaattcaagggctgaaaagacgaaagttggaccatttggatccaaactatttgactctgctgtctcagtttcttctggttcaatgtcagatgaatggacattggagtttgttgatttcagtggggagatgagacgagatgtgtggctcgccttcatcagtgaaattatttcagtttatagattcattcgtgaatatggtccaggtggtgatgatccagcaatacataatgtgtatggtgcgtacaaagggaagaaaagagctgttagtagtgcagcgaacagtattgcaaggctccagtctctgcagttcatacggagattatatgaagatccagctaagctagtgcagttctcttacctgtccaacgcaccatttggtgatgttgttcttcagaccctagcagtgaacttttggggtgggcctctgactacaaaagccagatctgcaaatcatagatcaactcagtggcatagatcttcagaggacccatctagcggtcgcacacatgtttacgacatagatggcagcgtgtacttgcgcaagtggatgacgtcccccagctggacatctagccactcagccaatttttggagaaattcttctgtcaagtatggtataatattgagtaaatctttagttgtagctgataaaaaccttgtagaaaaggcaatggttgactgtaaagagaagagcaaagtagttgaaaggacacaagcgacaatagttgctgctacaatcgaaggtattccaagtaacattgacctcttcaaggagcttatgcttccttttgcaatagtggctgaaaatttcaagaaactgcaacgctgggaaaatccacgttcaacattttgttttctactattggttcatactgttattttcaggaacatgctttcttatgtatttcctttcaccttgatgacgatggccctttccatgcttgctgtcaaaggactgaaagaacaaggccggttaggtagatcttttggtaaagtgacgattagggatcaatcaccttcaaacacaattcagaagatcctagcccttaaagaggcaatggcctcagtggaaaattatctccagaatctgaatgtctccctgctgaagatccgcacgatccttctagctggccaacctgaggtgacaacacaggtcgcgtttgttctcctagcatcctcagccgtccttcttgtgtttcctttcaaatatgttcttgcattctttacatgtgatcttttcacaagggagctagaattccggagggaaacggtgagagccttcatgaacttcgtgaaggaacggtgggaatcaatacatgctgcccctgtggtcgtgttgccatatgaaggcgctgaaagcagccccaagacactcccggcagaagtttcggggcaagcagaaccccagaatgtccaacgtgggagcggttatgtctcctcaaagaatggcatcagcagttgatccgtgcagctttgagggcatcttgctgtaaacttgtgtacagttaaacttgtatagattactcgagagggcagattaggtatagatcgtaccaattggtggattttgcagagtaatgttccatttacgtcgtagtgaagataactagcgtagacgagaacttaggagagaattttgggtccaattcgctgtcttggatcgttggtctggcagttagggatgtcaagtaagaattttgggtccaattcacggtcttggatcgttggtctgacagttaggaatgtcaagttgacagatgcatgtattcataatccgtttggaacgctgcaggatcggggaatatatatcagcggatgtgcctagacagacaagtgatctgggacgtggtttcagttcaggctgcagagaaagctaatgagatatcctgcacctagaaacctgcttaagtgcgttgatggcatcctgtccgtgtacagcgaacggccgttgattcccaaaggacagcagcaaacacattcggggtctcgcatatgaccgctcagcatggcactaggaggactgattggcacggcacggtaagaacatggcacgacaaatgtgcctcttagccgtgtcatgccagtaccggccctaagcattacatatgtaaaccctaaaatataattttaagaagtttaggtagctcttttgttctttgacaattaatattagagtttatattagtatgtgttttattattgagacatgttcccttaaataaatactaaatagaatttaatatcatgctggagttattttttgtgcatttattttatagtttaaaaactcaactcagatttgaaagcattgaaattaaattcaaaatctagaaccagaaataggaaataaaatagaaagggg

SEQ ID NO: 31308 - DNA, 3178 bp, Zea Mays
aaacaaccacggacccaatgaaatcgagggaaggttcacgacacgctgctccccaccactaaccgcactcgattgagcgccatgctgcagctccagccccctgggttcctgcccatcccgcgccggcgcgtcaccgcccgcgggcgtcgcgcccgccctgtcatcgccttcaactcccagtggaagatccccgacgtcgacacaggttgaatgggttgacggggagacaggtgcagaggatatttgaatcacttgctccagagcatctgcacaatgacgctcgaagcctggttgagtatagctgcttccgctacttggcaaaagataattctgacttccatccaaacttgaaggagcttgcctttcaaaagcttatctttgtgactatgcttgcttgggaagatccatataacgaagacagcagtccactttcttcgctagacaactattctgtattgggaaggcttgttggagaagatgcctttgcccgaattgctcctgctgttgcaggtgttgctgatgtttcaacagctcattatctctttagggctcttgttggtgcagaaaagggactttcatttgatctgtggacaacatatctagcggaacttttgaaggttcatcatggcaggcaaacacatcaaacgggagataattttttgtatgatgagaaagtcttatgcattggctctagtaaaaaaagacctgttctaaaatgggaggaaaataccgcatggccaggaaaccttaccttgacggacaaggcgctgtattttgaggtaccaagaaaccaatgaggcttgaccttacaaatcagaattcaagggctgaaaagacgaaagttggaccatttggatccaaactatttgactctgctgtctcagtttcttctggttcaatgtcagatgaatggacattggagtttgttgatttcagtggggagatgagacgagatgtgtggctcgccttcatcagtgaaattatttcagtttatagattcattcgtgaatatggtccaggtggtgatgatccagcaatacataatgtgtatggtgcgtacaaagggaagaaaagagctgttagtagtgcagcgaacagtattgcaaggctccagtctctgcagttcatacggagattatatgaagatccagctaagctagtgcagttctcttacctgtccaacgcaccatttggtgatgttgttcttcagaccctagcagtgaacttttggggtgggcctctgactacaaaagccagatctgcaaatcatagatcaactcagtggcatagatcttcagaggacccatctagcggtcgcacacatgtttacgacatagatggcagcgtgtacttgcgcaagtggatgacgtcccccagctggacatctagccactcagccaatttttggagaaattcttctgtcaagtatggtataatattgagtaaatctttagttgtagctgataaaaaccttgtagaaaaggcaatggttgactgtaaagagaagagcaaagtagttgaaaggacacaagcgacaatagttgctgctacaatcgaaggtattccaagtaacattgacctcttcaaggagcttatgcttccttttgcaatagtggctgaaaatttcaagaaactgcaacgctgggaaaatccacgttcaacattttgttttctactattggttcatactgttattttcaggaacatgctttcttatgtatttcctttcaccttgatgacgatggccctttccatgcttgctgtcaaaggactgaaagaacaaggccggttaggtagatcttttggtaaagtgacgattagggatcaatcaccttcaaacacaattcagaagatcctagcccttaaagaggcaatggcctcagtggaaaattatctccagaatctgaatgtctccctgctgaagatccgcacgatccttctagctggccaacctgaggtgacaacacaggtcgcgtttgttctcctagcatcctcagccgtccttcttgtgtttcctttcaaatatgttcttgcattctttacatgtgatcttttcacaagggagctagaattccggagggaaacggtgagagccttcatgaacttcgtgaaggaacggtgggaatcaatacatgctgcccctgtggtcgtgttgccatatgaaggcgctgaaagcagccccaagacactcccggcagaagtttcggggcaagcagaaccccagaatgtccaacgtgggagcggttatgtctcctcaaagaatggcatcagcagttgatccgtgcagctttgagggcatcttgctgtaaacttgtgtacagttaaacttgtatagattactcgagagggcagattaggtatagatcgtaccaattggtggattttgcagagtaatgttccatttacgtcgtagtgaagataactagcgtagacgagaacttaggagagaattttgggtccaattcgctgtcttggatcgttggtctggcagttagggatgtcaagtaagaattttgggtccaattcacggtcttggatcgttggtctgacagttaggaatgtcaagttgacagatgcatgtattcataatccgtttggaacgctgcaggatcggggaatatatatcagcggatgtgcctagacagacaagtgatctgggacgtggtttcagttcaggctgcagagaaagctaatgagatatcctgcacctagaaacctgcttaagtgcgttgatggcatcctgtccgtgtacagcgaacggccgttgattcccaaaggacagcagcaaacacattcggggtctcgcatatgaccgctcagcatggcactaggaggactgattggcacggcacggtaagaacatggcacgacaaatgtgcctcttagccgtgtcatgccagtaccggccctaagcattacatatgtaaaccctaaaatataattttaagaagtttaggtagctcttttgttctttgacaattaatattagagtttatattagtatgtgttttattattgagacatgttcccttaaataaatactaaatagaatttaatatcatgctggagttattttttgtgcatttattttatagtttaaaaactcaactcagatttgaaagcattgaaattaaattcaaaatctagaaccagaaataggaaataaaatagaaagggg

SEQ ID NO: 31309 - DNA, 3058 bp, Zea Mays
cacggacccaatgaaatcgagggaaggttcacgacacgctgctccccaccactaaccgcactcgattgagcgccatgctgcagctccagccccctgggttcctgcccatcccgcgccggcgcgtcaccgcccgcgggcgtcgcgcccgccctgtcatcgccttcaactcccagtggaagatccccgacgtcgacacagatgcggtgcgggagcgagtgcggtcttggatgtctctggcgcggggcgcgatcgccgacgcggggcgcgcggcgcgggagggagggaggcacaaagaggagcccgagggtgggaagaagaagcagcggaaggaggtgaccgtggaggagcaggcgttcgttgcggtgccagaggtcaccgtggagccgcgggtgccccagggttggctctcgctggacgccgtcgtctccatcgagcagttcgccaggttgaatgggttgacggggagacaggtgcagaggatatttgaatcacttgctccagagcatctgcacaatgacgctcgaagcctggttgagtatagctgcttccgctacttggcaaaagataattctgacttccatccaaacttgaagggttcatcatggcaggcaaacacatcaaacgggagataattttttgtatgatgagaaagtcttatgcattggctctagtaaaaaaagacctgttctaaaatgggaggaaaataccgcatggccaggaaaccttaccttgacggacaaggcgctgtattttgaggtaccaagaaaccaatgaggcttgaccttacaaatcagaattcaagggctgaaaagacgaaagttggaccatttggatccaaactatttgactctgctgtctcagtttcttctggttcaatgtcagatgaatggacattggagtttgttgatttcagtggggagatgagacgagatgtgtggctcgccttcatcagtgaaattatttcagtttatagattcattcgtgaatatggtccaggtggtgatgatccagcaatacataatgtgtatggtgcgtacaaagggaagaaaagagctgttagtagtgcagcgaacagtattgcaaggctccagtctctgcagttcatacggagattatatgaagatccagctaagctagtgcagttctcttacctgtccaacgcaccatttggtgatgttgttcttcagaccctagcagtgaacttttggggtgggcctctgactacaaaagccagatctgcaaatcatagatcaactcagtggcatagatcttcagaggacccatctagcggtcgcacacatgtttacgacatagatggcagcgtgtacttgcgcaagtggatgacgtcccccagctggacatctagccactcagccaatttttggagaaattcttctgtcaagtatggtataatattgagtaaatctttagttgtagctgataaaaaccttgtagaaaaggcaatggttgactgtaaagagaagagcaaagtagttgaaaggacacaagcgacaatagttgctgctacaatcgaaggagcttatgcttccttttgcaatagtggctgaaaatttcaagaaactgcaacgctgggaaaatccacgttcaacattttgttttctactattggttcatactgttattttcaggactgaaagaacaaggccggttaggtagatcttttggtaaagtgacgattagggatcaatcaccttcaaacacaattcagaagatcctagcccttaaagaggcaatggcctcagtggaaaattatctccagaatctgaatgtctccctgctgaagatccgcacgatccttctagctggccaacctgaggtgacaacacaggtcgcgtttgttctcctagcatcctcagccgtccttcttgtgtttcctttcaaatatgttcttgcattctttacatgtgatcttttcacaagggagctagaattccggagggaaacggtgagagccttcatgaacttcgtgaaggaacggtgggaatcaatacatgctgcccctgtggtcgtgttgccatatgaaggcgctgaaagcagccccaagacactcccggcagaagtttcggggcaagcagaaccccagaatgtccaacgtgggagcggttatgtctcctcaaagaatggcatcagcagttgatccgtgcagctttgagggcatcttgctgtaaacttgtgtacagttaaacttgtatagattactcgagagggcagattaggtatagatcgtaccaattggtggattttgcagagtaatgttccatttacgtcgtagtgaagataactagcgtagacgagaacttaggagagaattttgggtccaattcgctgtcttggatcgttggtctggcagttagggatgtcaagtaagaattttgggtccaattcacggtcttggatcgttggtctgacagttaggaatgtcaagttgacagatgcatgtattcataatccgtttggaacgctgcaggatcggggaatatatatcagcggatgtgcctagacagacaagtgatctgggacgtggtttcagttcaggctgcagagaaagctaatgagatatcctgcacctagaaacctgcttaagtgcgttgatggcatcctgtccgtgtacagcgaacggccgttgattcccaaaggacagcagcaaacacattcggggtctcgcatatgaccgctcagcatggcactaggaggactgattggcacggcacggtaagaacatggcacgacaaatgtgcctcttagccgtgtcatgccagtaccggccctaagcattacatatgtaaaccctaaaatataattttaagaagtttaggtagctcttttgttctttgacaattaatattagagtttatattagtatgtgttttattattgagacatgttcccttaaataaatactaaatagaatttaatatcatgctggagttattttttgtgcatttattttatagtttaaaaactcaactcagatttgaaagcattgaaattaaattcaaaatctagaaccagaaataggaaataaaatagaaagggg

SEQ ID NO: 31310 - DNA, 2603 bp, Zea Mays
atttttttacagctccaccacctgacatgattgcaatatgaggttcatcatggcaggcaaacacatcaaacgggagataattttttgtatgatgagaaagtcttatgcattggctctagtaaaaaaagacctgttctaaaatgggaggaaaataccgcatggccaggaaaccttaccttgacggacaaggcgctgtattttgaggtaccaagaaaccaatgaggcttgaccttacaaatcagaattcaagggctgaaaagacgaaagttggaccatttggatccaaactatttgactctgctgtctcagtttcttctggttcaatgtcagatgaatggacattggagtttgttgatttcagtggggagatgagacgagatgtgtggctcgccttcatcagtgaaattatttcagtttatagattcattcgtgaatatggtccaggtggtgatgatccagcaatacataatgtgtatggtgcgtacaaagggaagaaaagagctgttagtagtgcagcgaacagtattgcaaggctccagtctctgcagttcatacggagattatatgaagatccagctaagctagtgcagttctcttacctgtccaacgcaccatttggtgatgttgttcttcagaccctagcagtgaacttttggggtgggcctctgactacaaaagccagatctgcaaatcatagatcaactcagtggcatagatcttcagaggacccatctagcggtcgcacacatgtttacgacatagatggcagcgtgtacttgcgcaagtggatgacgtcccccagctggacatctagccactcagccaatttttggagaaattcttctgtcaagtatggtataatattgagtaaatctttagttgtagctgataaaaaccttgtagaaaaggcaatggttgactgtaaagagaagagcaaagtagttgaaaggacacaagcgacaatagttgctgctacaatcgaaggtattccaagtaacattgacctcttcaaggagcttatgcttccttttgcaatagtggctgaaaatttcaagaaactgcaacgctgggaaaatccacgttcaacattttgttttctactattggttcatactgttattttcaggaacatgctttcttatgtatttcctttcaccttgatgacgatggccctttccatgcttgctgtcaaaggactgaaagaacaaggccggttaggtagatcttttggtaaagtgacgattagggatcaatcaccttcaaacacaattcagaagatcctagcccttaaagaggcaatggcctcagtggaaaattatctccagaatctgaatgtctccctgctgaagatccgcacgatccttctagctggccaacctgaggtgacaacacaggtcgcgtttgttctcctagcatcctcagccgtccttcttgtgtttcctttcaaatatgttcttgcattctttacatgtgatcttttcacaagggagctagaattccggagggaaacggtgagagccttcatgaacttcgtgaaggaacggtgggaatcaatacatgctgcccctgtggtcgtgttgccatatgaaggcgctgaaagcagccccaagacactcccggcagaagtttcggggcaagcagaaccccagaatgtccaacgtgggagcggttatgtctcctcaaagaatggcatcagcagttgatccgtgcagctttgagggcatcttgctgtaaacttgtgtacagttaaacttgtatagattactcgagagggcagattaggtatagatcgtaccaattggtggattttgcagagtaatgttccatttacgtcgtagtgaagataactagcgtagacgagaacttaggagagaattttgggtccaattcgctgtcttggatcgttggtctggcagttagggatgtcaagtaagaattttgggtccaattcacggtcttggatcgttggtctgacagttaggaatgtcaagttgacagatgcatgtattcataatccgtttggaacgctgcaggatcggggaatatatatcagcggatgtgcctagacagacaagtgatctgggacgtggtttcagttcaggctgcagagaaagctaatgagatatcctgcacctagaaacctgcttaagtgcgttgatggcatcctgtccgtgtacagcgaacggccgttgattcccaaaggacagcagcaaacacattcggggtctcgcatatgaccgctcagcatggcactaggaggactgattggcacggcacggtaagaacatggcacgacaaatgtgcctcttagccgtgtcatgccagtaccggccctaagcattacatatgtaaaccctaaaatataattttaagaagtttaggtagctcttttgttctttgacaattaatattagagtttatattagtatgtgttttattattgagacatgttcccttaaataaatactaaatagaatttaatatcatgctggagttattttttgtgcatttattttatagtttaaaaactcaactcagatttgaaagcattgaaattaaattcaaaatctagaaccagaaataggaaataaaatagaaagggg

SEQ ID NO: 31311 - DNA, 5157 bp, Zea Mays
cgaaagcccaggaaaatgcttgtcctccactttagatcgacgtccttccacccgatccatgggaaaaccctagagctagagcttgacgcgcacctaattttgcgcgccaaatgctcgaacaccttcgcgccatagctacccgctggcattggcaatatccgaagcgaacagggctcccgcaccccaacacctaatttgtgcgcgcgcccgtgtcacaaagagagtgaagagagagcatggaaggctcacccgccgatgccgccggctccggccgccgcacgcgcacccggggcgcggaggcgtcggggcgtgccgccgtgctccaacaactccgcgccgttcgcagtggtcaaattcgtgcctccgacgccatccaggtgaaggttgacgccccgatttacgacaccgtcccggaggaggagtacaacgtgctcgtcgctcgccgccgcaaggaagcaggcgagttcatcatcgacgacgacgggctcggttacgtcgaggacggccgcgaggaggactggagccaccgcgctctcccttcctcctccgacgagggatctgaaggcgaggacggcgccccccgcaagcggaagcagacgcgccctccccaggcgaagcgccagccgcagcagtccgccaaggtggcctctctctccgccgctgccgcaaagacgggccagcagatctcctctatgttcacatcctcggtatttaagggacgcggcagcgaccgcgccaagaacttggcactggccgccgacagcatcgtggacgacgtcatcgccgagtttgcacctgacgagaacgaccgtgaggagaggcggcgacgggttgctagggtttgtgcgccgcagcctgtcccaacagtttcctacatcaagcctcaaaaggtaattctcgatgctgaaatggtcagatcggagaatgaaaatgatatggtggtggtggaattgaagaacgatactgagatggaaaccaatttggaagaaattcctggttctagtgctgaattggtggttaataagagtttggaggagccgaagcaggaggataatggggaagtaaagatagaaaaggcacaccgcctcaatgcaaagattaaggcggaggagtgcagaaataatgatgtgacgagtgcaacagaaggatggatgaagatatgtgggaatggggagaatgcagtaggtgaagaaggggtggctgttgatggtaacaccaatgtggatgaaagttcagagtttgagctgaaagatggagcactgcccttctacatactggatgcatacgaggaaccatttggtgctaattcaggcacagtgtatttgtttgggaaggttgaagttggcaagcaattccatagttgttgcgtcattgtaaaaaatattcaaagatgcatatatgctattccaaaccggtcagtgtttccaatggactccatatcagggatagaaagaaaccccactgctgaccttttgccatcacttcgagcaactctacatgagttggcatcaggattaaagagtgaaatagctgacaaattgtcagacctcaatgtgtcaaatttcataatgactccagtcaagaggaattatgcatttgagaggactgatctaccaaatggagagcagtatgtcctaaaaatcaattatccttacaaggatcctgctctaccagcagacctcaggggtgaacattttcatgcattgcttgggacaaacaatagtgctcttgaattgtttcttatcaaaaggaaggtcaagggaccttcatggctgtcggtttccaagtttgtgacacggccatccactcagcgggtcagctggtgtaaatttgaagttacagttgattgcccaaaggatatatctgttttgacaacaagtacaaatctagaagttcctactgttgtagttggagcagttaatctcaaaactatcataaatgagaaacacaatgtgcatgagattgtgtcggcatctctcatatgttgtcatcgggtgaagattgatagtccaatgcgtccagaagattggcagaaacggggaatgctcagccattttactgttgtgcgcaaacttgaaggtagcatatttcctataggtcttgctaaggaagcttctgataggaaccagaaggctggtagcaacgtgctagcactagaaagcagtgaacgtgcattattaaatcgcttgatgattgagctgagcaaacttgattgtgatgtacttgtgggacacaatatttcagggttcgacttggatgtgcttctacaccgtgctcagacatgcaaagtgccaagcagcatgtggtccaagattggtcgtctcaggcgatcattaatgcccaggcttaccaaaggaagcacactctatggttctggagcaagtccaggaattatgtcctgtgttgctggccgtcttctctgtgacacctatttatgctctcgtgaccttctgaaggaggtgagttattccttgacacaacttgcagaaacacagttaaaaaaggtcaggaaggaggtttctccacacgatatacctatgatgttccagtcttcaggcgaactgctcaaactggttgaatatggtgagacagatgcatggctttctttggagctcatgtttcatttgagtgttctcccactgacacgacaattaaccaacattagtggtaacctgtgggggaaaacactccagggtgctagggctcagagggtagaatatctactactgcattcattccatgcaagaaaatttattgcaccagataaatttgcacgcaacaaagagctgaactccacaaaaagaaaaatgaatcctgatactgggggtgcaaatgctgatgatggtgctgctgatccttccgttgatgatgaagtgcataatggtgatcaaagtaaagctagaaaaggaccttcatatgctggtggattagttttggagcctaagaagggtctatatgacaagtatgttctacttctcgacttcaacagcctttacccttcaataattcaggaattcaacatatgctttaccactgtcgagcgttcttctgatggcagtgtacctaatttgccagcatcaaaagttactggtgttttacctgagttgctgaggagtttggtggagaggagaaggatggttaaatcatggttgaagactgcttctggtcttaaaaagcagcagttcgatattcagcaacaagcattgaaacttactgcaaatagcatgtatggttgcttgggcttttccaactccaggttttatgcaaagccacttgctgagctgattacactccaaggtagagagatattgcaaaacactgtagatctggttcagaacaatttaaatttggaggttatctatggtgatacagattctatcatgatacatactggacttgatgacatctccagggcaaaagcaattgcaggaaaggttattcaggaggtgaacaaaaagtaccgttgtctggagattgatcttgatggcatatacaagagaatgttacttcttaaaaagaagaaatatgctgctattaaagtagcactggatggcagcttacgagagaacattgaacgcaaggggctcgatatggtcagacgtgattggagtttgctgtcaaaagacattggagatttttgtcttaaacaaattctgtctggagggacatgtgatgatgttgttgagtcaatacatagttcacttgtccaggtgcaagagcaaatgagaagtggtcaaatagaactcgaaaaatatgttatcacaaagagcttaacaaaagcaccagaagattatccagatgctaaaaatcagcctcatgttcaggttgctttgagactcaagcaaaatggttactctggttgctcagctggtgacacagtaccttatataatttgctctcagcaggactcagataatgcacattctgtgggaatagctcagagagctagacatcccgaggagttaaaaagagaccctgacaagtggatgattgacattgactattatttatcacaacagattcatcctgtcgtttctcgtctgtgtgcttccattcagggcactagtccagctcgtctggctgaatgtctgggccttgattcggctaagttccaaccaagattgactgagtcgagcaaccaagatacatctatgatgctgttatctgtaatcgatgacgaagatgagagatatcgtggttgtgaaccactgcgtttgtcatgcccaagctgttctggtaccttcgactgcccccctgtatctagtctgattactagtgctagtgctacaagtgtatcagatccaattgaaggaaaggatgctactgctaatttctggcgccatatgcggtgcccaagatgcctagataatactgttgagtccaaattttccccttctatgctcgccaaccagatgaaaagacaggctgataatttcattagtctatattataaaggtttgcagatgtgtgacgatgagggttgcaaatactcgactcacagcgtaaaccttagagttatgggggattctgagagaggaactgtctgtcctaactacccacgctgcaacggtcgcctagtaagacagtacaaggagtcagatctgtacaggcaactatcatacttttgttatgtacttgatgcaacccggtgtcttgaaaagctggaccagaaggcaaggctccccttcgagagagagtttgtagcagtaggccaaacaattaaattggcactgctagagatccagaaaatccgagacagatgtgcatttggatgggttcagctaaaggaccttgccgtatcaatatgatgtttttcttgtgtgaaagggctcaattagataagtttgaattaaccgtgcaagaaattcatctctctgtaggttattctagatctcgttggtaaaaggaacaggacacggcaaacggtgtatcgaaacaccagccgtctttggtatttccctgcgtgacagaccttgtatcatctatacatgtgttttagccagtggctgtattgtacaactttatgttgtgtccgtctccataggcctcggtgcatgtgccaatgtagtcttgttaatataattatacgcagcgtgtgatgagaaaaaaaaaacaagacactagattactaatgtcgcgagttgcggtagatgggaa

SEQ ID NO: 31312 - DNA, 5100 bp, Zea Mays
ctccactttagatcgacgtccttccacccgatccatgggaaaaccctagagctagagcttgacgcgcacctaattttgcgcgccaaatgctcgaacaccttcgcgccatagctacccgctggcattggcaatatccgaagcgaacagggctcccgcaccccaacacctaatttgtgcgcgcgcccgtgtcacaaagagagtgaagagagagcatggaaggctcacccgccgatgccgccggctccggccgccgcacgcgcacccggggcgcggaggcgtcggggcgtgccgccgtgctccaacaactccgcgccgttcgcagtggtcaaattcgtgcctccgacgccatccaggtgaaggttgacgccccgatttacgacaccgtcccggaggaggagtacaacgtgctcgtcgctcgccgccgcaaggaagcaggcgagttcatcatcgacgacgacgggctcggttacgtcgaggacggccgcgaggaggactggagccaccgcgctctcccttcctcctccgacgagggatctgaaggcgaggacggcgccccccgcaagcggaagcagacgcgccctccccaggcgaagcgccagccgcagcagtccgccaaggtggcctctctctccgccgctgccgcaaagacgggccagcagatctcctctatgttcacatcctcggtatttaagggacgcggcagcgaccgcgccaagaacttggcactggccgccgacagcatcgtggacgacgtcatcgccgagtttgcacctgacgagaacgaccgtgaggagaggcggcgacgggttgctagggtttgtgcgccgcagcctgtcccaacagtttcctacatcaagcctcaaaaggtaattctcgatgctgaaatggtcagatcggagaatgaaaatgatatggtggtggtggaattgaagaacgatactgagatggaaaccaatttggaagaaattcctggttctagtgctgaattggtggttaataagagtttggaggagccgaagcaggaggataatggggaagtaaagatagaaaaggcacaccgcctcaatgcaaagattaaggcggaggagtgcagaaataatgatgtgacgagtgcaacagaaggatggatgaagatatgtgggaatggggagaatgcagtaggtgaagaaggggtggctgttgatggtaacaccaatgtggatgaaagttcagagtttgagctgaaagatggagcactgcccttctacatactggatgcatacgaggaaccatttggtgctaattcaggcacagtgtatttgtttgggaaggttgaagttggcaagcaattccatagttgttgcgtcattgtaaaaaatattcaaagatgcatatatgctattccaaaccggtcagtgtttccaatggactccatatcagggatagaaagaaaccccactgctgaccttttgccatcacttcgagcaactctacatgagttggcatcaggattaaagagtgaaatagctgacaaattgtcagacctcaatgtgtcaaatttcataatgactccagtcaagaggaattatgcatttgagaggactgatctaccaaatggagagcagtatgtcctaaaaatcaattatccttacaaggatcctgctctaccagcagacctcaggggtgaacattttcatgcattgcttgggacaaacaatagtgctcttgaattgtttcttatcaaaaggaaggtcaagggaccttcatggctgtcggtttccaagtttgtgacacggccatccactcagcgggtcagctggtgtaaatttgaagttacagttgattgcccaaaggatatatctgttttgacaacaagtacaaatctagaagttcctactgttgtagttggagcagttaatctcaaaactatcataaatgagaaacacaatgtgcatgagattgtgtcggcatctctcatatgttgtcatcgggtgaagattgatagtccaatgcgtccagaagattggcagaaacggggaatgctcagccattttactgttgtgcgcaaacttgaaggtagcatatttcctataggtcttgctaaggaagcttctgataggaaccagaaggctggtagcaacgtgctagcactagaaagcagtgaacgtgcattattaaatcgcttgatgattgagctgagcaaacttgattgtgatgtacttgtgggacacaatatttcagggttcgacttggatgtgcttctacaccgtgctcagacatgcaaagtgccaagcagcatgtggtccaagattggtcgtctcaggcgatcattaatgcccaggcttaccaaaggaagcacactctatggttctggagcaagtccaggaattatgtcctgtgttgctggccgtcttctctgtgacacctatttatgctctcgtgaccttctgaaggaggtgagttattccttgacacaacttgcagaaacacagttaaaaaaggtcaggaaggaggtttctccacacgatatacctatgatgttccagtcttcaggcgaactgctcaaactggttgaatatggtgagacagatgcatggctttctttggagctcatgtttcatttgagtgttctcccactgacacgacaattaaccaacattagtggtaacctgtgggggaaaacactccagggtgctagggctcagagggtagaatatctactactgcattcattccatgcaagaaaatttattgcaccagataaatttgcacgcaacaaagagctgaactccacaaaaagaaaaatgaatcctgatactgggggtgcaaatgctgatgatggtgctgctgatccttccgttgatgatgaagtgcataatggtgatcaaagtaaagctagaaaaggaccttcatatgctggtggattagttttggagcctaagaagggtctatatgacaagtatgttctacttctcgacttcaacagcctttacccttcaataattcaggaattcaacatatgctttaccactgtcgagcgttcttctgatggcagtgtacctaatttgccagcatcaaaagttactggtgttttacctgagttgctgaggagtttggtggagaggagaaggatggttaaatcatggttgaagactgcttctggtcttaaaaagcagcagttcgatattcagcaacaagcattgaaacttactgcaaataggttttatgcaaagccacttgctgagctgattacactccaaggtagagagatattgcaaaacactgtagatctggttcagaacaatttaaatttggaggttatctatggtgatacagattctatcatgatacatactggacttgatgacatctccagggcaaaagcaattgcaggaaaggttattcaggaggtgaacaaaaagtaccgttgtctggagattgatcttgatggcatatacaagagaatgttacttcttaaaaagaagaaatatgctgctattaaagtagcactggatggcagcttacgagagaacattgaacgcaaggggctcgatatggtcagacgtgattggagtttgctgtcaaaagacattggagatttttgtcttaaacaaattctgtctggagggacatgtgatgatgttgttgagtcaatacatagttcacttgtccaggtgcaagagcaaatgagaagtggtcaaatagaactcgaaaaatatgttatcacaaagagcttaacaaaagcaccagaagattatccagatgctaaaaatcagcctcatgttcaggttgctttgagactcaagcaaaatggttactctggttgctcagctggtgacacagtaccttatataatttgctctcagcaggactcagataatgcacattctgtgggaatagctcagagagctagacatcccgaggagttaaaaagagaccctgacaagtggatgattgacattgactattatttatcacaacagattcatcctgtcgtttctcgtctgtgtgcttccattcagggcactagtccagctcgtctggctgaatgtctgggccttgattcggctaagttccaaccaagattgactgagtcgagcaaccaagatacatctatgatgctgttatctgtaatcgatgacgaagatgagagatatcgtggttgtgaaccactgcgtttgtcatgcccaagctgttctggtaccttcgactgcccccctgtatctagtctgattactagtgctagtgctacaagtgtatcagatccaattgaaggaaaggatgctactgctaatttctggcgccatatgcggtgcccaagatgcctagataatactgttgagtccaaattttccccttctatgctcgccaaccagatgaaaagacaggctgataatttcattagtctatattataaaggtttgcagatgtgtgacgatgagggttgcaaatactcgactcacagcgtaaaccttagagttatgggggattctgagagaggaactgtctgtcctaactacccacgctgcaacggtcgcctagtaagacagtacaaggagtcagatctgtacaggcaactatcatacttttgttatgtacttgatgcaacccggtgtcttgaaaagctggaccagaaggcaaggctccccttcgagagagagtttgtagcagtaggccaaacaattaaattggcactgctagagatccagaaaatccgagacagatgtgcatttggatgggttcagctaaaggaccttgccgtatcaatatgatgtttttcttgtgtgaaagggctcaattagataagtttgaattaaccgtgcaagaaattcatctctctgtaggttattctagatctcgttggtaaaaggaacaggacacggcaaacggtgtatcgaaacaccagccgtctttggtatttccctgcgtgacagaccttgtatcatctatacatgtgttttagccagtggctgtattgtacaactttatgttgtgtccgtctccataggcctcggtgcatgtgccaatgtagtcttgttaatataattatacgcagcgtgtgatgagaaaaaaaaaacaagacactagattactaatgtcgcgagttgcggtagatgggaa

SEQ ID NO: 31313 - DNA, 5059 bp, Zea Mays
cctaattttgcgcgccaaatgctcgaacaccttcgcgccatagctacccgctggcattggcaatatccgaagcgaacagggctcccgcaccccaacacctaatttgtgcgcgcgcccgtgtcacaaagagagtgaagagagagcatggaaggctcacccgccgatgccgccggctccggccgccgcacgcgcacccggggcgcggaggcgtcggggcgtgccgccgtgctccaacaactccgcgccgttcgcagtggtcaaattcgtgcctccgacgccatccaggtgaaggttgacgccccgatttacgacaccgtcccggaggaggagtacaacgtgctcgtcgctcgccgccgcaaggaagcaggcgagttcatcatcgacgacgacgggctcggttacgtcgaggacggccgcgaggaggactggagccaccgcgctctcccttcctcctccgacgagggatctgaaggcgaggacggcgccccccgcaagcggaagcagacgcgccctccccaggcgaagcgccagccgcagcagtccgccaaggtggcctctctctccgccgctgccgcaaagacgggccagcagatctcctctatgttcacatcctcggtatttaagggacgcggcagcgaccgcgccaagaacttggcactggccgccgacagcatcgtggacgacgtcatcgccgagtttgcacctgacgagaacgaccgtgaggagaggcggcgacgggttgctagggtttgtgcgccgcagcctgtcccaacagtttcctacatcaagcctcaaaaggtaattctcgatgctgaaatggtcagatcggagaatgaaaatgatatggtggtggtggaattgaagaacgatactgagatggaaaccaatttggaagaaattcctggttctagtgctgaattggtggttaataagagtttggaggagccgaagcaggaggataatggggaagtaaagatagaaaaggcacaccgcctcaatgcaaagattaaggcggaggagtgcagaaataatgatgtgacgagtgcaacagaaggatggatgaagatatgtgggaatggggagaatgcagtaggtgaagaaggggtggctgttgatggtaacaccaatgtggatgaaagttcagagtttgagctgaaagatggagcactgcccttctacatactggatgcatacgaggaaccatttggtgctaattcaggcacagtgtatttgtttgggaaggttgaagttggcaagcaattccatagttgttgcgtcattgtaaaaaatattcaaagatgcatatatgctattccaaaccggtcagtgtttccaatggactccatatcagggatagaaagaaaccccactgctgaccttttgccatcacttcgagcaactctacatgagttggcatcaggattaaagagtgaaatagctgacaaattgtcagacctcaatgtgtcaaatttcataatgactccagtcaagaggaattatgcatttgagaggactgatctaccaaatggagagcagtatgtcctaaaaatcaattatccttacaaggatcctgctctaccagcagacctcaggggtgaacattttcatgcattgcttgggacaaacaatagtgctcttgaattgtttcttatcaaaaggaaggtcaagggaccttcatggctgtcggtttccaagtttgtgacacggccatccactcagcgggtcagctggtgtaaatttgaagttacagttgattgcccaaaggatatatctgttttgacaacaagtacaaatctagaagttcctactgttgtagttggagcagttaatctcaaaactatcataaatgagaaacacaatgtgcatgagattgtgtcggcatctctcatatgttgtcatcgggtgaagattgatagtccaatgcgtccagaagattggcagaaacggggaatgctcagccattttactgttgtgcgcaaacttgaaggtagcatatttcctataggtcttgctaaggaagcttctgataggaaccagaaggctggtagcaacgtgctagcactagaaagcagtgaacgtgcattattaaatcgcttgatgattgagctgagcaaacttgattgtgatgtacttgtgggacacaatatttcagggttcgacttggatgtgcttctacaccgtgctcagacatgcaaagtgccaagcagcatgtggtccaagattggtcgtctcaggcgatcattaatgcccaggcttaccaaaggaagcacactctatggttctggagcaagtccaggaattatgtcctgtgttgctggccgtcttctctgtgacacctatttatgctctcgtgaccttctgaaggaggtgagttattccttgacacaacttgcagaaacacagttaaaaaaggtcaggaaggaggtttctccacacgatatacctatgatgttccagtcttcaggcgaactgctcaaactggttgaatatggtgagacagatgcatggctttctttggagctcatgtttcatttgagtgttctcccactgacacgacaattaaccaacattagtggtaacctgtgggggaaaacactccagggtgctagggctcagagggtagaatatctactactgcattcattccatgcaagaaaatttattgcaccagataaatttgcacgcaacaaagagctgaactccacaaaaagaaaaatgaatcctgatactgggggtgcaaatgctgatgatggtgctgctgatccttccgttgatgatgaagtgcataatggtgatcaaagtaaagctagaaaaggaccttcatatgctggtggattagttttggagcctaagaagggtctatatgacaagtatgttctacttctcgacttcaacagcctttacccttcaataattcaggaattcaacatatgctttaccactgtcgagcgttcttctgatggcagtgtacctaatttgccagcatcaaaagttactggtgttttacctgagttgctgaggagtttggtggagaggagaaggatggttaaatcatggttgaagactgcttctggtcttaaaaagcagcagttcgatattcagcaacaagcattgaaacttactgcaaatagcatgtatggttgcttgggcttttccaactccaggttttatgcaaagccacttgctgagctgattacactccaaggtagagagatattgcaaaacactgtagatctggttcagaacaatttaaatttggaggttatctatggtgatacagattctatcatgatacatactggacttgatgacatctccagggcaaaagcaattgcaggaaaggttattcaggaggtgaacaaaaagtaccgttgtctggagattgatcttgatggcatatacaagagaatgttacttcttaaaaagaagaaatatgctgctattaaagtagcactggatggcagcttacgagagaacattgaacgcaaggggctcgatatggtcagacgtgattggagtttgctgtcaaaagacattggagatttttgtcttaaacaaattctgtctggagggacatgtgatgatgttgttgagtcaatacatagttcacttgtccaggtgcaagagcaaatgagaagtggtcaaatagaactcgaaaaatatgttatcacaaagagcttaacaaaagcaccagaagattatccagatgctaaaaatcagcctcatgttgctttgagactcaagcaaaatggttactctggttgctcagctggtgacacagtaccttatataatttgctctcagcaggactcagataatgcacattctgtgggaatagctcagagagctagacatcccgaggagttaaaaagagaccctgacaagtggatgattgacattgactattatttatcacaacagattcatcctgtcgtttctcgtctgtgtgcttccattcagggcactagtccagctcgtctggctgaatgtctgggccttgattcggctaagttccaaccaagattgactgagtcgagcaaccaagatacatctatgatgctgttatctgtaatcgatgacgaagatgagagatatcgtggttgtgaaccactgcgtttgtcatgcccaagctgttctggtaccttcgactgcccccctgtatctagtctgattactagtgctagtgctacaagtgtatcagatccaattgaaggaaaggatgctactgctaatttctggcgccatatgcggtgcccaagatgcctagataatactgttgagtccaaattttccccttctatgctcgccaaccagatgaaaagacaggctgataatttcattagtctatattataaaggtttgcagatgtgtgacgatgagggttgcaaatactcgactcacagcgtaaaccttagagttatgggggattctgagagaggaactgtctgtcctaactacccacgctgcaacggtcgcctagtaagacagtacaaggagtcagatctgtacaggcaactatcatacttttgttatgtacttgatgcaacccggtgtcttgaaaagctggaccagaaggcaaggctccccttcgagagagagtttgtagcagtaggccaaacaattaaattggcactgctagagatccagaaaatccgagacagatgtgcatttggatgggttcagctaaaggaccttgccgtatcaatatgatgtttttcttgtgtgaaagggctcaattagataagtttgaattaaccgtgcaagaaattcatctctctgtaggttattctagatctcgttggtaaaaggaacaggacacggcaaacggtgtatcgaaacaccagccgtctttggtatttccctgcgtgacagaccttgtatcatctatacatgtgttttagccagtggctgtattgtacaactttatgttgtgtccgtctccataggcctcggtgcatgtgccaatgtagtcttgttaatataattatacgcagcgtgtgatgagaaaaaaaaaacaagacactagattactaatgtcgcgagttgcggtagatgggaa

SEQ ID NO: 31314 - DNA, 5092 bp, Zea Mays
ctcgaacaccttcgcgccatagctacccgctggcattggcaatatccgaagcgaacagggctcccgcaccccaacacctaatttgtgcgcgcgcccgtgtcacaaagagagtgaagagagagcatggaaggctcacccgccgatgccgccggctccggccgccgcacgcgcacccggggcgcggaggcgtcggggcgtgccgccgtgctccaacaactccgcgccgttcgcagtggtcaaattcgtgcctccgacgccatccaggtgaaggttgacgccccgatttacgacaccgtcccggaggaggagtacaacgtgctcgtcgctcgccgccgcaaggaagcaggcgagttcatcatcgacgacgacgggctcggttacgtcgaggacggccgcgaggaggactggagccaccgcgctctcccttcctcctccgacgagggatctgaaggcgaggacggcgccccccgcaagcggaagcagacgcgccctccccaggcgaagcgccagccgcagcagtccgccaaggtggcctctctctccgccgctgccgcaaagacgggccagcagatctcctctatgttcacatcctcggtatttaagggacgcggcagcgaccgcgccaagaacttggcactggccgccgacagcatcgtggacgacgtcatcgccgagtttgcacctgacgagaacgaccgtgaggagaggcggcgacgggttgctagggtttgtgcgccgcagcctgtcccaacagtttcctacatcaagcctcaaaaggtaattctcgatgctgaaatggtcagatcggagaatgaaaatgatatggtggtggtggaattgaagaacgatactgagatggaaaccaatttggaagaaattcctggttctagtgctgaattggtggttaataagagtttggaggagccgaagcaggaggataatggggaagtaaagatagaaaaggcacaccgcctcaatgcaaagattaaggcggaggagtgcagaaataatgatgtgacgagtgcaacagaaggatggatgaagatatgtgggaatggggagaatgcagtaggtgaagaaggggtggctgttgatggtaacaccaatgtggatgaaagttcagagtttgagctgaaagatggagcactgcccttctacatactggatgcatacgaggaaccatttggtgctaattcaggcacagtgtatttgtttgggaaggttgaagttggcaagcaattccatagttgttgcgtcattgtaaaaaatattcaaagatgcatatatgctattccaaaccggtcagtgtttccaatggactccatatcagggatagaaagaaaccccactgctgaccttttgccatcacttcgagcaactctacatgagttggcatcaggattaaagagtgaaatagctgacaaattgtcagacctcaatgtgtcaaatttcataatgactccagtcaagaggaattatgcatttgagaggactgatctaccaaatggagagcagtatgtcctaaaaatcaattatccttacaaggatcctgctctaccagcagacctcaggggtgaacattttcatgcattgcttgggacaaacaatagtgctcttgaattgtttcttatcaaaaggaaggtcaagggaccttcatggctgtcggtttccaagtttgtgacacggccatccactcagcgggtcagctggtgtaaatttgaagttacagttgattgcccaaaggatatatctgttttgacaacaagtacaaatctagaagttcctactgttgtagttggagcagttaatctcaaaactatcataaatgagaaacacaatgtgcatgagattgtgtcggcatctctcatatgttgtcatcgggtgaagattgatagtccaatgcgtccagaagattggcagaaacggggaatgctcagccattttactgttgtgcgcaaacttgaaggtagcatatttcctataggtcttgctaaggaagcttctgataggaaccagaaggctggtagcaacgtgctagcactagaaagcagtgaacgtgcattattaaatcgcttgatgattgagctgagcaaacttgattgtgatgtacttgtgggacacaatatttcagggttcgacttggatgtgcttctacaccgtgctcagacatgcaaagtgccaagcagcatgtggtccaagattggtcgtctcaggcgatcattaatgcccaggcttaccaaaggaagcacactctatggttctggagcaagtccaggaattatgtcctgtgttgctggccgtcttctctgtgacacctatttatgctctcgtgaccttctgaaggaggtgagttattccttgacacaacttgcagaaacacagttaaaaaaggtcaggaaggaggtttctccacacgatatacctatgatgttccagtcttcaggcgaactgctcaaactggttgaatatggtgagacagatgcatggctttctttggagctcatgtttcatttgagtgttctcccactgacacgacaattaaccaacattagtggtaacctgtgggggaaaacactccagggtgctagggctcagagggtagaatatctactactgcattcattccatgcaagaaaatttattgcaccagataaatttgcacgcaacaaagagctgaactccacaaaaagaaaaatgaatcctgatactgggggtgcaaatgctgatgatggtgctgctgatccttccgttgatgatgaagtgcataatggtgatcaaagtaaagctagaaaaggaccttcatatgctggtggattagttttggagcctaagaagggtctatatgacaagtatgttctacttctcgacttcaacagcctttacccttcaataattcaggaattcaacatatgctttaccactgtcgagcgttcttctgatggcagtgtacctaatttgccagcatcaaaagttactggtgttttacctgagttgctgaggagtttggtggagaggagaaggatggttaaatcatggttgaagactgcttctggtcttaaaaagcagcagttcgatattcagcaacaagcattgaaacttactgcaaatagcatgtatggttgcttgggcttttccaactccaggttttatgcaaagccacttgctgagctgattacactccaaggtagagagatattgcaaaacactgtagatctggttcagaacaatttaaatttggaggttatctatggtgatacagattctatcatgatacatactggacttgatgacatctccagggcaaaagcaattgcaggaaaggttattcaggagatgtgcaaactgaagaaagatggtcttaccaagaatgcttcaattcaggtgaacaaaaagtaccgttgtctggagattgatcttgatggcatatacaagagaatgttacttcttaaaaagaagaaatatgctgctattaaagtagcactggatggcagcttacgagagaacattgaacgcaaggggctcgatatggtcagacgtgattggagtttgctgtcaaaagacattggagatttttgtcttaaacaaattctgtctggagggacatgtgatgatgttgttgagtcaatacatagttcacttgtccaggtgcaagagcaaatgagaagtggtcaaatagaactcgaaaaatatgttatcacaaagagcttaacaaaagcaccagaagattatccagatgctaaaaatcagcctcatgttcaggttgctttgagactcaagcaaaatggttactctggttgctcagctggtgacacagtaccttatataatttgctctcagcaggactcagataatgcacattctgtgggaatagctcagagagctagacatcccgaggagttaaaaagagaccctgacaagtggatgattgacattgactattatttatcacaacagattcatcctgtcgtttctcgtctgtgtgcttccattcagggcactagtccagctcgtctggctgaatgtctgggccttgattcggctaagttccaaccaagattgactgagtcgagcaaccaagatacatctatgatgctgttatctgtaatcgatgacgaagatgagagatatcgtggttgtgaaccactgcgtttgtcatgcccaagctgttctggtaccttcgactgcccccctgtatctagtctgattactagtgctagtgctacaagtgtatcagatccaattgaaggaaaggatgctactgctaatttctggcgccatatgcggtgcccaagatgcctagataatactgttgagtccaaattttccccttctatgctcgccaaccagatgaaaagacaggctgataatttcattagtctatattataaaggtttgcagatgtgtgacgatgagggttgcaaatactcgactcacagcgtaaaccttagagttatgggggattctgagagaggaactgtctgtcctaactacccacgctgcaacggtcgcctagtaagacagtacaaggagtcagatctgtacaggcaactatcatacttttgttatgtacttgatgcaacccggtgtcttgaaaagctggaccagaaggcaaggctccccttcgagagagagtttgtagcagtaggccaaacaattaaattggcactgctagagatccagaaaatccgagacagatgtgcatttggatgggttcagctaaaggaccttgccgtatcaatatgatgtttttcttgtgtgaaagggctcaattagataagtttgaattaaccgtgcaagaaattcatctctctgtaggttattctagatctcgttggtaaaaggaacaggacacggcaaacggtgtatcgaaacaccagccgtctttggtatttccctgcgtgacagaccttgtatcatctatacatgtgttttagccagtggctgtattgtacaactttatgttgtgtccgtctccataggcctcggtgcatgtgccaatgtagtcttgttaatataattatacgcagcgtgtgatgagaaaaaaaaaacaagacactagattactaatgtcgcgagttgcggtagatgggaa

SEQ ID NO: 31315 - DNA, 4940 bp, Zea Mays
gaagcgaacagggctcccgcaccccaacacctaatttgtgcgcgcgcccgtgtcacaaagagagtgaagagagagcatggaaggctcacccgccgatgccgccggctccggccgccgcacgcgcacccggggcgcggaggcgtcggggcgtgccgccgtgctccaacaactccgcgccgttcgcagtggtcaaattcgtgcctccgacgccatccaggtgaaggttgacgccccgatttacgacaccgtcccggaggaggagtacaacgtgctcgtcgctcgccgccgcaaggaagcaggcgagttcatcatcgacgacgacgggctcggttacgtcgaggacggccgcgaggaggactggagccaccgcgctctcccttcctcctccgacgagggatctgaaggcgaggacggcgccccccgcaagcggaagcagacgcgccctccccaggcgaagcgccagccgcagcagtccgccaaggtggcctctctctccgccgctgccgcaaagacgggccagcagatctcctctatgttcacatcctcggtatttaagggacgcggcagcgaccgcgccaagaacttggcactggccgccgacagcatcgtggacgacgtcatcgccgagtttgcacctgacgagaacgaccgtgaggagaggcggcgacgggttgctagggtttgtgcgccgcagcctgtcccaacagtttcctacatcaagcctcaaaaggtaattctcgatgctgaaatggtcagatcggagaatgaaaatgatatggtggtggtggaattgaagaacgatactgagatggaaaccaatttggaagaaattcctggttctagtgctgaattggtggttaataagagtttggaggagccgaagcaggaggataatggggaagtaaagatagaaaaggcacaccgcctcaatgcaaagattaaggcggaggagtgcagaaataatgatgtgacgagtgcaacagaaggatggatgaagatatgtgggaatggggagaatgcagtaggtgaagaaggggtggctgttgatggtaacaccaatgtggatgaaagttcagagtttgagctgaaagatggagcactgcccttctacatactggatgcatacgaggaaccatttggtgctaattcaggcacagtgtatttgtttgggaaggttgaagttggcaagcaattccatagttgttgcgtcattgtaaaaaatattcaaagatgcatatatgctattccaaaccggtcagtgtttccaatggactccatatcagggatagaaagaaaccccactgctgaccttttgccatcacttcgagcaactctacatgagttggcatcaggattaaagagtgaaatagctgacaaattgtcagacctcaatgtgtcaaatttcataatgactccagtcaagaggaattatgcatttgagaggactgatctaccaaatggagagcagtatgtcctaaaaatcaattatccttacaaggatcctgctctaccagcagacctcaggggtgaacattttcatgcattgcttgggacaaacaatagtgctcttgaattgtttcttatcaaaaggaaggtcaagggaccttcatggctgtcggtttccaagtttgtgacacggccatccactcagcgggtcagctggtgtaaatttgaagttacagttgattgcccaaaggatatatctgttttgacaacaagtacaaatctagaagttcctactgttgtagttggagcagttaatctcaaaactatcataaatgagaaacacaatgtgcatgagattgtgtcggcatctctcatatgttgtcatcgggtgaagattgatagtccaatgcgtccagaagattggcagaaacggggaatgctcagccattttactgttgtgcgcaaacttgaaggtagcatatttcctataggtcttgctaaggaagcttctgataggaaccagaaggctggtagcaacgtgctagcactagaaagcagtgaacgtgcattattaaatcgcttgatgattgagctgagcaaacttgattgtgatgtacttgtgggacacaatatttcagggttcgacttggatgtgcttctacaccgtgctcagacatgcaaagtgccaagcagcatgtggtccaagattggtcgtctcaggcgatcattaatgcccaggcttaccaaaggaagcacactctatggttctggagcaagtccaggaattatgtcctgtgttgctggccgtcttctctgtgacacctatttatgctctcgtgaccttctgaaggaggtgagttattccttgacacaacttgcagaaacacagttaaaaaaggtcaggaaggaggtttctccacacgatatacctatgatgttccagtcttcaggcgaactgctcaaactggttgaatatggtgagacagatgcatggctttctttggagctcatgtttcatttgagtgttctcccactgacacgacaattaaccaacattagtggtaacctgtgggggaaaacactccagggtgctagggctcagagggtagaatatctactactgcattcattccatgcaagaaaatttattgcaccagataaatttgcacgcaacaaagagctgaactccacaaaaagaaaaatgaatcctgatactgggggtgcaaatgctgatgatggtgctgctgatccttccgttgatgatgaagtgcataatggtgatcaaagtaaagctagaaaaggaccttcatatgctggtggattagttttggagcctaagaagggtctatatgacaagtatgttctacttctcgacttcaacagcctttacccttcaataattcaggaattcaacatatgctttaccactgtcgagcgttcttctgatggcagtgtacctaatttgccagcatcaaaagttactggtgttttacctgagttgctgaggagtttggtggagaggagaaggatggttaaatcatggttgaagactgcttctggtcttaaaaagcagcagttcgatattcagcaacaagcattgaaacttactgcaaatagcatgtatggttgcttgggcttttccaactccaggttttatgcaaagccacttgctgagctgattacactccaagttatctatggtgatacagattctatcatgatacatactggacttgatgacatctccagggcaaaagcaattgcaggaaaggttattcaggaggtgaacaaaaagtaccgttgtctggagattgatcttgatggcatatacaagagaatgttacttcttaaaaagaagaaatatgctgctattaaagtagcactggatggcagcttacgagagaacattgaacgcaaggggctcgatatggtcagacgtgattggagtttgctgtcaaaagacattggagatttttgtcttaaacaaattctgtctggagggacatgtgatgatgttgttgagtcaatacatagttcacttgtccaggtgcaagagcaaatgagaagtggtcaaatagaactcgaaaaatatgttatcacaaagagcttaacaaaagcaccagaagattatccagatgctaaaaatcagcctcatgttcaggttgctttgagactcaagcaaaatggttactctggttgctcagctggtgacacagtaccttatataatttgctctcagcaggactcagataatgcacattctgtgggaatagctcagagagctagacatcccgaggagttaaaaagagaccctgacaagtggatgattgacattgactattatttatcacaacagattcatcctgtcgtttctcgtctgtgtgcttccattcagggcactagtccagctcgtctggctgaatgtctgggccttgattcggctaagttccaaccaagattgactgagtcgagcaaccaagatacatctatgatgctgttatctgtaatcgatgacgaagatgagagatatcgtggttgtgaaccactgcgtttgtcatgcccaagctgttctggtaccttcgactgcccccctgtatctagtctgattactagtgctagtgctacaagtgtatcagatccaattgaaggaaaggatgctactgctaatttctggcgccatatgcggtgcccaagatgcctagataatactgttgagtccaaattttccccttctatgctcgccaaccagatgaaaagacaggctgataatttcattagtctatattataaaggtttgcagatgtgtgacgatgagggttgcaaatactcgactcacagcgtaaaccttagagttatgggggattctgagagaggaactgtctgtcctaactacccacgctgcaacggtcgcctagtaagacagtacaaggagtcagatctgtacaggcaactatcatacttttgttatgtacttgatgcaacccggtgtcttgaaaagctggaccagaaggcaaggctccccttcgagagagagtttgtagcagtaggccaaacaattaaattggcactgctagagatccagaaaatccgagacagatgtgcatttggatgggttcagctaaaggaccttgccgtatcaatatgatgtttttcttgtgtgaaagggctcaattagataagtttgaattaaccgtgcaagaaattcatctctctgtaggttattctagatctcgttggtaaaaggaacaggacacggcaaacggtgtatcgaaacaccagccgtctttggtatttccctgcgtgacagaccttgtatcatctatacatgtgttttagccagtggctgtattgtacaactttatgttgtgtccgtctccataggcctcggtgcatgtgccaatgtagtcttgttaatataattatacgcagcgtgtgatgagaaaaaaaaaacaagacactagattactaatgtcgcgagttgcggtagatgggaa

SEQ ID NO: 31316 - DNA, 4918 bp, Zea Mays
cgcgcgcccgtgtcacaaagagagtgaagagagagcatggaaggctcacccgccgatgccgccggctccggccgccgcacgcgcacccggggcgcggaggcgtcggggcgtgccgccgtgctccaacaactccgcgccgttcgcagtggtcaaattcgtgcctccgacgccatccaggtgaaggttgacgccccgatttacgacaccgtcccggaggaggagtacaacgtgctcgtcgctcgccgccgcaaggaagcaggcgagttcatcatcgacgacgacgggctcggttacgtcgaggacggccgcgaggaggactggagccaccgcgctctcccttcctcctccgacgagggatctgaaggcgaggacggcgccccccgcaagcggaagcagacgcgccctccccaggcgaagcgccagccgcagcagtccgccaaggtggcctctctctccgccgctgccgcaaagacgggccagcagatctcctctatgttcacatcctcggtatttaagggacgcggcagcgaccgcgccaagaacttggcactggccgccgacagcatcgtggacgacgtcatcgccgagtttgcacctgacgagaacgaccgtgaggagaggcggcgacgggttgctagggtttgtgcgccgcagcctgtcccaacagtttcctacatcaagcctcaaaaggtaattctcgatgctgaaatggtcagatcggagaatgaaaatgatatggtggtggtggaattgaagaacgatactgagatggaaaccaatttggaagaaattcctggttctagtgctgaattggtggttaataagagtttggaggagccgaagcaggaggataatggggaagtaaagatagaaaaggcacaccgcctcaatgcaaagattaaggcggaggagtgcagaaataatgatgtgacgagtgcaacagaaggatggatgaagatatgtgggaatggggagaatgcagtaggtgaagaaggggtggctgttgatggtaacaccaatgtggatgaaagttcagagtttgagctgaaagatggagcactgcccttctacatactggatgcatacgaggaaccatttggtgctaattcaggcacagtgtatttgtttgggaaggttgaagttggcaagcaattccatagttgttgcgtcattgtaaaaaatattcaaagatgcatatatgctattccaaaccggtcagtgtttccaatggactccatatcagggatagaaagaaaccccactgctgaccttttgccatcacttcgagcaactctacatgagttggcatcaggattaaagagtgaaatagctgacaaattgtcagacctcaatgtgtcaaatttcataatgactccagtcaagaggaattatgcatttgagaggactgatctaccaaatggagagcagtatgtcctaaaaatcaattatccttacaaggatcctgctctaccagcagacctcaggggtgaacattttcatgcattgcttgggacaaacaatagtgctcttgaattgtttcttatcaaaaggaaggtcaagggaccttcatggctgtcggtttccaagtttgtgacacggccatccactcagcgggtcagctggtgtaaatttgaagttacagttgattgcccaaaggatatatctgttttgacaacaagtacaaatctagaagttcctactgttgtagttggagcagttaatctcaaaactatcataaatgagaaacacaatgtgcatgagattgtgtcggcatctctcatatgttgtcatcgggtgaagattgatagtccaatgcgtccagaagattggcagaaacggggaatgctcagccattttactgttgtgcgcaaacttgaaggtagcatatttcctataggtcttgctaaggaagcttctgataggaaccagaaggctggtagcaacgtgctagcactagaaagcagtgaacgtgcattattaaatcgcttgatgattgagctgagcaaacttgattgtgatgtacttgtgggacacaatatttcagggttcgacttggatgtgcttctacaccgtgctcagacatgcaaagtgccaagcagcatgtggtccaagattggtcgtctcaggcgatcattaatgcccaggcttaccaaaggaagcacactctatggttctggagcaagtccaggaattatgtcctgtgttgctggccgtcttctctgtgacacctatttatgctctcgtgaccttctgaaggaggtgagttattccttgacacaacttgcagaaacacagttaaaaaaggtcaggaaggaggtttctccacacgatatacctatgatgttccagtcttcaggcgaactgctcaaactggttgaatatggtgagacagatgcatggctttctttggagctcatgtttcatttgagtgttctcccactgacacgacaattaaccaacattagtggtaacctgtgggggaaaacactccagggtgctagggctcagagggtagaatatctactactgcattcattccatgcaagaaaatttattgcaccagataaatttgcacgcaacaaagagctgaactccacaaaaagaaaaatgaatcctgatactgggggtgcaaatgctgatgatggtgctgctgatccttccgttgatgatgaagtgcataatggtgatcaaagtaaagctagaaaaggaccttcatatgctggtggattagttttggagcctaagaagggtctatatgacaagtatgttctacttctcgacttcaacagcctttacccttcaataattcaggaattcaacatatgctttaccactgtcgagcgttcttctgatggcagtgtacctaatttgccagcatcaaaagttactggtgttttacctgagttgctgaggagtttggtggagaggagaaggatggttaaatcatggttgaagactgcttctggtcttaaaaagcagcagttcgatattcagcaacaagcattgaaacttactgcaaataggttttatgcaaagccacttgctgagctgattacactccaaggtagagagatattgcaaaacactgtagatctggttcagaacaatttaaatttggaggttatctatggtgatacagattctatcatgatacatactggacttgatgacatctccagggcaaaagcaattgcaggaaaggttattcaggaggtgaacaaaaagtaccgttgtctggagattgatcttgatggcatatacaagagaatgttacttcttaaaaagaagaaatatgctgctattaaagtagcactggatggcagcttacgagagaacattgaacgcaaggggctcgatatggtcagacgtgattggagtttgctgtcaaaagacattggagatttttgtcttaaacaaattctgtctggagggacatgtgatgatgttgttgagtcaatacatagttcacttgtccaggtgcaagagcaaatgagaagtggtcaaatagaactcgaaaaatatgttatcacaaagagcttaacaaaagcaccagaagattatccagatgctaaaaatcagcctcatgttgctttgagactcaagcaaaatggttactctggttgctcagctggtgacacagtaccttatataatttgctctcagcaggactcagataatgcacattctgtgggaatagctcagagagctagacatcccgaggagttaaaaagagaccctgacaagtggatgattgacattgactattatttatcacaacagattcatcctgtcgtttctcgtctgtgtgcttccattcagggcactagtccagctcgtctggctgaatgtctgggccttgattcggctaagttccaaccaagattgactgagtcgagcaaccaagatacatctatgatgctgttatctgtaatcgatgacgaagatgagagatatcgtggttgtgaaccactgcgtttgtcatgcccaagctgttctggtaccttcgactgcccccctgtatctagtctgattactagtgctagtgctacaagtgtatcagatccaattgaaggaaaggatgctactgctaatttctggcgccatatgcggtgcccaagatgcctagataatactgttgagtccaaattttccccttctatgctcgccaaccagatgaaaagacaggctgataatttcattagtctatattataaaggtttgcagatgtgtgacgatgagggttgcaaatactcgactcacagcgtaaaccttagagttatgggggattctgagagaggaactgtctgtcctaactacccacgctgcaacggtcgcctagtaagacagtacaaggagtcagatctgtacaggcaactatcatacttttgttatgtacttgatgcaacccggtgtcttgaaaagctggaccagaaggcaaggctccccttcgagagagagtttgtagcagtaggccaaacaattaaattggcactgctagagatccagaaaatccgagacagatgtgcatttggatgggttcagctaaaggaccttgccgtatcaatatgatgtttttcttgtgtgaaagggctcaattagataagtttgaattaaccgtgcaagaaattcatctctctgtaggttattctagatctcgttggtaaaaggaacaggacacggcaaacggtgtatcgaaacaccagccgtctttggtatttccctgcgtgacagaccttgtatcatctatacatgtgttttagccagtggctgtattgtacaactttatgttgtgtccgtctccataggcctcggtgcatgtgccaatgtagtcttgttaatataattatacgcagcgtgtgatgagaaaaaaaaaacaagacactagattactaatgtcgcgagttgcggtagatgggaa

SEQ ID NO: 31317 - DNA, 1052 bp, Zea Mays
gacagggttgaccaaatttgagttttcgtgagggcgtggacggagtgagtaaacatgtccccacgctgtcatgctcccaaattacggcgcctactctgttttctgattcactgaaccgagcgagttctcgtcgcatcgtatgcgcctccttctctgattccccaaaaatattccctgttttgctgttcttttcttcctcgtaatccgctcggcttccattgttgccgccgctaccgacggcgacggcagacatcaagtgtcagtcctccttccgccgaagtcttcttttggttggactccgactctccgacaggagttgcgctcctcctccccctctactctactggattacactagcgtggagatccatctctatttgtttttggtctcttctttgcttgtaagtaaccctagctcgttcggacggatccccccataaaattcttatgttcccgccacagttttttcctgcagcaactataataagcaatcaaatccgtgtcgttttctccctatggccgtatccatactgtttgttgcgaatttttatactgcgtggacctttcactaaactggtttatcttggttcttgccgtttatccagggggcaaggtcaatcacagttgataagataccacttgtactctaatctgtcagtctccacgtgcggctgcatatatactgtttcaaaatttcggagtaaggtctgaagtctgaaccctcatgctgcttcagagggattgaggctggttgttggtcgcacttgcacatggcgcagccacagcagcgggtgtaccaagcttggaagggggataacgtctaaacagaatgctagccaacaagtttgtaactttgccaatagtggaattgagctaaacctccataggccagcttcttggccatgtcagtttccttttcttctttaattatctcagcagtcataaagccagtgtttgtctcatttactgagatttgtatgatgataattgtacgagatcgttattgggatgtgctacatgatcagcctggcttgtttttgagatatgatgtgc

SEQ ID NO: 31318 - DNA, 725 bp, Zea Mays
ccaaatttgagttttcgtgagggcgtggacggagtgagtaaacatgtccccacgctgtcatgctcccaaattacggcgcctactctgttttctgattcactgaaccgagcgagttctcgtcgcatcacatcaagtgtcagtcctccttccgccgaagtcttcttttggttggactccgactctccgacaggagttgcgctcctcctccccctctactctactggattacactagcgtggagatccatctctatttgtttttggtctcttctttgcttggggcaaggtcaatcacagttgataagataccacttgtactctaatctgtcagtctccacgtgcggctgcatatatactgtttcaaaatttcggagtaaggtctgaagtctgaaccctcatgctgcttcagagggattgaggctggttgttggtcgcacttgcacatggcgcagccacagcagcgggtgtaccaagcttggaagggggataacgtctaaacagaatgctagccaacaagtttgtaactttgccaatagtggaattgagctaaacctccataggccagcttcttggccatgtcagtttccttttcttctttaattatctcagcagtcataaagccagtgtttgtctcatttactgagatttgtatgatgataattgtacgagatcgttattgggatgtgctacatgatcagcctggcttgtttttgagatatgatgtgc

SEQ ID NO: 31319 - DNA, 2525 bp, Zea Mays
cacgctgtcatgctcccaaattacggcgcctactctgttttctgattcactgaaccgagcgagttctcgtcgcatcgtatgcgcctccttctctgattccccaaaaatattccctgttttgctgttcttttcttcctcgtaatccgctcggcttccattgttgccgccgctaccgacggcgacggcagacatcaagtgtcagtcctccttccgccgaagtcttcttttggttggactccgactctccgacaggagttgcgctcctcctccccctctactctactggattacactagcgtggagatccatctctatttgtttttggtctcttctttgcttgtaagtaaccctagctcgttcggacggatccccccataaaattcttatgttcccgccacagttttttcctgcagcaactataataagcaatcaaatccgtgtcgttttctccctatggccgtatccatactgtttgttgcgaatttttatactgcgtggacctttcactaaactggtttatcttggttcttgccgtttatccagggggcaaggtcaatcacagttgataagataccacttgtactctaatctgtcagtctccacgtgcggctgcatatatactgtttcaaaatttcggagtaaggtctgaagtctgaaccctcatgctgcttcagagggattgaggctggttgttggtcgcacttgcacatggcgcagccacagcagcgggtgtaccaagcttggaagggggataacaggttcttctttggtgggcggttgatatttggaccaaatgttaaatctctaggtgtttctgttgccctcattgttatcccagttgctgttttttgtgtgtttgtcgcacaccatctccgtcatcagtttcatgcatatgatgcaggatatgcaattcttgtcatagcaatagtgctcacaattagggtgcttctattactcttaaccactgccgctcgggatccgggaattgtacctcgtgcttcacatccacctgaggatattcactatgataatttgtctcttactgacacacctggaatactacagttcccctgtgtaaaagaagttatagtaaatgggatgcctgtgaaagtaaaatattgtgaaacttgtatggtttttcgcccacctcggtgttcacactgttccatttgcaacaattgtgtggaacgctttgatcaccactgtccatgggtaggacagtgcattggaaagcgcaattgccgttattttttcctatttgttgtctcttcaagtctcctctgcatttatttgtttgttatatcggccttgtacatcaagtttctcatggatggagactatcctacagtttggaaggcattgaaacattcccctgcttctctagcactaatgatatactgttttatctctctctggtttgttggtgggctcacaggatttcatacatatctcatcagcactaatcagaccacatacgaaaattttcggtacaggtcggatggcaggcttaatgtctatgatcaagggtgtctgagtaactttcaagaagtagtgtgtgccaagatagagccttctaaacataagttccgggcgcacatacaagaggaagtgcgaggtccactagctaaccgtgctggagagactgaagaagaacaagttggtggtcctcgagcgtaagcgggggatggcctcgatattgatggtgatctgatgaagatttcacataggcataaccatgaggacatcgatattgaaataggatgtggggatgctaatgaggtggaatgctcagtttcagattccaaagttaaagacaatatggatgcacatatgtgatatgtagagttagaaataaggtaaatggagaacagtcgagttgggttccagcggtttaatgaatgtgtttgtttagttcataagtaggcaaaatgccgtctcctccggtggtttcagcattattctttttgtaaatggctagtgcaggatacttaggatgctaccctgcaggttctcttgtgcattccgaccagcgtgtgtgttgaattcttaccctcggatccttcagaagacgtttgtgtatagtgtcttggttgagaaatcccaagatggtgtatgaattcagattggtagttctaaacttgttgtctttcagttccacacaggcagaagtcattgcttttcagctcaggctgtctactttagcatcagtttgctctgtccagaaagaaaataaaaaaaaagaactgcagcaagattggcatggtgctatgaccaccagagtcacatctgtctttgaacgctaatctggttggttcatgccaaacattcctttgttgccttgtggatttaaaagacttggacgcttggctgggctttggtcggcgctggcagtatcatgccgaactctgaagacaccaaaactgtcagctcctcctcttgtcaattcaacaaaatgtctgcttcaaaatggttctgcgatgccgaagaaaagtccgggagttgataaaataataccatgggacgtg

SEQ ID NO: 31320 - DNA, 1603 bp, Zea Mays
catccctactcacaatctatgtgcttctattactcttaaccactgccgctcgggatccgggaattgtacctcgtgcttcacatccacctgaggatattcactatgataatttgtctcttactgacacacctggaatactacagttcccctgtgtaaaagaagttatagtaaatgggatgcctgtgaaagtaaaatattgtgaaacttgtatggtttttcgcccacctcggtgttcacactgttccatttgcaacaattgtgtggaacgctttgatcaccactgtccatgggtaggacagtgcattggaaagcgcaattgccgttattttttcctatttgttgtctcttcaagtctcctctgcatttatttgtttgttatatcggccttgtacatcaagtttctcatggatggagactatcctacagtttggaaggcattgaaacattcccctgcttctctagcactaatgatatactgttttatctctctctggtttgttggtgggctcacaggatttcatacatatctcatcagcactaatcagaccacatacgaaaattttcggtacaggtcggatggcaggcttaatgtctatgatcaagggtgtctgagtaactttcaagaagtagtgtgtgccaagatagagccttctaaacataagttccgggcgcacatacaagaggaagtgcgaggtccactagctaaccgtgctggagagactgaagaagaacaagttggtggtcctcgagcgtaagcgggggatggcctcgatattgatggtgatctgatgaagatttcacataggcataaccatgaggacatcgatattgaaataggatgtggggatgctaatgaggtggaatgctcagtttcagattccaaagttaaagacaatatggatgcacatatgtgatatgtagagttagaaataaggtaaatggagaacagtcgagttgggttccagcggtttaatgaatgtgtttgtttagttcataagtaggcaaaatgccgtctcctccggtggtttcagcattattctttttgtaaatggctagtgcaggatacttaggatgctaccctgcaggttctcttgtgcattccgaccagcgtgtgtgttgaattcttaccctcggatccttcagaagacgtttgtgtatagtgtcttggttgagaaatcccaagatggtgtatgaattcagattggtagttctaaacttgttgtctttcagttccacacaggcagaagtcattgcttttcagctcaggctgtctactttagcatcagtttgctctgtccagaaagaaaataaaaaaaaagaactgcagcaagattggcatggtgctatgaccaccagagtcacatctgtctttgaacgctaatctggttggttcatgccaaacattcctttgttgccttgtggatttaaaagacttggacgcttggctgggctttggtcggcgctggcagtatcatgccgaactctgaagacaccaaaactgtcagctcctcctcttgtcaattcaacaaaatgtctgcttcaaaatggttctgcgatgccgaagaaaagtccgggagttgataaaataataccatgggacgtg

SEQ ID NO: 31321 - DNA, 1618 bp, Zea Mays
aatagcttatattcttggagttggccaaaactatggtattggtattgacaattacaaagtatagtaaaaccatggttttgagagaaacattgttactaaacaagccctgagagaagttcctcgcatccatgtgatgatctcttatgataaggttttatttcgctaatcttctcattttgaacaacttatgcatctgatattgaggaaatgtgattcccatgaacatttcttggaattattttcttcattctaaattgattaagtcattccgtatatttatctctttacttgctgatttctacttatcctacttgtccattgtgcagcgcaattgccgttattttttcctatttgttgtctcttcaagtctcctctgcatttatttgtttgttatatcggccttgtacatcaagtttctcatggatggagactatcctacagtttggaaggcattgaaacattcccctgcttctctagcactaatgatatactgttttatctctctctggtttgttggtgggctcacaggatttcatacatatctcatcagcactaatcagaccacatacgaaaattttcggtacaggtcggatggcaggcttaatgtctatgatcaagggtgtctgagtaactttcaagaagtagtgtgtgccaagatagagccttctaaacataagttccgggcgcacatacaagaggaagtgcgaggtccactagctaaccgtgctggagagactgaagaagaacaagttggtggtcctcgagcgtaagcgggggatggcctcgatattgatggtgatctgatgaagatttcacataggcataaccatgaggacatcgatattgaaataggatgtggggatgctaatgaggtggaatgctcagtttcagattccaaagttaaagacaatatggatgcacatatgtgatatgtagagttagaaataaggtaaatggagaacagtcgagttgggttccagcggtttaatgaatgtgtttgtttagttcataagtaggcaaaatgccgtctcctccggtggtttcagcattattctttttgtaaatggctagtgcaggatacttaggatgctaccctgcaggttctcttgtgcattccgaccagcgtgtgtgttgaattcttaccctcggatccttcagaagacgtttgtgtatagtgtcttggttgagaaatcccaagatggtgtatgaattcagattggtagttctaaacttgttgtctttcagttccacacaggcagaagtcattgcttttcagctcaggctgtctactttagcatcagtttgctctgtccagaaagaaaataaaaaaaaagaactgcagcaagattggcatggtgctatgaccaccagagtcacatctgtctttgaacgctaatctggttggttcatgccaaacattcctttgttgccttgtggatttaaaagacttggacgcttggctgggctttggtcggcgctggcagtatcatgccgaactctgaagacaccaaaactgtcagctcctcctcttgtcaattcaacaaaatgtctgcttcaaaatggttctgcgatgccgaagaaaagtccgggagttgataaaataataccatgggacgtg

SEQ ID NO: 31322 - DNA, 1425 bp, Zea Mays
cttggtcactccgtcactgccagggttaacgtcgtcgtctctttctcggcggccgtccgtctggccccgtctgtcccttgcggccttgcgtactcggccaccaaccgcttttgcttgctgctactcgccgccagccaaaagcagccgccccccagcccgaagcgacgccacacccgcatctgcttcattccacccgccccgcgaggagcttctagaagagggagaccccggaggagccatggcggaggaaaaggagtcgacgtcgatcccgctcagccaggcggcagaggctgtcgaccccgaggacccggccaagtcgccgccgcggcccagctcgcccaccacctccacacgcaaggcatgctgtgctgttcttcaaagttgggtctcaagaaagtttatgactggatgtgtagtcctttttcctgttgcagtcacgttcttcatcacatggtggtttattcaatttgttgatgggtttttcagtcccctatatgcaaaaattggaatcgacatatttggtcttggttttttgacttctatggtattcatatttctggttggaatatttgtttcttcatgggttggttcaaccatcttctgggtgggcgagtggtttataaagaaaatgccatttgtaagacatatatattcagcatcaaagcaagtcagcactgcaatttcaccagatcaaaatacgactgctttcaaagaagttgcaataattcgtcatccacgaattggtgaatatgcatttggattcataacatcaactgtggtccttcagactgacaaaggcgatgaagaactgtgtagtgtgtatgtgccaacaaatcatctatacatcggtgacatatttctggtgaactctgaggagatcataagacctaatttatccattcgagaaggaattgaaataattgtgtcaggaggaatgaccatgcctcaggtgattgcatcactggagcccatgccacggaaaagccagaacattcgtctaaatagaatgacgtgatgtaaaacatgtcacatatgcaacaaggtcgtgcatcaagcagatagcatgacctgtggggcacgattagggtgccttggctatatgcgtagccatgtgatttggatagaggagcaactttgtgctgagccattgtggcatttccatactgcagggaagcatcgtgttgatgccctgggatacaaaccagccctcaaacttgtgctactctttgtgcacttactagtactggttcaaaatgttagcgtctacgcgtgaggtgtataattgattaaattcgtttgtaactacgtgctgtataacatcttacgttacaaagagatcacacaacgctctgaccagatttcttctttcagatttacagacttgtttcttgattttattctatcgtgtaacgtggctaaagagat

SEQ ID NO: 31323 - DNA, 814 bp, Zea Mays
tcatgtgggagccaccagcattggactgacaaaggcgatgaagaactgtgtagtgtgtatgtgccaacaaatcatctatacatcggtgacatatttctggtgaactctgaggagatcataagacctaatttatccattcgagaaggaattgaaataattgtgtcaggaggaatgaccatgcctcaggtgattgcatcactggagcccatgccacggaaaagccagaacattcgtctaaatagaatgacgtgatgtaaaacatgtcacatatgcaacaagatagcatgacctgtggggcacgattagggtgccttggctatatgcgtagccatgtgatttggatagaggagcaactttgtgctgagccattgtggcatttccatactgcagggaagcatcgtgttgatgccctgggataatttattgtcttaggctagtttggcaaccccatttttacaggggattcctattttttcaagaaaatatagtttattttcccttaaaaaatagaaatctctttaaaaaatggagttgccaaactaatcagtaaattgaaggggatcatgggcttcaattcactggtcaccaaaccagccctcaaacttgtgctactctttgtgcacttactagtactggttcaaaatgttagcgtctacgcgtgaggtgtataattgattaaattcgtttgtaactacgtgctgtataacatcttacgttacaaagagatcacacaacgctctgaccagatttcttctttcagatttacagacttgtttcttgattttattctatcgtgtaacgtggctaaagagat

SEQ ID NO: 31324 - DNA, 1336 bp, Zea Mays
cagcgctttccgtcccgtactcccgtgtaccctgtcccgtcctcctagctcgcattccgatttccgagttccagccagcgagcgagccaaccaactgaaccaaccaaccaccgctccttcttccttccttccttccccagttcccctcgtctcaccagtcaccaaggttccgagagcagagcgagataaaaaaaaaggtaatccgacggaaacgacaagggcgcggcgagggcggggacagggtcgggaaggccctgggcgcgggggcgccaagcgcatggcatcgtcgagggtgatgccgtcctcctcgccgtcgcacacggcctctgatctcgcgcgcctagcgcaggccgccagcaggcccggcggcgggggcagcgggctgggctccatgaacgtggaggagctcctccgcggcatctacagcgacatgcccaccccggcgccgcccgcgtcggagcccgaacgcccgaggtcgccggccccggcgccggaggtcgccacgcggaggacggcggaggaggtgtggaaggagatcaccggcggaggtggcagtggggaacccgtgccccccgtggcggctcaggctgccgtccccgctggtggtggtggcgccggcggcccggagatgacgctggaggacttcctggccagggaggagggcgcggtgaaggaggatggggttagggtttcgggcccctctgcgccggccatggggttcctgggcggagcggagggcgtgggtgtgcctggcggcggaggcgggaggggaaggaagcggcagctcatggatccagtggatcgcgccgcgatgcagcgacagaaacgaatgatcaaaaaccgcgagtctgctgcccggtcacgggagaggaagcaggcttatatcgccgagctagaatcgctggtaacgcacctcgaggaggagaatgccgagttgttgagagaacaggaagagcggcaccagaagcggcttaaagagctcttggaacgggtgacgccagtcattctgaggaaaaaaccatcaggagatcttagaagaacgaactcaatgcagtggtagattggagccaagctcagtcgccgtctctttacagtttggcaaggaagtagacaatcgtactccaataagcaggcctactttaagtgaaactgaaacgtcataatgctacgcagcgtctcggggcgcctacctgtggcttacctgcgtaaactgaaacatcgtaatgccagggagcttccagaggcgtgtaccttgttggtgcttgaatgatcaaaatattcaagataaagcgtgaacttgacgtgatatgatgactgctgagaccccattaataaa

SEQ ID NO: 31325 - DNA, 1593 bp, Zea Mays
ctcgcattggcaaaacccccagaaacatgaaacatggctaaattgtcctactgtacacttgtctatatacgcatgcctgtagtactcacctgatccagcaactgcaacctttctctatgtatagtgtttgttcaaagttttttctttgtcaataattttgttgatttcaaggtggggatggttatagccgactgtcgacacgtcacacatataagtctgtctgatttttctggttagaccgagaccactcaagcactctggttgcccgcaatgacttgaaatagttttcccggtagtgtcagatcaccaacccttacctataaaatcaaaccaaaccacagcaccttccctcttttgtcttctacatgtagtactcaccagccaccaatggagtgattttagttttctaccaactgaagttacaaataattaactattagttctagtgtattcaaacaccacctaagtactacttgattccagtcaatcgtgcatagagctattcgaagtgacaaggttcaagtgtgggggcttcgcgcttggcctggccatgaaccactgcatgttcgacggcatcggcgccatggagttcgtcaactcgtgggccgagacggcgcgcggcgtcgctgagctcaccgtgccgccgttcctggaccgcggcgtcctgaaggcgcgcgacccgccggtgcacaccttcccgcaccacgagttcgccgagatccccgacgtctccgacacggcggcgctctacggcgcgcaggagctgcagtaccgctccttctgcttcgacccggaccggctggagcgcgtccgcgggctggcgcttgccgacggcgccctcggccgctgcaccaccttcgaggcgctgtcggggctcgtgtggcgcgcgcgcaccaaggcgctcgggctggcgcccgggcagcgcacgaagctgctgttcgccgtggacggacggcgccggttcgtgccgccgctcccgcggggctacttcggcaacggcatcgtgctgaccaacgccctggccacggccggcgagctgctgtccgcgcccgtgtcgcgcgcagccgggctggtgcaggaggccgtgcggatggtgactgacgactacatgcggtcggcggtggactacttcgaggcgacgcgggcccggccgtcgctggcgtccacgctgctcatcaccacgtggtcgcgcctcgagttccacggcgccgacttcgggtggggcgagcccgtcatgtcgggcccagtcacgctgccggagaaggaggtcatcctcttcctcgcacacggcaaagagaggaagagcatcaacgtgctgctcggcctgccagccaccgcgatggacgccttccaagagctcgtggacgagatatgattgattcatcggtgatatgagcagcgatgacggacagggatgggttgctatacatacatatataatgcagggtgtgcctgctttggtttatgtacgaacgtgttaatattccttctatgttggtgtctaagtttaatgagcatatatgagaaattgttatcgattgcaatggttctgagatggtacacgcataatggaaaatagtgaggtttgttcct

SEQ ID NO: 31326 - DNA, 1098 bp, Zea Mays
cttgctttaccgtggccacacagcgaggtccggcgggcgccgcaaaacgcaagtgcatgcgtcgccgcccaaggccagcctgtgtgtgcgttcgattcgcttctgctgcagctagggtttagaggttttctgggcgcggagcgggaggcggcggcggctatggctgcggcggaggaggagatcgcggtgaaggagccgctggatctgatacgcctcagcctcgacgagcgcatctacgtcaagctccgatccgaccgcgagctgcgcggcaagctccattgttttctgaagggtgggcctggtacagtggtgaaatctgtttcaccaggtcgcacgaagcagcctctttcacattccccagacctcactcatgtggaaggaagcctccatcattgagtctgcccctttagctgtaagctgttttctgaacattgttagtcaggcttagttgtttgagactctgtttccattcgtgaccaagggaactgtgaaatgtgtagaagatgctcatgcatatgcatcgaattgttccatgaagtcatcttaatgctcaaacagttttttttcctgccccagctgtacactgctttctgaattctgtcgtttaggcttagctgtccgagataatttcatttgtgatgaaggcaactggagcatctatccttttgttttaaacataaatattttgatagcttaacttgtgcgtcattttatcatgtaccatggtatatagatggcacttagcagtagcattcctgagttatgtgactgtcatgtaaagaatgcttgtgcagtatagtgggcttatgctaatctgtttggaatcccatgatgaataacaattatggatgttgggcattttatatttttatgatgccctttcatggcttgcatttattgtcttatgggcagacctagtaacagaggctcccacatgattgaggtccagggaagagataaaccgaggcaacccttcccctacaaattcggagaggctgcttcgagaggcttgtttgggtgtgagttgtgaccctggcaaagtgcctaagctaggcagctctctaggccgtcgattccagtgcttggcgtccggatgca

SEQ ID NO: 31327 - DNA, 1108 bp, Zea Mays
ttgctttaccgtggccacacagcgaggtccggcgggcgccgcaaaacgcaagtgcatgcgtcgccgcccaaggccagcctgtgtgtgcgttcgattcgcttctgctgcagctagggtttagaggttttctgggcgcggagcgggaggcggcggcggctatggctgcggcggaggaggagatcgcggtgaaggagccgctggatctgatacgcctcagcctcgacgagcgcatctacgtcaagctccgatccgaccgcgagctgcgcggcaagctccatgcctggtgcagtgttttctgaagggtgggcctggtacagtggtgaaatctgtttcaccaggtcgcacgaagcagcctctttcacattccccagacctcactcatgtggaaggaagcctccatcattgagtctgcccctttagctgtaagctgttttctgaacattgttagtcaggcttagttgtttgagactctgtttccattcgtgaccaagggaactgtgaaatgtgtagaagatgctcatgcatatgcatcgaattgttccatgaagtcatcttaatgctcaaacagttttttttcctgccccagctgtacactgctttctgaattctgtcgtttaggcttagctgtccgagataatttcatttgtgatgaaggcaactggagcatctatccttttgttttaaacataaatattttgatagcttaacttgtgcgtcattttatcatgtaccatggtatatagatggcacttagcagtagcattcctgagttatgtgactgtcatgtaaagaatgcttgtgcagtatagtgggcttatgctaatctgtttggaatcccatgatgaataacaattatggatgttgggcattttatatttttatgatgccctttcatggcttgcatttattgtcttatgggcagacctagtaacagaggctcccacatgattgaggtccagggaagagataaaccgaggcaacccttcccctacaaattcggagaggctgcttcgagaggcttgtttgggtgtgagttgtgaccctggcaaagtgcctaagctaggcagctctctaggccgtcgattccagtgcttggcgtccggatgca

SEQ ID NO: 31328 - DNA, 1445 bp, Zea Mays
caaaacgcaagtgcatgcgtcgccgcccaaggccagcctgtgtgtgcgttcgattcgcttctgctgcagctagggtttagaggttttctgggcgcggagcgggaggcggcggcggctatggctgcggcggaggaggagatcgcggtgaaggagccgctggatctgatacgcctcagcctcgacgagcgcatctacgtcaagctccgatccgaccgcgagctgcgcggcaagctccatctgtggtactggtgtcggcctggttcgtccctgccgttagtagggaactacagatttaagggaacggtttttgttatgccctggatggtgagctttctatgctgataagccgtcattattttgtaattaaattgtacgtttcacttcatgtgatgctaaatctttcaaaactagatgtgtgggtgggcggcgcttaatgcaacaaatttgacgataattggagcacatgactttttgtgtgtgtgacattcatgactttgaaaccttcggtatggcgcaacagacatttttgtgtaagagttcacgtgagatgagatcatgagagggtgtggaacgagtagaagcttcttcagctctaagctgttttcttaagggcaggcctggtgcagtgttttctgaagggtgggcctggtacagtggtgaaatctgtttcaccaggtcgcacgaagcagcctctttcacattccccagacctcactcatgtggaaggaagcctccatcattgagtctgcccctttagctgtaagctgttttctgaacattgttagtcaggcttagttgtttgagactctgtttccattcgtgaccaagggaactgtgaaatgtgtagaagatgctcatgcatatgcatcgaattgttccatgaagtcatcttaatgctcaaacagttttttttcctgccccagctgtacactgctttctgaattctgtcgtttaggcttagctgtccgagataatttcatttgtgatgaaggcaactggagcatctatccttttgttttaaacataaatattttgatagcttaacttgtgcgtcattttatcatgtaccatggtatatagatggcacttagcagtagcattcctgagttatgtgactgtcatgtaaagaatgcttgtgcagtatagtgggcttatgctaatctgtttggaatcccatgatgaataacaattatggatgttgggcattttatatttttatgatgccctttcatggcttgcatttattgtcttatgggcagacctagtaacagaggctcccacatgattgaggtccagggaagagataaaccgaggcaacccttcccctacaaattcggagaggctgcttcgagaggcttgtttgggtgtgagttgtgaccctggcaaagtgcctaagctaggcagctctctaggccgtcgattccagtgcttggcgtccggatgca

SEQ ID NO: 31329 - DNA, 1455 bp, Zea Mays
cgcaagtgcatgcgtcgccgcccaaggccagcctgtgtgtgcgttcgattcgcttctgctgcagctagggtttagaggttttctgggcgcggagcgggaggcggcggcggctatggctgcggcggaggaggagatcgcggtgaaggagccgctggatctgatacgcctcagcctcgacgagcgcatctacgtcaagctccgatccgaccgcgagctgcgcggcaagctccatagaggattggactagctgtggtactggtgtcggcctggttcgtccctgccgttagtagggaactacagatttaagggaacggtttttgttatgccctggatggtgagctttctatgctgataagccgtcattattttgtaattaaattgtacgtttcacttcatgtgatgctaaatctttcaaaactagatgtgtgggtgggcggcgcttaatgcaacaaatttgacgataattggagcacatgactttttgtgtgtgtgacattcatgactttgaaaccttcggtatggcgcaacagacatttttgtgtaagagttcacgtgagatgagatcatgagagggtgtggaacgagtagaagcttcttcagctctaagctgttttcttaagggcaggcctggtgcagtgttttctgaagggtgggcctggtacagtggtgaaatctgtttcaccaggtcgcacgaagcagcctctttcacattccccagacctcactcatgtggaaggaagcctccatcattgagtctgcccctttagctgtaagctgttttctgaacattgttagtcaggcttagttgtttgagactctgtttccattcgtgaccaagggaactgtgaaatgtgtagaagatgctcatgcatatgcatcgaattgttccatgaagtcatcttaatgctcaaacagttttttttcctgccccagctgtacactgctttctgaattctgtcgtttaggcttagctgtccgagataatttcatttgtgatgaaggcaactggagcatctatccttttgttttaaacataaatattttgatagcttaacttgtgcgtcattttatcatgtaccatggtatatagatggcacttagcagtagcattcctgagttatgtgactgtcatgtaaagaatgcttgtgcagtatagtgggcttatgctaatctgtttggaatcccatgatgaataacaattatggatgttgggcattttatatttttatgatgccctttcatggcttgcatttattgtcttatgggcagacctagtaacagaggctcccacatgattgaggtccagggaagagataaaccgaggcaacccttcccctacaaattcggagaggctgcttcgagaggcttgtttgggtgtgagttgtgaccctggcaaagtgcctaagctaggcagctctctaggccgtcgattccagtgcttggcgtccggatgca

SEQ ID NO: 31330 - DNA, 2178 bp, Zea Mays
ggaaaatgtgaaaatcctgaagctcgaaatatcagctagttggacttcttatcttcacgtgttttgagttcataaaatttcccaaccatagaaatcctccaattattcgattcccaagccactaaggcccttggaggaacaacagaatccagaaaccgaaaagaggcctcactgctgccgcctgggccaagtcgtcgtcttgcttgccaatccgtcgctccacctgaacacaccggcgaagaggaggcgaagaagcgatgggcgtgaccaaggaggacgtcgaggcggccatcacctccgctctcagcccttccaatctcgtggtgacggacacgtccggagggtgtggcgcgagctacgagatcgaggtggtgtcggagaagttcgaggggaagcggctgctggagaggcaccggatggtgaacaccgcgctggcgtctcacatggcggagatccacgccgtctccatcaagaaggcgctcaccccggctcaggcccagccccaggcccagccggagccggccgccgataagccccaggcttaagtgcttaacaccccccaaaacggtttgatcccatatgccgatgcacgattacattggctatctgcttgaataatgcggcggatgcacttgctaaattgcaggatgttatccttgactgattagaaacttctgcaccgtgcatttaacttctgtgtcactgtgtgtgtgttctggatgcttctgccctggtcgtttgctcgagactgtgtgttgcagttcatgctgttaatgttctgccagggtggggttttcagtcctggaatttttatatttgactgttgctatgtctttccttgcttgtaggggtaaggggtttattctttaaccttgtggattagattactgtatccatcatggtctgcagtggggagtggggtgtgatgatgatggctgcatcttgtttacacaacattttaatttcctgattgatgatgccgcaatcaagatgaatgtgttgtccttgctgatataagactgtatccagtaattaacccatatgatcaccaaaagcactgtgttctgcattattttagaccacactattcacagactatagtttgaatataggtacggggatgggtagattgctggagatagcctaaagctggctggaagtattttagtgctggaactgcagtagtttacagtttaagctgtgaaaataatttatgcaagcttctatgttatatcgtatatattgtagcgattgcattgaattgtacattgtagtacctgacgatactcttttttgtgcatatggggctgctggagttgtaatttctttctgtcataaatattccaaggtgtctgtgcacgtttgcatggacccccgtgaacagcagcacatcggtcgtggcagcaccatagctgacttgtatttgcacatgttgctagcacgtatgcacacagttccgtctgatggcaatagaaatatggagtagtagcatgccttgcttgtattgatatatacttgcagaccataacttcgaagacaagggggaccttctcagcgactacttccgcctatggcccctaattgctgacagtggtttctcggccgacgatctggaggatgacacgaccgtttggacccttgaaccgtcaggtgagtacacggcaagatcggcttgtgtgcagtacagtttggcaggcaacgtggatcagattttctggctacgatttggaaaccgtgtccttgtacccgccgcaagctcttcttgcggctactgcagaagagagtttgcacagcgggctgtttgctgatcatagagtgggtgaactgccgccctctctgtggaagaaactcaagaagggccgtcgtatctttccctcctctccaaggtgccgtttggttcacatatttgtaacgtaatgggtaattgataacgttaaatcatgtttgatagcgtaaaccattaccatttgcgttacatttcttgaaccaaacaacacccagatgtgtttggaacacctcactgaacctgaaccttgagttgcagtagcccttctaagaatatgaacaaaccaaacagggcagctttggtgaaatgccataatccagcactccatgtcagtgtccaactcgagcgttttcaggccttacatcacacaggatcgactatggtcttccaag

SEQ ID NO: 31331 - DNA, 1583 bp, Zea Mays
atcttcacgtgttttgagttcataaaatttcccaaccatagaaatcctccaattattcgattcccaagccactaaggcccttggaggaacaacagaatccagaaaccgaaaagaggcctcactgctgccgcctgggccaagtcgtcgtcttgcttgccaatccgtcgctccacctgaacacaccggcgaagaggaggcgaagaagcgatgggcgtgaccaaggaggacgtcgaggcggccatcacctccgctctcagcccttccaatctcgtggtgacggacacgtccggagggtgtggcgcgagctacgagatcgaggtggtgtcggagaagttcgaggggaagcggctgctggagaggcaccggatggtgaacaccgcgctggcgtctcacatggcggagatccacgccgtctccatcaagaaggcgctcaccccggctcaggcccagccccaggcccagccggagccggccgccgataagccccaggcttaagtgcttaacaccccccaaaacggtacggggatgggtagattgctggagatagcctaaagctggctggaagtattttagtgctggaactgcagtagtttacagtttaagctgtgaaaataatttatgcaagcttctatgttatatcgtatatattgtagcgattgcattgaattgtacattgtagtacctgacgatactcttttttgtgcatatggggctgctggagttgtaatttctttctgtcataaatattccaaggtgtctgtgcacgtttgcatggacccccgtgaacagcagcacatcggtcgtggcagcaccatagctgacttgtatttgcacatgttgctagcacgtatgcacacagttccgtctgatggcaatagaaatatggagtagtagcatgccttgcttgtattgatatatacttgcagaccataacttcgaagacaagggggaccttctcagcgactacttccgcctatggcccctaattgctgacagtggtttctcggccgacgatctggaggatgacacgaccgtttggacccttgaaccgtcaggtgagtacacggcaagatcggcttgtgtgcagtacagtttggcaggcaacgtggatcagattttctggctacgatttggaaaccgtgtccttgtacccgccgcaagctcttcttgcggctactgcagaagagagtttgcacagcgggctgtttgctgatcatagagtgggtgaactgccgccctctctgtggaagaaactcaagaagggccgtcgtatctttccctcctctccaaggtgccgtttggttcacatatttgtaacgtaatgggtaattgataacgttaaatcatgtttgatagcgtaaaccattaccatttgcgttacatttcttgaaccaaacaacacccagatgtgtttggaacacctcactgaacctgaaccttgagttgcagtagcccttctaagaatatgaacaaaccaaacagggcagctttggtgaaatgccataatccagcactccatgtcagtgtccaactcgagcgttttcaggccttacatcacacaggatcgactatggtcttccaag

SEQ ID NO: 31332 - DNA, 275 bp, Zea Mays
cccaaccatagaaatcctccaattattcgattcccaagccactaaggcccttggaggaacaacagaatccagaaaccgaaaagaggcctcactgctgccgcctgggccaagtcgtcgtcttgcttgccaatccgtcgctccacctgaacacaccggcgaagaggaggcgaagaagcgatgggcgtgaccaaggaggacgtcgaggcggccatcacctccgctctcagcccttccaatctccatcttcagttgtcgactaaccaacaaagagcggg

SEQ ID NO: 31333 - DNA, 1607 bp, Zea Mays
gcggattaaccgccgcgtgtttcttggcagggccaccgggtcaccctcttctccacgccaagaaacaccaggcggttaatccgcatccctccagaactcgcggggcatatccgcgtcgtggacatcgcgctgccgcgcgtggagcgcctgccggaggactgcgaggcgagcatagacctgccatccgacgacctccgcccgtacctccgcgtagcctacgacaccgccttcgccgacaaactctcggccatcctgaaggagccggggccggagaggccggactgggtgctcatcgactacgccgcgtactgggcgccagcggccgcggcgaagcacggcgtgccgtgcgccttcctgagcctgttcggcgccgcgacgctcagtttctatggtcccccggaggggctcatgggacgcggcaagtacgccaggacgaagccggaggacctcaccgtagtacccgactacgtgccgttcccaaccaccgtcgcgcaccgcagcttcgaggcgcgcgagctattcaagccaggccttgtcccggacgactccggcgtgtcggagggccacagattcggcgtgtccatcggagagagccagattgtaggcatcaggagcagaacagagctcgagtcggagtggctgcaggtgcttggcaagctctacaagaagccggtgatcccgatcggcctgttccctccgccgcccacgcaagacatcgccggccacgaggcgactttgcggtggctggacaggcaggctcagggctccgtcgtgtacgcggccttcggcagcgaggcgaagctgacgagcgcgcagctccaaacaattgcgctaggtttggaggcttccggcctgccgttcctctgggcattcaggccgccagccgacgccgcacccggacaaggcacgggcgggttgcccgaaggcttcgaggagcgtgtcaatgaccggggattggtctgccgcggctgggtgcctcaacccaggcttttggctcatgaatcggttggtgggtttctgacccatgccggctggaactccatcgccgaaggcctctcgcggggcgtcacgatggtgctgttgccgctgatgttcgatcagggcctcaacgccaggcttcttgtggataagaagatcgggattgaggtggagagggacgaagacgacggcacgttcgcgcccaaagacatcgcagatgctctgaggacggccatggcggagaaccaagacggaactagggtcaaggaactggccgaggtgtttggaaatgacgaggccaatgatcagtgcctgcgagatttcctccggtatctgtcagaatacatcaggcagcatcaaggttagttccagtccatttcgaggctaatgttaatgcagaaaagggcaaagaaatggcagtgagtcacgtcacgccatcaaaaaaaatccttccaggcaaatactactccgtagacaatagaatatggaatggaagcatgcatctttgagattattgccaagaaattcttgctctctcttctttagaaaaaaaaggaagttttctttgttaagaaatctctttttttaaggatgtgatgacagcggccgacggccagaccgattttacg

SEQ ID NO: 31334 - DNA, 1745 bp, Zea Mays
aaatccccctccggctccaggctccagcgcagcgcaacgcaacgcaaacccagacggcccgccagacccagcggtcgcttactcgcatcgcagcgcactcgcgccacagtcggcatcacagaccagatccctgcgggtgcggcggccatggccgagaacttccaactccagggccggcacggcaagtcccgcgtccgcgtctcccgcgtctggcgccgcccggccgcggcggggggcgacgtcatcgttgagtggaacgtcgccgtcagtatcgtctccgactgcctcccctcctacacctccagcgacaactccgccatcgtcgccacagattccatcaagaacaccgtgtatgtcaaggcgaaagagtgcacggaagtggtgtccatggaggaattcgccgtgattcttggaaggcatttcacctcgctgtaccctcaggtttcagaggccacggtgactatcgtggagcgcccatgggagcgtgtgactgtcgacggaaagcctcattcgcatgggttcaaagttggtgttgagaagcacagcacagaggtcattgtaaaaaaatctggaagcctgcgtataaattctggaattcaaggatactcgctgctaaagacaactcagtctgggtttgaagggtttgtgacggatcgctataggcttcttcctgatacaagggaaaggatagtagcaacagaagttactgcttggtggaggtaactaactctcttcccttctgcctgaaaaattccagttctcagaccatctttaaatttatgacttgttgtatgtgcatacagttgagaaacaatgctattagtgtcctggacaagccaatattgtagttcaggtgttgtgattatattttacttttaggaattcatctacaaggctgcaagtcatgtattcaagagtcatgacttcctagtttgcaaaatagcaagaacgagacagggctatccagttatttatgggtcgtggtgttttgtgtacgcttcctttttctgtatccaggtatccctttgaacatgtttcgcagctcccatcgaagccattctgcttcacgcagagatatcaggatgtaaagaaagtccttgcagagacgttctttggtcctccggatgttggtgtgtatagtccatccgtacaaaatacgctatacctcatggccaaggaagtccttacaaggttcccagatatatcgtcagtccagcttagaatgccgaaccttcactttctgcctgtcaacttggggagcaaagaagctccgctggtgaagtttgctgatgatgtgtacctgccgacggatgaaccacacgggacgattgaagcaaccttaataagccgtcccatgtcaaagctgtaaaaaaaatgtagtcgtcaggctggtattagactcctgcttcgtctccccagcatccccaggcttaaaatggacagtaagctgtaagggaaagataaactgtcataaatcgtagcccctatgctttatgtgtggtggtggtaataagtgcacagacttgtattggatgttgtcagctgtagcctgtaggcgtccagcttgtgacgtttcgccactgtaatcgtgtacattggtcgtcttgtgtggaaaccagttaatatctttggaagctttggtcagttttacttcgtcgtctgtagtcttttagctcgttattaggccaccagcttcagtagatctgattgtttctccatatatttgaacatattacgtctccata

SEQ ID NO: 31335 - DNA, 980 bp, Zea Mays
atttgagactgtttatcactgtttacttttgttgtcattcatgttctaagggttcaaagttggtgttgagaagcacagcacagaggtcattgtaaaaaaatctggaagcctgcgtataaattctggaattcaaggatactcgctgctaaagacaactcagtctgggtttgaagggtttgtgacggatcgctataggcttcttcctgatacaagggaaaggatagtagcaacagaagttactgcttggtggaggtatccctttgaacatgtttcgcagctcccatcgaagccattctgcttcacgcagagatatcaggatgtaaagaaagtccttgcagagacgttctttggtcctccggatgttggtgtgtatagtccatccgtacaaaatacgctatacctcatggccaaggaagtccttacaaggttcccagatatatcgtcagtccagcttagaatgccgaaccttcactttctgcctgtcaacttggggagcaaagaagctccgctggtgaagtttgctgatgatgtgtacctgccgacggatgaaccacacgggacgattgaagcaaccttaataagccgtcccatgtcaaagctgtaaaaaaaatgtagtcgtcaggctggtattagactcctgcttcgtctccccagcatccccaggcttaaaatggacagtaagctgtaagggaaagataaactgtcataaatcgtagcccctatgctttatgtgtggtggtggtaataagtgcacagacttgtattggatgttgtcagctgtagcctgtaggcgtccagcttgtgacgtttcgccactgtaatcgtgtacattggtcgtcttgtgtggaaaccagttaatatctttggaagctttggtcagttttacttcgtcgtctgtagtcttttagctcgttattaggccaccagcttcagtagatctgattgtttctccatatatttgaacatattacgtctccata

SEQ ID NO: 31336 - DNA, 3346 bp, Zea Mays
taaggtccctgtcccgagcggtggcggttggtgggaactgtgcgcggtgcagttgataaacttctagctttcctgtgagggacgggcgaccttttcccgtgcgtgcgtgaaatcgcccagcctacgggactgattgggcttgaagttgtggcgcgtacgagagatgcctcatgccagagcttctgttattagagactgaagttctgcaagcgcgtgctgctgctctggagttttagcagctgtgttgagtggttgggagccatggagtcacggatggatcagtacgaggttttggagcagattggtcgcggcgcctttggtgctgccatcctcgtcaaccacaagacagagaaaaagaagtatgtgttgaagaaaatacgtcttgcaaggcagacagagcgatgccgcaagtctgctcaccaggagatggctcttattgctcgcttgcaacatccttacatcgttgagttcaaggaggcatgggttgagaagggctgctatgtttgcattgtgacgggatactgtgaaggtggcgatatggctgaattgatgaaaaaagcgaatgggacatacttcccagaggagaaactactgagatggtttgcgcaattggcattagctgttgactacttgcattcaaactttgttttgcatcgagatctcaagtgctcaaacatatttcttaccaaagaacaggatattcgtcttggagattttggcctggccaagactttaaaggcagatgatctagcctcttcggttgtgggaacaccaaattatatgtgcccagagttgcttacagacattccctatggattcaagtcagatatatggtctcttggatgttgtatgtatgagatggctgctcatcgacctgctttcaaggcttttgatatggctggactgataagtaagataaatcgctcctccattggccctttgcctactttctattcttcatctatgaaaacacttatcaaaagcatgttgaggaagagtcctgaacatcgacctactgcatccgagattataaaaaatccatacctccaaccttatgtgaatcaataccgtccatttgctaatatattacatcctggtcgatcaccagagaaacctggcaccgattcacggagcagtcagaaaagtatgtctgggagtcagtgtagtagcatttctggaactggcagtgatatggatagcatacaatcaaatgaaagaaacacgtcaggactagcttcaagttccagcaacaccattgataccgagggtgctgaaactactgaacttcagagacataaagatactgcttgtcctggactcaagagacaagattcatcaaaatccgtacaagataatcaacatcctggacatgagaataagcaaccaaagataattaagaagatactaacaactctaagagaggagagcaaatttagggaaagcaattctcctgttagagctagccgtgtaaagctaaattcacctagcaatagagaacgctcatctgacgactcaaagcaaagtgatatttcctccagttcaaggtctagtgaagttatgtcacatgaatcagcaaatgcaagctgtgaacctgtcaaacgaggacatgcatctcctcccttgaagcatttgtcaccaattgttgagcattctccgaaggttaaaattaaagtagatgagctattacatccacaccttgccaagcaggttggagaagttgttgatgcagctgcagggaaggttaagaacagaacaccgcccatttttattaaatgcaccagtattcctactcggaggcaaggagtagcaagtccaagccgtcaacacactggggtaaagcgagctcacaataaggtcatggcagagcatgcaaggaatccttgtcagcatctccatagtccaagcaacgctcttgtgaaacttccaagtgttccaatggttcctccaagtcatctagaagatcttaagagaaaaccagacaatacacgagcaaaatctgctcctcctagggctttagcaaccaaggaagacaacagtgcttgctccagttctacgattggtaatgctgaaaacaccaaccagtctgaaccgtctgaacctgactcaccaacttatttggtctcatcctgcaaatgtttgatacctgacactatcatacaaaagcacggcataacaagtaaaaaaagttcagaaatcatcacaaccaattgtgagaagaaaatgactagtaatggtgatcttagtctaagcgcagccatggtgcaatcttctgatattcctgaacaagagtttatttgcaaggatggaatgctctccagtcaggtgggtcagtgcagtgaaacagttactgtaccaagcgatgaagacaagttcacagtgcgggaactgctttcatcagtaccagatctttgttccttggtcccaacaacaatgatgaacactgagccaggaagaggacccactctcacccagtcatcagagaaaccatcgggtcctcatttaaatcctcctccagttgaggacattatacatgtcataagccacagcagtttccatgtgaatggtgagcaggcagtaaaagaaactggatcagagagcattgatgttgacaaacgtcttaacatggtaagagaagagataggtgtaagaagcaccgagccaaacctcataccttctggacctatagattctgatacggtgaagccaaatgtagtagaagctaatattacctttcagaaaccatccagtacagatgccataaaactgccaaccataccggaaggaaattttagtactctggagaccaacaatgggtttaagcaggaagcagctccggctaaggaaatactagatgtgacatctttcaggcagcgagctgaggctctggaaggtctcttagaactttctgcagaattactggaacacagtaggctggaggagcttgcgattgttctaaagccatttgggaaggccaaggtgtcccctcgagaaacagcaatatggttggctaaaagtttcaaaggcttgatgaatgacgaagcaagccgcagttcaacgtgagtacgcgtagcttttgtgccaccctttttactttggttgatttctgcttgtgctctgaagatgctatggttgtcttgttcatatctggcttcttggtatcgtgtgtcggtgtttccatttcgatagttattcattctttacagcacatgttgtaaatagcccagatttgtgaacagaaaataatacatgccagaaatggtgttaatttacatggttgaagtaacagagactaatttgatcaattattgttttgcctacgtgctcctctgaaactatcagaattcta

SEQ ID NO: 31337 - DNA, 3341 bp, Zea Mays
gtgagtttgtgtggccgaatgttttttcatcgattgtcctatgtgattgagttagtaggtgtctttaggattacgattggatatttggattggatggaacagggaaatcgcccagcctacgggactgattgggcttgaagttgtggcgcgtacgagagatgcctcatgccagagcttctgttattagagactgaagttctgcaagcgcgtgctgctgctctggagttttagcagctgtgttgagtggttgggagccatggagtcacggatggatcagtacgaggttttggagcagattggtcgcggcgcctttggtgctgccatcctcgtcaaccacaagacagagaaaaagaagtatgtgttgaagaaaatacgtcttgcaaggcagacagagcgatgccgcaagtctgctcaccaggagatggctcttattgctcgcttgcaacatccttacatcgttgagttcaaggaggcatgggttgagaagggctgctatgtttgcattgtgacgggatactgtgaaggtggcgatatggctgaattgatgaaaaaagcgaatgggacatacttcccagaggagaaactactgagatggtttgcgcaattggcattagctgttgactacttgcattcaaactttgttttgcatcgagatctcaagtgctcaaacatatttcttaccaaagaacaggatattcgtcttggagattttggcctggccaagactttaaaggcagatgatctagcctcttcggttgtgggaacaccaaattatatgtgcccagagttgcttacagacattccctatggattcaagtcagatatatggtctcttggatgttgtatgtatgagatggctgctcatcgacctgctttcaaggcttttgatatggctggactgataagtaagataaatcgctcctccattggccctttgcctactttctattcttcatctatgaaaacacttatcaaaagcatgttgaggaagagtcctgaacatcgacctactgcatccgagattataaaaaatccatacctccaaccttatgtgaatcaataccgtccatttgctaatatattacatcctggtcgatcaccagagaaacctggcaccgattcacggagcagtcagaaaagtatgtctgggagtcagtgtagtagcatttctggaactggcagtgatatggatagcatacaatcaaatgaaagaaacacgtcaggactagcttcaagttccagcaacaccattgataccgagggtgctgaaactactgaacttcagagacataaagatactgcttgtcctggactcaagagacaagattcatcaaaatccgtacaagataatcaacatcctggacatgagaataagcaaccaaagataattaagaagatactaacaactctaagagaggagagcaaatttagggaaagcaattctcctgttagagctagccgtgtaaagctaaattcacctagcaatagagaacgctcatctgacgactcaaagcaaagtgatatttcctccagttcaaggtctagtgaagttatgtcacatgaatcagcaaatgcaagctgtgaacctgtcaaacgaggacatgcatctcctcccttgaagcatttgtcaccaattgttgagcattctccgaaggttaaaattaaagtagatgagctattacatccacaccttgccaagcaggttggagaagttgttgatgcagctgcagggaaggttaagaacagaacaccgcccatttttattaaatgcaccagtattcctactcggaggcaaggagtagcaagtccaagccgtcaacacactggggtaaagcgagctcacaataaggtcatggcagagcatgcaaggaatccttgtcagcatctccatagtccaagcaacgctcttgtgaaacttccaagtgttccaatggttcctccaagtcatctagaagatcttaagagaaaaccagacaatacacgagcaaaatctgctcctcctagggctttagcaaccaaggaagacaacagtgcttgctccagttctacgattggtaatgctgaaaacaccaaccagtctgaaccgtctgaacctgactcaccaacttatttggtctcatcctgcaaatgtttgatacctgacactatcatacaaaagcacggcataacaagtaaaaaaagttcagaaatcatcacaaccaattgtgagaagaaaatgactagtaatggtgatcttagtctaagcgcagccatggtgcaatcttctgatattcctgaacaagagtttatttgcaaggatggaatgctctccagtcaggtgggtcagtgcagtgaaacagttactgtaccaagcgatgaagacaagttcacagtgcgggaactgctttcatcagtaccagatctttgttccttggtcccaacaacaatgatgaacactgagccaggaagaggacccactctcacccagtcatcagagaaaccatcgggtcctcatttaaatcctcctccagttgaggacattatacatgtcataagccacagcagtttccatgtgaatggtgagcaggcagtaaaagaaactggatcagagagcattgatgttgacaaacgtcttaacatggtaagagaagagataggtgtaagaagcaccgagccaaacctcataccttctggacctatagattctgatacggtgaagccaaatgtagtagaagctaatattacctttcagaaaccatccagtacagatgccataaaactgccaaccataccggaaggaaattttagtactctggagaccaacaatgggtttaagcaggaagcagctccggctaaggaaatactagatgtgacatctttcaggcagcgagctgaggctctggaaggtctcttagaactttctgcagaattactggaacacagtaggctggaggagcttgcgattgttctaaagccatttgggaaggccaaggtgtcccctcgagaaacagcaatatggttggctaaaagtttcaaaggcttgatgaatgacgaagcaagccgcagttcaacgtgagtacgcgtagcttttgtgccaccctttttactttggttgatttctgcttgtgctctgaagatgctatggttgtcttgttcatatctggcttcttggtatcgtgtgtcggtgtttccatttcgatagttattcattctttacagcacatgttgtaaatagcccagatttgtgaacagaaaataatacatgccagaaatggtgttaatttacatggttgaagtaacagagactaatttgatcaattattgttttgcctacgtgctcctctgaaactatcagaattcta

SEQ ID NO: 31338 - DNA, 1556 bp, Zea Mays
aagaggaaaaggaggagaggtggccaggtggtggagggcggtgacgggacaaagtagtggcctgggcgtgccggcgcggaggagggggcggccatggagaagggcgcgggcacgcggcggtggcggctggtggaaagagggtcggatcgtctcgccttcatcaacagccagacacgcagcctttcctgcgacccgattccagacgctgcaccccgagctgccttgtggactcacagtttgctgttcttctatttttcaatgaaaagctcttatggattcaccatgtcgtccagagtttgaaggtagcgctgaaaatgagttcattgagagaaatcagttgcagaagtcagaacctaacaacgacctggtacctggatttcaacatcctaatactcgccaaggagtcaaagctagaaccttaagctatgatgatctggtacctggaattcaacgagctgatggtcgccaagaaatgaaggctagtaccttgagctatgaagatgagcttttccgcaaatttaagatgggcagttcagtccctgaaatttagccagtaaatcaaacaccattgtgtacccatgatctggaaactgtgagtaacaatgcaatccatgctggagttagtaagaatacaagtgatgacagagttagtaagatgacaagtcttgatggagcggcaagtgtccaacctagcagagaagtggaaatgagacccagatctgcacgtccaagccagtcaaccgaagtggacaattcaggttggtctgtggaaactctgaaggaactcttagacttcacgccacaggagataaccaaggccatatccgcgactgagagtaaccgtttgttagcatctgtcgccattgctttgctggtggttctttcgaactagggcttggacatcggtggtgccatcaccagagtattggttggtacaaggccacttctatttctcattataaccaacatcaccattgtcttcacattgttgatggagaacaaagaccccaatgtgaaaagcaggcccgtcggcgccaacctgggttctgccgatagcttagggcagatgctagagatcggtttgctgctacagaaagccctaggtgctctgctgattgactgcagcgtttgcgctgttattatgatctgctttcttggattctgagggagcctaggtagaagttccgcagaaatctttgtaactattttgtcccgtgctctgtactgcatcgttctgctactgctattcaattctgtatcatctcactttggcagagttttaatttatgtactccccgttttctgttttctgagcgtatgcagttaattaaaccaggtcaactgttttagccagtattttttggtaaccttgtatattgattatttattatgacaaagcaacctcttatacagttttaccaacgatgaatataatgtcgactgtgtgcctactgcctagtctctgttcaggttttgcacgcgtgcataaatttattatgcaatcttgtggcacataatccaagttgttgtcgagcaagaacggtgacgacgcaaag

SEQ ID NO: 31339 - DNA, 1314 bp, Zea Mays
ctgaagcttgatatttccaaggcctttgactcgattcaccatgtcgtccagagtttgaaggtagcgctgaaaatgagttcattgagagaaatcagttgcagaagtcagaacctaacaacgacctggtacctggatttcaacatcctaatactcgccaaggagtcaaagctagaaccttaagctatgatgatctggtacctggaattcaacgagctgatggtcgccaagaaatgaaggctagtaccttgagctatgaagatgagcttttccgcaaatttaagatgggcagttcagtccctgaaatttagccagtaaatcaaacaccattgtgtacccatgatctggaaactgtgagtaacaatgcaatccatgctggagttagtaagaatacaagtgatgacagagttagtaagatgacaagtcttgatggagcggcaagtgtccaacctagcagagaagtggaaatgagacccagatctgcacgtccaagccagtcaaccgaagtggacaattcaggttggtctgtggaaactctgaaggaactcttagacttcacgccacaggagataaccaaggccatatccgcgactgagagtaaccgtttgttagcatctgtcgccattgctttgctggtggttctttcgaactagggcttggacatcggtggtgccatcaccagagtattggttggtacaaggccacttctatttctcattataaccaacatcaccattgtcttcacattgttgatggagaacaaagaccccaatgtgaaaagcaggcccgtcggcgccaacctgggttctgccgatagcttagggcagatgctagagatcggtttgctgctacagaaagccctaggtgctctgctgattgactgcagcgtttgcgctgttattatgatctgctttcttggattctgagggagcctaggtagaagttccgcagaaatctttgtaactattttgtcccgtgctctgtactgcatcgttctgctactgctattcaattctgtatcatctcactttggcagagttttaatttatgtactccccgttttctgttttctgagcgtatgcagttaattaaaccaggtcaactgttttagccagtattttttggtaaccttgtatattgattatttattatgacaaagcaacctcttatacagttttaccaacgatgaatataatgtcgactgtgtgcctactgcctagtctctgttcaggttttgcacgcgtgcataaatttattatgcaatcttgtggcacataatccaagttgttgtcgagcaagaacggtgacgacgcaaag

SEQ ID NO: 31340 - DNA, 717 bp, Zea Mays
atggatcgcatgcgacacaggaactccgtcagctccgagcgcttccttggctccttcgcccgctccgcagctgccggagaacagtcggcctctacggccttcgagcttgacgaggacgacctcttctccgcaggatccggctcgcccgagccgccgcagccgttgcgccgcccactcatcctgtcctccgtccgccatgcaaaccctagccctgttccacgcctacgccgcccgccggagggcatcctggacgccctccccgagcgccgccgctcgccgcctcagtcctcttcatccacgtcctcgtcccccgcttccccggctgcggcccctccccgcatgatccctgccgttccccgcccggcgccggcaccggcgccgtatgtgccgcaatcattgccggtcaacgttcctgcggcgcggctgcggaagccgcccgtggtgatggtgatgggggaagcggaggatgaatacgaggagatgctaccgccacacgagatgttagcgcgcgcgcgggctcgggagtcgccgatgacgacgttctcaatgctggagggagccgggcgcacactgaaggggcgggatctccgccagtctcttcgttgcaccatctctggtggtgtccgtttgccgcagtgcagccatgatagagctggaatagctgactggattggatgcctccaaaacccggtcccttgccaaaagaagaagaggagg

SEQ ID NO: 31341 - DNA, 1383 bp, Zea Mays
attggtggcatggcggttggcctgcccccggggtaccgcttctacccgacggaagaggagctgatatgcttctacctccgcaacaagctggacaacctccgcgacgacatcgaacgcgttatccccgtcgtggacgtctactccgtcgacccctgccagctcccagggattcacgagctgctgtgcgacggcggcgccggcgccggtgagggggagccgtggttctacttctgcccgcggcaggagcgggaggcgcggggcgggcggcccagccggacgacgccgtcggggtactggaaggccgcgggcacgcccggggccgtctactccgccgaccgccgcgccatcggggtgaagaagaccatggtgttctattacggccgcgcgccgtcggggaccaagaccaagtggaagatgaacgagtacagggcgttccagttcgaaacccccggccctggcctcggcctcgccgccgctggagtcgcagctgacgggtcgtcgtcttcgagcgcccaccacgccgccgatggacccgcaccaccaccaaacgttggcccgcaggtgaggtgacgcgcaaatgatcaattgacgttgctttctctgccgttgtggacattggcacgtagcttatatagcttccaaattgtgctctacacatgaggctgcggcgcgcgcgcgcgcgcatgtgtcgatctccatatattgcttaggcgtcagggcaacttgatcaatgctgaggggcgagtttagcctgtgtcgactctacaccaaatctgggagcctgagacagtttgaccggcggccgctcgcagctacgggaggtgtcgtcgtccctggcgaggacccggcgggtccattcacggcagtggccgcgtcgccgccggacgatgatgatggctccggcagctccatgcaacagcagcagcagcagctgacggggggaggtgccaacaacgatccatacggtgacggcgtggtgacggagagggaagacgcccacgatcctttcggtgacgacgtggccatgttggatgcccttttatactggcctggagactagaagtcgtgcacttgcaagactactcatttcctcaactcaaaacgtgctccaaatttggagaggcggtagacgatatgtatcaagtagtagctgatggtttcaatttaccacttaccattttatttaatttggtgcaggaacaagctaggctaattcaggccgcctgaccgtttggacatgtaatcgttcgttgcattattaacagtttacagttttgcgatgtttgcacttgttggttttgggggcatcctattgcagatttcccgttggcctgtgtgctagtacacggctgatatgtgtcatgtatgtcaattgataataag

SEQ ID NO: 31342 - DNA, 1858 bp, Zea Mays
cttttctaaaccttcgctgctgcttcgcaacggtgccgcggcttcggacagggctctcgcgacgcgatcggccatggcggcgtctctgcgggcctcgtcctccctccgctcgcgcctcctctcgttctcctcggggtgttctctgtgtccgtggcgtctcctcctctcctcacctgtccactcggacgccccccaccagaccgaaaccctcgctttcgacgagatccagctgtcgccggagaagccggctaccgccactgccttcgtcctgcacggcctcctcggttccggccgcaactggcgctccttctctcgcgccctcgtctccgaactccgtaaccgctccccttcagacgagtggaggatggttctcgtggacttgaggaaccatggcagatcggctgggatcaaggggctcggcccaccccacaacatatctactgccgccaaggacctcgctgatttagtgaaggcccgtggttggccatggccggatgttgttgtgggtcactccatgggtggaaaagtcgctctagatttcgcggagagctgctctcgcggtgtgtatggagattctgctaatcttcccaaacagaacagctctgggtccttgattctgtccctggacaagtagaaacagagaacagtgatggtgaagttgaacaggtgggttgtcgaccacatgctcagccttggattttcgaagtctctttcagaatggatcggcagtaacttgaagaaggacaacgatcatgtgacctgggctttcaatcttcaggctgccatagacatgtttagttcttatagggaaagggactattggtcggtgctggaacacccacctaaggatttggagattgcaatagtgcaagcagagcacagtgatcgatgggtccctgatgacgttcaaaggctaaaagcattagccgggagagagtccaagcctgatgtaggaaaagtgtcacttcacgttctccctaactctggccactgggttcatgtggacaatccgaaagggctactcgagatcatggtacctaactttctatcagcagttcaaaattgagtggtaccttcaatcagaaccttcatttattgtgacatattgagtttgacaacccatgggataacgtttcctctctcatattgttgcccaacaagaattctttgcttcttttctgaggaaatagtgcacccttctgttaataatcgagagaaaagtatacataatcccatgttctctttctgcagattattggatgttgtaaaaaagagagaccactgcttaatattacatttttcctaccctgaataagaacagatactgcattgccaatcatattctcatatattctactgtagaaagcttttacaaacttatgtacctgttttgttcaggggaagagatcctctatgactttgttccacgttttgttgccacgtgatgaaccatgccatcaaagcttttttatgtttggctgattaggagcactcccgttgtgactgctgctgaatgcctggataggatagtccttgtcaattcttagtggtcacgcataactttccaacgtgtcttttgttctggcgccattatctgttgagcgtgcggcaggtcctctagttggaaggctgtcaaccactggttcagaggctgttaatcagggcagccagttttttaggtcttcttcctcgctgttagaatatctgcagcgttttttttctctatatcatacttttatgtcacgtcgtcaagattccatcttctaatttttcatctccctcagcggttcactctaatctcactacaactataaaatattactttctatatctattcatcatctattaccattttttt

SEQ ID NO: 31343 - DNA, 1953 bp, Zea Mays
ccatctgtcttcaacacgtgtgtcgttctgctcggactcgaaatacagtcttcgacagtcgtcgcatacagtcgtcacagtccctcgcgtagacgcgcacccacctccatccctcccatcggcatcccggacttctcccaggagctccggggcttccaggctatcacctactaccaggccatcatcaacaactcgctcgttgacctctacgtccagtgcggcacggtggagttcgcacgccatgcgtttgaccggatgccggagcggcaccttgcgtcctggaacgccatggccctcgcgctcgccaaccatggccgcggcaaggactcgctcgatttgttcaaccggatgacgcgggtggagaatgtggtgccaaatgccatcacgttcgtcgcggggttcagcgcctgcaaccacggtggactggccatggcggcgatgggcgcgaccgcttcgccactcccttccctattccccacagggcagcgacacactctactcaagcatcgccttcacccgcagcctcggggacctcgccgccgaggccgtcagggtcatcgtcgagccgagctatgggtgcacgttggggacgacgactcggaccactactgctggcagcagcatgtggacatgaccacgtcacgacgagcgtccgaggttgacgcggaccacccgggctccgaggtcgcagccgtcatggctgccgcgaccgccgtgttccactgggccggggacgcgcactacgcgcacctactgctccaccatgcgcagcagctattcgacttcgccaacacctaccggggacgctacgacgccgcgctgcaggtgctcggtctacaccccgaccacgggctcgttaactccttccacgccatcaggctgctgctctccaccgagtattacatctccacgatgctcacctatgtggcccgtgtcagcctcatggtgacggtggcaagccaacctgcatctatttcaattgatgctcaagggatgtttgatgaaatgcagcaaagtgatacctctgttgccatcgcacatactgccttcaacagtttcttcaacacggaggagctagataggtggctagaaagctgcgatgaacagggtgaattagttggagtcaacaagatccatgtgaagcctcagttctttgatgtgggcaaggactgtaactgggcgaggggcatccggagaaccgagatccagctcgctgatggcaagaactgtgagctacataggtgctggacagatatcttggatgctataagcaaggctcaacatttgatttacatcactggctggttgactatattggtgagggatgatagcaattctgtcgacctgcttacgaaggagggcttgctgactacccatgatgtggagattgcaaaaggagagcaggaaatcatgaatgaagtacttccagcagagagccggtcatctcggtttggtgtggctatggatcttgcagacatatggccttgctatgaatccaaaccatctgatgcgcaaggctatgctatcaaagggataccaaatctcagaaacacatgctatcggagtgcagtattgcagtgcctgttgatgctcggtaagctgctagaaaggatactaccatcgacatggttagccatccaagggtgctcacgaactggtatagccatccaaggatactaccatcagttctcttattttatccataagctattttcagttgagctggtatagcacccgatagggcgctgccttttctagtacatttcaaaccagatcacatctgtgcacgtgaagccgacgacagttcacaaaaagtgaatatggctacatacatgcttgattgtgaatcagattaccagtcaacagagaacagccggaaatcatacccatttcaaaacacttccacttttttccgtgtagttactcacgctgccatatcacaataagctatac

SEQ ID NO: 31344 - DNA, 1809 bp, Zea Mays
ccttgaagtgctctttggtgtggtcctgccaatatttggtagatatcagaaacgcaccaaacatgaagatggaggtatgaatttacaaggtcattgcctaggagttgtaatggctcattgggtttattagaggatgagtccagatatggagtgtttggtattatcagcagactttcggcaatgagccaagtaccataatcaattgtgttttatagaagtcagacctgtaactaatcatacagcaatgagctgacttttaaatctatgcccctagttcagcaccactgctcagttttgccactcttcagtagtaaaaacgtcccatcccttactaccagagaaggttaaaactgaacggtgatgctgaactaagggcacagatttaaaaatccctttccaaatagttagtaggatattctatggagaagtttctcaatacccatgcaagtatgcatcagtccacaatattaaattaagaaaaaatatcaaaacaaacttcaaaggccgctaagagcctaaagtttcttagctagttcagacttcagagagagaaattgctggctaattttgcctgacgatttgtcaacgcatgctatcagtaatcagctcaaagcaaaataagccacacactgaatgcaatcagcaaagagatgaagcatccctggaatgggagtgctcataatgattgcaccattgtcaaatggcctccagaccaatgtcatattctttttgaaagcttggtaggaacatgtggaatagggccagctgtaatgagcataaaatgttgaaacctttattgtcatgcaaagcaatcatttcttaattgcttgggccacgttgcaccctactttcttccctcaactttcattacacaatacacaccttccaagtttccaatgaaaagaagagctgtaggctaacaccatggtggtggattcctatcaacctaaaacattaaatttctcgtgctatcttttgctgaaacaatgccagttttacagatcaaacaggcttagaatgagcagactgcatcctactttacttttccctttgtaacatttcccataatgcacaataccacagcagtgaactgccaagatagcattatgcagtaagcatatggtggtgaatccagatccaatttgacaggccatgcaagttttagagacaataggttggaagtggtccttatccaggacctacatgatcttccactttcgatggaaagtgcaagtatacagaatacagtagtgcaatataacaaacttttccactcgaggacgaaaggaatcaattttatcctttggtaacatggtgattggtcccctcatcattctgttccatatcactttcggttactccttttaaagagaatatctcatggtaggatatttgttaaagggatacagattaggacagggtaacatccacaacaacaaattatcgcttttgcatgaaggtagcatagaacccttgaaagttacaaaagatgaagtttgcaaaacctcctaagcactcgaaggtttccatatggctcacttctgaagacacctaagatggtgctttgcctattctttcacgcatggcgttcataactaaatactaccttctaccactactccgctagaaagcttaacgctagtgtatattctgaagtagaaaggtttcacaagcaatgcacagtcagaattatgaattgtcaagcttctggcagataaaggacaaccaatgcagttattggataacacagggactgtacgtctgtacctgcaacgctttgaggcgaactgacaggttgaccaccacttc

SEQ ID NO: 31345 - DNA, 2123 bp, Zea Mays
agctctactgtagcaaatttttgggcttctttgaagtgcggcccaaaaactgaggaggttccttcctatcaaagggaacaatattatagtttgggccgttgtttatcacacagggtccctcggcccgcaccatttcgcgcttgccctaaagaaacccgacacgagccccactcgctcggacgcacaggcgcacaccgacaagcgcagcgatggcggccgcggcgggggacggacagacgccgcaggagccggagccagtggcgggagcggcggctggaggcggcgtgatcgcgaagctggaagaggagtggcggaaggcgaaggagcacgcgcagacctacccgtacgtgtggggctcctacatcctcgtctacggcggcctcggcgcctacctcgcctggcgctggcgtaagctccgccgcaccgaggaccgcgtccgcgttcttcaggaacgcctccgcaagctctccgcggccgaggagtcgcaggctgcctctgccaccggctccgtttccactccctcgacccctcccctgccgcaggagtcggcctctggggccgcaaagccggcttctagaccgtgaaggaaagtagaggtggaggactataatacaagtgctgagaggttggtgattctctcattgtcatctaatcgtttgggggaagctcaaaatcatgtacatcgtgtgtggtcattcccacgaaggatctggatttactgttgatgtcaccggaacccgtcttagtgacatcgtaacttttggctccatgatgctggtttgcagttttctccatccacttcacttctctattgttactaatgtattgcgccttatactgatcttgccaaatcttcttgaattatctcctggagcatatttttgcggtgttatgtactaaggacaaatggattatggatagagaaagcttaaccaacatcctggcagtctaattttgacgtttggcagggctttcggttgcagatccctctggataagttgacagagctgaactgacgaaccaaacgttcctgctaaattccatagtctgcaacctaacttcgtcgattgtgaactatcaggtaggttggtatgaagttcagttgtagaaatcaaatttctcagacagcataggttataagaaaccatagcttccatattgttagcatccatagattcatttttttgaacgtaatggcaggagctttgcctttccattaagaagaatattagaattgacctagttttaaggtaaattaggcctgaaacctacacagagtgcccaaacaacacaagcagcgacaatcccacacacaaagcctattcagagtcatcgttgccgagcttttaacacaaggtacgagcagctccgacttcgccagacggtccgcacatggccaaaagaaacatgatgacgccaacacctaaaacctggcacacaaggaggaagaccgtgacacgctatcgttgtcaagcctcaacacacccacactcgaggcagctccaattcttcatcaacgatcttgatctaacgcacatctccggctatttgttcgatctccaaaacaatccatatcacgaggaagggggctcgcctcatgtcactgttgccgagccacatcccctaacgtggtagtttcgacttcatgttgcaaaaaccccacctccacccgcaaatcagacatcgagaagcgagagcatcaaccgaagccaacgtcgaggtcgagacgaactttagagcaatgtgacgccctcaacagggagaagtggcgcccacgggtgtcactgtcgccgaggctttcgcccaagatgccctctagcatatcataggtcaggaccccaggtcacagtatgcagcctccgcggtcgccaccgccctagcctccgcacaaacccctctagaggggcaccgacgtgtcggctgccgcagtagtcgcaaagctgcgtcgatcgccatcccatccggctgggcacatggaaccaggaaacaccttgtcgtgtgcgcacccacatggaggtcgagggagatccatagacgacaccgtcaacagggtgggagtggcgtccataggcgtcaccgccgtccgctcgcaagcgggcatggctttcaccttgaggatctac

SEQ ID NO: 31346 - DNA, 3775 bp, Zea Mays
agctctactgtagcaaatttttgggcttctttgaagtgcggcccaaaaactgaggaggttccttcctatcaaagggaacaatattatagtttgggccgttgtttatcacacagggtccctcggcccgcaccatttcgcgcttgccctaaagaaacccgacacgagccccactcgctcggacgcacaggcgcacaccgacaagcgcagcgatggcggccgcggcgggggacggacagacgccgcaggagccggagccagtggcgggagcggcggctggaggcggcgtgatcgcgaagctggaagaggagtggcggaaggcgaaggagcacgcgcagacctacccgtacgtgtggggctcctacatcctcgtctacggcggcctcggcgcctacctcgcctggcgctggcgtaagctccgccgcaccgaggaccgcgtccgcgttcttcaggaacgcctccgcaagctctccgcggccgaggagtcgcaggctgcctctgccaccggctccgtttccactccctcgacccctcccctgccgcaggagtcggcctctggggccgcaaagccggcttctagaccgtgaaggaaagtagaggtggaggactataatacaagtgctgagaggttggtgattctctcattgtcatctaatcgtttgggggaagctcaaaatcatgtacatcgtgtgtggtcattcccacgaaggatctggatttactgttgatgtcaccggaacccgtcttagtgacatcgtaacttttggctccatgatgctggtttgcagttttctccatccacttcacttctctattgttactaatgtattgcgccttatactgatcttgccaaatcttcttgaattatctcctggagcatatttttgcggtgttatgtactaaggacaaatggattatggatagagaaagcttaaccaacatcctggcagtctaattttgacgtttggcagggctttcggttgcagatccctctggataagttgacagagctgaactgacgaaccaaacgttcctgctaaattccatagtctgcaacctaacttcgtcgattgtgaactatcagagtacaataattccgacccatggggagctttgtggggttgctgagcgttgaccaaggtccaagcatggagctctttggaatctagttgtggcttggcttatttccatggcctgcataggttccccacactgatacagtgatacactctagatatggccttgcacctccatgccagaaatccagagttttcatatcaataaaagagttgcctaccctcagctttcatttctttgtaccactacaaggccgcgtgacatgtgtgaggttcctgtgttcgaacactgcaggctgagccatcagtgtgctgtgtagggtcggtcattcagctgtctctttcatagtattgttaggctccagtcacttcacaaaatcaggctggtattttttggcgagccggttaaaacttgaacgctgagcaaaaacggcacgtttgcaagctgagccccggccatcgctcctaccacaatatcttgccaacgaaaagactgcagctatatgtacagcgtgcagcgaagacaacaaaatagtacagatgggcctggtcctggtgctccgctgatgcccctcctctggtgctcaccacccagtccgacatcgccatgtgatggccgaacagcactacgtgcccagaactggccttgattccttttaccaagccttgctctgcgtcctgatcaagtcatcagaaacagtcctgcagagtagattatcttgatttgcccttcaaatcttggttctgagtttctgacctctgtttaaaaaaaattaggtgccgtgctggtgctgctgagtgaggtttacggtttagggtttaccctgcggtgttctctgaccctatgttagtttgaggatgaaactgttttaaactgacgacgggcgtcgacagattcaacaggccgaactgttatttattgttatttgcgaaaatcataaagcgcagcgacagattcttcgcagtttttggtggccactgcgtaaaagacagatcggtctcagggggagtcgtcgggcgttccacgctgaaatctggaatgaaaagactaagctcatatattgggagggccgcagcagaaaatgggctctgtcggccgggagtctctccagatcggctggccactcctgtctgcccccaccgttatcttggacttgccagcctcgctgtgctttgcctcccccccatcgtcctcatgggaattttaaagggaagcgcctgctagcagccacctctccctgccgcagctagtcagcatcttcagtcttgcactcccccctctgcaaggaagcgagctgcgcgcgcgatgccccaggtggacctggagagcctggtgtgcggcgtgtcgggcgccggcgccggcgctggtgacaggaaggtgtcgtgcgagacggtcatcgcggggggcagcggggacgcctcgccgccgccggacccggacttgccgcccgagtcgataaccatccccatcggcgacgacgcggcgttctcggagctgaacccgatatacgagcgggacgactccaccaagggcagcaccaaccccaagttcgcggccgccgccgccgtggccaaccccgtcgcggccaagacgcggtccaactccacgcgcgtcgcgggcgccccgccgccccccgcggccggcaccacgttcttcggcctcccggcgaggatccgcccgaccttcacccggcgccgcccgtcgcagggccggatcttgcacggcaagcgcgcgggcggcggcggcggcggcggcggcgaggtggagccgcggtcgcccaaggtgtcctgcattggcaaggtcctgtccgaccgggagcggcacggacggcgccggcgcgggtggtggtacggcgtggccgccatgttccggtgcgacggctgcgcccgtgtgcccggcggcgcgtccaggaagaaggtggcgctggaggacgatgccgggcggcggcggcagcagcagcagcagccgggcggcattgcgggaatgcggaggttcaagtccgggagaagagccgcatcgtggggagacgaggcgctggccgcggcggcgacgggggccgacccggacgagggggaggaggaggaggaacccgacagcaaggacgctgtgcagtggtcccggcggccggtaacttaggttgcggtgagggcgggaaacgattgggcgccgctggggtgggcccgctgtaagtgactgccgtggtcgccgataggtgagcccgaggcgtctcgagcagcacggtcggctttggctggctggctggtcgccgctcgatggcgatcgtagactggcctggcctcctagaactgcgagttttggagttcggtggattgtttctgcgtggaattacgcaacccatttggaagagcttgtttgttgaaacttgagctcctcggcagcggcggcctaccgctgtgtacatagcagtgttctactgcctcaagcaataacaggagcgcataatgtgcagtccgccattcgcctgtcttcctcttcgtcatcgcaactgttcttcaggcttttgcatgcggttgtgcttgtgcccatcttacttgaccgtgtgacccactcgtctcgtctgcccatctcgtaccgcacgaaatcgtggctctaccagggggctagctagctgctagtgtcaacccatggatacagtcaagaccgggtttcggtttcggctcggcacgacagcagacttgat

SEQ ID NO: 31347 - DNA, 2818 bp, Zea Mays
agctctactgtagcaaatttttgggcttctttgaagtgcggcccaaaaactgaggaggttccttcctatcaaagggaacaatattatagtttgggccgttgtttatcacacagggtccctcggcccgcaccatttcgcgcttgccctaaagaaacccgacacgagccccactcgctcggacgcacaggcgcacaccgacaagcgcagcgatggcggccgcggcgggggacggacagacgccgcaggagccggagccagtggcgggagcggcggctggaggcggcgtgatcgcgaagctggaagaggagtggcggaaggcgaaggagcacgcgcagacctacccgtacgtgtggggctcctacatcctcgtctacggcggcctcggcgcctacctcgcctggcgctggcgtaagctccgccgcaccgaggaccgcgtccgcgttcttcaggaacgcctccgcaagctctccgcggccgaggagtcgcaggctgcctctgccaccggctccgtttccactccctcgacccctcccctgccgcaggagtcggcctctggggccgcaaagccggcttctagaccgtgaaggaaagtagaggtggaggactataatacaagtgctgagaggttggtgattctctcattgtcatctaatcgtttgggggaagctcaaaatcatgtacatcgtgtgtggtcattcccacgaaggatctggatttactgttgatgtcaccggaacccgtcttagtgacatcgtaacttttggctccatgatgctggtttgcagttttctccatccacttcacttctctattgttactaatgtattgcgccttatactgatcttgccaaatcttcttgaattatctcctggagcatatttttgcggtgttatgtactaaggacaaatggattatggatagagaaagcttaaccaacatcctggcagtctaattttgacgtttggcagggctttcggttgcagatccctctggataagttgacagagctgaactgacgaaccaaacgttcctgctaaattccatagtctgcaacctaacttcgtcgattgtgaactatcagtttttggtggccactgcgtaaaagacagatcggtctcagggggagtcgtcgggcgttccacgctgaaatctggaatgaaaagactaagctcatatattgggagggccgcagcagaaaatgggctctgtcggccgggagtctctccagatcggctggccactcctgtctgcccccaccgttatcttggacttgccagcctcgctgtgctttgcctcccccccatcgtcctcatgggaattttaaagggaagcgcctgctagcagccacctctccctgccgcagctagtcagcatcttcagtcttgcactcccccctctgcaaggaagcgagctgcgcgcgcgatgccccaggtggacctggagagcctggtgtgcggcgtgtcgggcgccggcgccggcgctggtgacaggaaggtgtcgtgcgagacggtcatcgcggggggcagcggggacgcctcgccgccgccggacccggacttgccgcccgagtcgataaccatccccatcggcgacgacgcggcgttctcggagctgaacccgatatacgagcgggacgactccaccaagggcagcaccaaccccaagttcgcggccgccgccgccgtggccaaccccgtcgcggccaagacgcggtccaactccacgcgcgtcgcgggcgccccgccgccccccgcggccggcaccacgttcttcggcctcccggcgaggatccgcccgaccttcacccggcgccgcccgtcgcagggccggatcttgcacggcaagcgcgcgggcggcggcggcggcggcggcggcgaggtggagccgcggtcgcccaaggtgtcctgcattggcaaggtcctgtccgaccgggagcggcacggacggcgccggcgcgggtggtggtacggcgtggccgccatgttccggtgcgacggctgcgcccgtgtgcccggcggcgcgtccaggaagaaggtggcgctggaggacgatgccgggcggcggcggcagcagcagcagcagccgggcggcattgcgggaatgcggaggttcaagtccgggagaagagccgcatcgtggggagacgaggcgctggccgcggcggcgacgggggccgacccggacgagggggaggaggaggaggaacccgacagcaaggacgctgtgcagtggtcccggcggccggtaacttaggttgcggtgagggcgggaaacgattgggcgccgctggggtgggcccgctgtaagtgactgccgtggtcgccgataggtgagcccgaggcgtctcgagcagcacggtcggctttggctggctggctggtcgccgctcgatggcgatcgtagactggcctggcctcctagaactgcgagttttggagttcggtggattgtttctgcgtggaattacgcaacccatttggaagagcttgtttgttgaaacttgagctcctcggcagcggcggcctaccgctgtgtacatagcagtgttctactgcctcaagcaataacaggagcgcataatgtgcagtccgccattcgcctgtcttcctcttcgtcatcgcaactgttcttcaggcttttgcatgcggttgtgcttgtgcccatcttacttgaccgtgtgacccactcgtctcgtctgcccatctcgtaccgcacgaaatcgtggctctaccagggggctagctagctgctagtgtcaacccatggatacagtcaagaccgggtttcggtttcggctcggcacgacagcagacttgat

SEQ ID NO: 31348 - DNA, 2841 bp, Zea Mays
agctctactgtagcaaatttttgggcttctttgaagtgcggcccaaaaactgaggaggttccttcctatcaaagggaacaatattatagtttgggccgttgtttatcacacagggtccctcggcccgcaccatttcgcgcttgccctaaagaaacccgacacgagccccactcgctcggacgcacaggcgcacaccgacaagcgcagcgatggcggccgcggcgggggacggacagacgccgcaggagccggagccagtggcgggagcggcggctggaggcggcgtgatcgcgaagctggaagaggagtggcggaaggcgaaggagcacgcgcagacctacccgtacgtgtggggctcctacatcctcgtctacggcggcctcggcgcctacctcgcctggcgctggcgtaagctccgccgcaccgaggaccgcgtccgcgttcttcaggaacgcctccgcaagctctccgcggccgaggagtcgcaggctgcctctgccaccggctccgtttccactccctcgacccctcccctgccgcaggagtcggcctctggggccgcaaagccggcttctagaccgtgaaggagtaagcttcctttttttcccagcttcttggcatgacggattacaaaattacagagcgattcatcgtttgagctcgctgctgtgcttcgttccttacttggttggtgattctctcattgtcatctaatcgtttgggggaagctcaaaatcatgtacatcgtgtgtggtcattcccacgaaggatctggatttactgttgatgtcaccggaacccgtcttagtgacatcgtaacttttggctccatgatgctggtttgcagttttctccatccacttcacttctctattgttactaatgtattgcgccttatactgatcttgccaaatcttcttgaattatctcctggagcatatttttgcggtgttatgtactaaggacaaatggattatggatagagaaagcttaaccaacatcctggcagtctaattttgacgtttggcagggctttcggttgcagatccctctggataagttgacagagctgaactgacgaaccaaacgttcctgctaaattccatagtctgcaacctaacttcgtcgattgtgaactatcagggggagtcgtcgggcgttccacgctgaaatctggaatgaaaagactaagctcatatattgggagggccgcagcagaaaatgggctctgtcggccgggagtctctccagatcggctggccactcctgtctgcccccaccgttatcttggacttgccagcctcgctgtgctttgcctcccccccatcgtcctcatgggaattttaaagggaagcgcctgctagcagccacctctccctgccgcagctagtcagcatcttcagtcttgcactcccccctctgcaaggaagcgagctgcgcgcgcgatgccccaggtggacctggagagcctggtgtgcggcgtgtcgggcgccggcgccggcgctggtgacaggaaggtgtcgtgcgagacggtcatcgcggggggcagcggggacgcctcgccgccgccggacccggacttgccgcccgagtcgataaccatccccatcggcgacgacgcggcgttctcggagctgaacccgatatacgagcgggacgactccaccaagggcagcaccaaccccaagttcgcggccgccgccgccgtggccaaccccgtcgcggccaagacgcggtccaactccacgcgcgtcgcgggcgccccgccgccccccgcggccggcaccacgttcttcggcctcccggcgaggatccgcccgaccttcacccggcgccgcccgtcgcagggccggatcttgcacggcaagcgcgcgggcggcggcggcggcggcggcggcgaggtggagccgcggtcgcccaaggtgtcctgcattggcaaggtcctgtccgaccgggagcggcacggacggcgccggcgcgggtggtggtacggcgtggccgccatgttccggtgcgacggctgcgcccgtgtgcccggcggcgcgtccaggaagaaggtggcgctggaggacgatgccgggcggcggcggcagcagcagcagcagccgggcggcattgcgggaatgcggaggttcaagtccgggagaagagccgcatcgtggggagacgaggcgctggccgcggcggcgacgggggccgacccggacgagggggaggaggaggaggaacccgacagcaaggacgctgtgcagtggtcccggcggccggtaacttaggttgcggtgagggcgggaaacgattgggcgccgctggggtgggcccgctgtaagtgactgccgtggtcgccgataggtgagcccgaggcgtctcgagcagcacggtcggctttggctggctggctggtcgccgctcgatggcgatcgtagactggcctggcctcctagaactgcgagttttggagttcggtggattgtttctgcgtggaattacgcaacccatttggaagagcttgtttgttgaaacttgagctcctcggcagcggcggcctaccgctgtgtacatagcagtgttctactgcctcaagcaataacaggagcgcataatgtgcagtccgccattcgcctgtcttcctcttcgtcatcgcaactgttcttcaggcttttgcatgcggttgtgcttgtgcccatcttacttgaccgtgtgacccactcgtctcgtctgcccatctcgtaccgcacgaaatcgtggctctaccagggggctagctagctgctagtgtcaacccatggatacagtcaagaccgggtttcggtttcggctcggcacgacagcagacttgat

SEQ ID NO: 31349 - DNA, 877 bp, Zea Mays
agattgttcgcgatctgcccgtagttgatcccgaatttctgctgcgccgacactgccaaattaacgcacgccaggcgctcattgttagcaaccgggatatataacagtaaaaatagagttcctaaattaacagtaaaatatattatatccacttcgttacttaatttttactatataagataaatctcagctttacatgttaagtaacagtaaaaaaatcattgcataaaaacatactatattttagtaatccggaatatatagagtcccaccgaaatgctctaggtacgaagtcgctttcgtgattaaacgacataaaaaattgttcggtggcaagaggagagcaccttacacctacaatcaataatgtatacggaagcagacgggatgatcattcatagtaggcggctaggggcagagctagaaatcatttatgagggagagagcaaaaatggtaagatttaaacagctagtagatatgtaaaaaaacagaaattttcagcaaactgtgcggtttcaggaagaaatcgtgtaatggattattcagctcaactgattgcgacaatatgaggggcaccggagttatttgcgctggtatgctttgccggacctcgtcgtcaggcctccatgttcttggttcgcggctgctttacagtgctgtgccctcgctgcaaattctaatcggtcccaaaattggcaaccaaaaaagaactccgtacccttgtccgcacggacaatgaaactggaaggcagcatcgtggcagagctcgaaaggaccgatacaatacaagcaaccccaactcgcatctcacgaggacagaggcctccatgccatgttcttggtccgcagtcgcagctgctttccagtgctgtgccc

SEQ ID NO: 31350 - DNA, 2027 bp, Zea Mays
tgaaagtgcaagcccaatccgctcctcccacggcccacgtctcgtcagttttttcctttttcccgtggcccgtgggtgtgcgtcctaggtgtgcggcgggcggtgcgccgtgcgcctcctctcctcgccgcgacgctgccgtgttcgcgattcagcgccgtgctcgacgcccctcctctcctcagaagtcagcgccgcatctccggttgcagagacttgcgctgccacatctccgcttttcgtccttcagttgctcgacgcccctcctcccctcagaagtcagcgcagcgtctccactctccacgccggcgcgtcggcgacgcgggtccttcgaataagacggtttgttctcgcatcgggcgtcagccggattcgagggacatagatgatggaagtcgatcttgggtgccaccacgtcgaagcggcttgtgctgtgtagatccggcgaaagcgcgcaggcaaagcccgggtctgcgtcgtcattggcctcatgatcttcgtattgccatcgcgctaaagggaacgaaggcgacgaggtcttaaactttgattgatatatgcggatatgaaaatgcatgcaactacatgctagaagtctgtcttggttgtgttggagaaaaattctttgttacgtttttgttgatagcgttgagtgccaaaaatggagcttctccctgttgaagtcgttggcaacattctttcccatcttggtgttgcgcgtgatgttatgattgcctctgcggtatgccgcaagtggcgagatgcatgcaggaggcatctccgtttgctgtccttcaactccaatgactttccacgggacatgactacacgtcagttggagattgtcatcacacagactatatttcagactatggggctgcaacgcctttcgattcacattgataacacccatgagttctctgcagcaccagtgattgcatggctcatgtataccagggagaccctccgaagcctgtcttacaatgtcaggacaatacccaatgtaagcattcttgaaaagtgtggtaggcaaaagctcgaagtgctagatttggaattggaccataacaccatcacaggtgtcgaaccaagctatcagaggttcacttgtctgaaatccctttccctgaggcatgtcagcattttggccttggatttgagccttttagttgctgcttgcccaagaatagagtcattagcacttgatgtccttgaggttgtcacttcagaattacagtctacgatggagctcacaagccatacattgaaaagtctatttgcaaaatcggtaggtgtagataagatcatacttgatgcagataatttggaagttctgcacctgaatgctttaaatctcgatctgtttgagcttaacgggaaaggaacactaaaacattttaagattgatgatgtcagtgttactcatttggatattggggacaatactgatcatttggaggcagtagacgtgagcaacttcacaatagtctggccaaaattctatagcatgatatccagggcatctaatttgcgtatgctacgattttggggtgttgtgtttgatgacgaggatgagatcgtggattcagaaactatagctgtttcatttcctcttcttaggcatctttcattgagttatgaattacgagatgggttacttcactacagccttcagggatcatcattactggagaatgtctcagttctggaacttggttggacagtaataagtgagcactttggaccctgggtgtttggtatgattggaaggtgtccaaatctcaagaaacttgttattcatggtgttctttctgagacaaaaacgcgagaggatcgccagatgttagcaagctttacctcattcatagtctgtgtcatgaggaagtatgtgcatgttgatgtacaatttgagtatgagtgacagctactaggttgggtgggcatcttgtcattgttcagatgaagctgtgccatcaggtttgtgccatggtggggacataaatgttcgctaccttgtaggaatgcag

SEQ ID NO: 31351 - DNA, 2160 bp, Zea Mays
acgtctcgtcagttttttcctttttcccgtggcccgtgggtgtgcgtcctaggtgtgcggcgggcggtgcgccgtgcgcctcctctcctcgccgcgacgctgccgtgttcgcgattcagcgccgtgctcgacgcccctcctctcctcagaagtcagcgccgcatctccggttgcagagacttgcgctgccacatctccgcttttcgtccttcagttgctcgacgcccctcctcccctcagaagtcagcgcagcgtctccactctccacgccggcgcgtcggcgacgcgggtccttcgaataagacggtttgttctcgcatcgggcgtcagccggattcgagggacatagatgatggaagtcgatcttgggtgccaccacgtcgaagcggcttgtgctgtgtagatccggcgaaagcgcgcaggcaaagcccgggtctgcgtcgtcattggcctcatgatcttcgtattgccatcgcgctaaagggaacgaaggcgacgaggtcttaaactttgattgatatatgcggatatgaaaatgcatgcaactacatgctagaagtctgtcttggttgtgttggagaaaaattctttgttacgtttttgttgatagcgttgagtgccaaaaatggagcttctccctgttgaagtcgttggcaacattctttcccatcttggtgttgcgcgtgatgttatgattgcctctgcggtatgccgcaagtggcgagatgcatgcaggaggcatctccgtttgctgtccttcaactccaatgactttccacgggacatgactacacgtcagttggagattgtcatcacacagactatatttcagactatggggctgcaacgcctttcgattcacattgataacacccatgagttctctgcagcaccagtgattgcatggctcatgtataccagggagaccctccgaagcctgtcttacaatgtcaggacaatacccaatgtaagcattcttgaaaagtgtggtaggcaaaagctcgaagtgctagatttggaattggaccataacaccatcacaggtgtcgaaccaagctatcagaggttcacttgtctgaaatccctttccctgaggcatgtcagcattttggccttggatttgagccttttagttgctgcttgcccaagaatagagtcattagcacttgatgtccttgaggttgtcacttcagaattacagtctacgatggagctcacaagccatacattgaaaagtctatttgcaaaatcggtaggtgtagataagatcatacttgatgcagataatttggaagttctgcacctgaatgctttaaatctcgatctgtttgagcttaacgggaaaggaacactaaaacattttaagattgatgatgtcagtgttactcatttggatattggggacaatactgatcatttggaggcagtagacgtgagcaacttcacaatagtctggccaaaattctatagcatgatatccagggcatctaatttgcgtatgctacgattttggggtgttgtgtttgatgacgaggatgagatcgtggattcagaaactatagctgtttcatttcctcttcttaggcatctttcattgagttatgaattacgagatgggttacttcactacagccttcagggatcatcattactggagaatgtctcagttctggaacttggttggacagtaataagtgagcactttggaccctgggtgtttggtatgattggaaggtgtccaaatctcaagaaacttgttattcatggtgttctttctgagacaaaaacgcgagaggatcgccagatgttagcaagctttacctcattcatagtctgtgtcatgaggaagtatgtgcatgttgatgtacaatttgagtatgagtgacagctactaggttgggtgggcatcttgtcattgttcagatgaagctgtgccatcagtcgcctatatgtgtgcctccacataacatcactaccaccctcgaccaacaactcatccttgagctggagaagggggtattgctgaggaagatggctggtgtttgcactgaacaaggatttggcgaacaccacaacggaattggatccagagcggttttttgggtaatggattggtgacgtcgttgtgggtatgcaacaagggtggatgggacgttgatg

SEQ ID NO: 31352 - DNA, 1975 bp, Zea Mays
acgtctcgtcagttttttcctttttcccgtggcccgtgggtgtgcgtcctaggtgtgcggcgggcggtgcgccgtgcgcctcctctcctcgccgcgacgctgccgtgttcgcgattcagcgccgtgctcgacgcccctcctctcctcagaagtcagcgccgcatctccggttgcagagacttgcgctgccacatctccgcttttcgtccttcagttgctcgacgcccctcctcccctcagaagtcagcgcagcgtctccactctccacgccggcgcgtcggcgacgcgggtccttcgaataagacggtttgttctcgcatcgggcgtcagccggattcgagggacatagatgatggaagtcgatcttgggtgccaccacgtcgaagcggcttgtgctgtgtagatccggcgaaagcgcgcaggcaaagcccgggtctgcgtcgtcattggcctcatgatcttcgtattgccatcgcgctaaagggaacgaaggcgacgaggtcttaaactttgattgatatatgcggatatgaaaatgcatgcaactacatgctagaagtctgtcttggttgtgttggagaaaaattctttgttacgtttttgttgatagcgttgagtgccaaaaatggagcttctccctgttgaagtcgttggcaacattctttcccatcttggtgttgcgcgtgatgttatgattgcctctgcggtatgccgcaagtggcgagatgcatgcaggaggcatctccgtttgctgtccttcaactccaatgactttccacgggacatgactacacgtcagttggagattgtcatcacacagactatatttcagactatggggctgcaacgcctttcgattcacattgataacacccatgagttctctgcagcaccagtgattgcatggctcatgtataccagggagaccctccgaagcctgtcttacaatgtcaggacaatacccaatgtaagcattcttgaaaagtgtggtaggcaaaagctcgaagtgctagatttggaattggaccataacaccatcacaggtgtcgaaccaagctatcagaggttcacttgtctgaaatccctttccctgaggcatgtcagcattttggccttggatttgagccttttagttgctgcttgcccaagaatagagtcattagcacttgatgtccttgaggttgtcacttcagaattacagtctacgatggagctcacaagccatacattgaaaagtctatttgcaaaatcggtaggtgtagataagatcatacttgatgcagataatttggaagttctgcacctgaatgctttaaatctcgatctgtttgagcttaacgggaaaggaacactaaaacattttaagattgatgatgtcagtgttactcatttggatattggggacaatactgatcatttggaggcagtagacgtgagcaacttcacaatagtctggccaaaattctatagcatgatatccagggcatctaatttgcgtatgctacgattttggggtgttgtgtttgatgacgaggatgagatcgtggattcagaaactatagctgtttcatttcctcttcttaggcatctttcattgagttatgaattacgagatgggttacttcactacagccttcagggatcatcattactggagaatgtctcagttctggaacttggttggacagtaataagtgagcactttggaccctgggtgtttggtatgattggaaggtgtccaaatctcaagaaacttgttattcatggtgttctttctgagacaaaaacgcgagaggatcgccagatgttagcaagctttacctcattcatagtctgtgtcatgaggaagtatgtgcatgttgatgtacaatttgagtatgagtgacagctactaggttgggtgggcatcttgtcattgttcagatgaagctgtgccatcaggggacacagggctctagagtacactgtttgagat

SEQ ID NO: 31353 - DNA, 3593 bp, Zea Mays
acgtctcgtcagttttttcctttttcccgtggcccgtgggtgtgcgtcctaggtgtgcggcgggcggtgcgccgtgcgcctcctctcctcgccgcgacgctgccgtgttcgcgattcagcgccgtgctcgacgcccctcctctcctcagaagtcagcgccgcatctccggttgcagagacttgcgctgccacatctccgcttttcgtccttcagttgctcgacgcccctcctcccctcagaagtcagcgcagcgtctccactctccacgccggcgcgtcggcgacgcgggtccttcgaataagacggtttgttctcgcatcgggcgtcagccggattcgagggacatagatgatggaagtcgatcttgggtgccaccacgtcgaagcggcttgtgctgtgtagatccggcgaaagcgcgcaggcaaagcccgggtctgcgtcgtcattggcctcatgatcttcgtattgccatcgcgctaaagggaacgaaggcgacgaggtcttaaactttgattgatatatgcggatatgaaaatgcatgcaactacatgctagaagtctgtcttggttgtgttggagaaaaattctttgttacgtttttgttgatagcgttgagtgccaaaaatggagcttctccctgttgaagtcgttggcaacattctttcccatcttggtgttgcgcgtgatgttatgattgcctctgcggtatgccgcaagtggcgagatgcatgcaggaggcatctccgtttgctgtccttcaactccaatgactttccacgggacatgactacacgtcagttggagattgtcatcacacagactatatttcagactatggggctgcaacgcctttcgattcacattgataacacccatgagttctctgcagcaccagtgattgcatggctcatgtataccagggagaccctccgaagcctgtcttacaatgtcaggacaatacccaatgtaagcattcttgaaaagtgtggtaggcaaaagctcgaagtgctagatttggaattggaccataacaccatcacaggtgtcgaaccaagctatcagaggttcacttgtctgaaatccctttccctgaggcatgtcagcattttggccttggatttgagccttttagttgctgcttgcccaagaatagagtcattagcacttgatgtccttgaggttgtcacttcagaattacagtctacgatggagctcacaagccatacattgaaaagtctatttgcaaaatcggtaggtgtagataagatcatacttgatgcagataatttggaagttctgcacctgaatgctttaaatctcgatctgtttgagcttaacgggaaaggaacactaaaacattttaagattgatgatgtcagtgttactcatttggatattggggacaatactgatcatttggaggcagtagacgtgagcaacttcacaatagtctggccaaaattctatagcatgatatccagggcatctaatttgcgtatgctacgattttggggtgttgtgtttgatgacgaggatgagatcgtggattcagaaactatagctgtttcatttcctcttcttaggcatctttcattgagttatgaattacgagatgggttacttcactacagccttcagggatcatcattactggagaatgtctcagttctggaacttggttggacagtaataagtgagcactttggaccctgggtgtttggtatgattggaaggtgtccaaatctcaagaaacttgttattcatggtgttctttctgagacaaaaacgcgagaggatcgccagatgttagcaagctttacctcattcatagtctgtgtcatgaggaagtatgtgcatgttgatgtacaatttgagtatgagtgacagctactaggttgggtgggcatcttgtcattgttcagatgaagctgtgccatcagcaagagatgaaccaacgtgttttgttgcattgggagcagaggctggagataatcgtaggagttgccaaaggtgttgcttatctgcaaggactaagaaaggaagtgatacacagtgatctaaaaccatccgacatactcttggatgaaaactagagagctaaaattgcagattttggcaccacaaaagtgttcgtggatggccagacgaatccaacacttgtacaatagagggacacagggctctagagtacactgtttgagatccagtgtttcaaagtccagccaaaaatgttgaaattcagttgtttgatgaatttggacaatgatgatgatgatttagaatctgatccagagtttgatgaatgatgatgaagagatggtatacaatacaatcagggtaggggcaaaagtttagattgttcgaaagcaaaaaaaaataaaaaaataaaaagaagactggaccaatactagaggagctatgggacattttatcactccaggttttgtaagtacctcagaatctatggaaaaattgagactgtctaattacaagaattgaatatttgaattccagtttgattgatagttgaagtattgacgaatctgcaattgaaatcattagcctttaattgatttgggattttaagtatactgtatagatgctacattctttgtgtcacatatatgtttgctttttttatcaatatattatgacaaaaaaatgctagagtccagataaggcatgcaacgtgcgcccaattttctagtattcttcacaatgaagaggaccaagataacatggaagatgcggatgcatggactcactagtcattagttatttattttcgtgtttaccgtgcaatgttcttaacgtttcagtttgatcatttatctttattttagttaattctcggtgcaatgttaatgggatagtttttgccaatagttgcaaacataatgggtagttttcactgctaagtaccctagtcatgagcaaagcctgggtctgctactgtttgtaacccttcatgggcgtcgttgtgcgctgcagctaagatcaccggagcagctaatggcttgttcgctgcggctttaatccgactgcggctgcggcttctacagtattttctctctagggattgcagctgcaacagtattttgcagctgcaacagtggtttttgtagtgcagccgaacgcgctctaagatcaccggaaggagagtgtagtcgctgggcatgaacatgtgctggccaaacataacgagttccgaggtccgaccctaatggcgttgtgcaaggcccacaaaaatgctgggtctgctttagttgctgcttgtatgctgtgagcctgtgactaaggaagttgaacgatggtgttgagacggcaaagcaggtagcagcagtgccacattggctcattgtgcctagatagtgtgtctgccaacatgttcaagcatcctggcttatgttcaataacagagccaaagcccaggatcttacattgactctatccatcttttgtgatgtcatgttccagaaattctgattttgcaaatttatggtggctgaactgctcccccctccccaccccaccccaatacttcaaacatctctcactggtgggttaatgtaagctcaatgtaaatccaaag

SEQ ID NO: 31354 - DNA, 6166 bp, Zea Mays
acgtctcgtcagttttttcctttttcccgtggcccgtgggtgtgcgtcctaggtgtgcggcgggcggtgcgccgtgcgcctcctctcctcgccgcgacgctgccgtgttcgcgattcagcgccgtgctcgacgcccctcctctcctcagaagtcagcgccgcatctccggttgcagagacttgcgctgccacatctccgcttttcgtccttcagttgctcgacgcccctcctcccctcagaagtcagcgcagcgtctccactctccacgccggcgcgtcggcgacgcgggtccttcgaataagacggtttgttctcgcatcgggcgtcagccggattcgagggacatagatgatggaagtcgatcttgggtgccaccacgtcgaagcggcttgtgctgtgtagatccggcgaaagcgcgcaggcaaagcccgggtctgcgtcgtcattggcctcatgatcttcgtattgccatcgcgctaaagggaacgaaggcgacgaggtcttaaactttgattgatatatgcggatatgaaaatgcatgcaactacatgctagaagtctgtcttggttgtgttggagaaaaattctttgttacgtttttgttgatagcgttgagtgccaaaaatggagcttctccctgttgaagtcgttggcaacattctttcccatcttggtgttgcgcgtgatgttatgattgcctctgcggtatgccgcaagtggcgagatgcatgcaggaggcatctccgtttgctgtccttcaactccaatgactttccacgggacatgactacacgtcagttggagattgtcatcacacagactatatttcagactatggggctgcaacgcctttcgattcacattgataacacccatgagttctctgcagcaccagtgattgcatggctcatgtataccagggagaccctccgaagcctgtcttacaatgtcaggacaatacccaatgtaagcattcttgaaaagtgtggtaggcaaaagctcgaagtgctagatttggaattggaccataacaccatcacaggtgtcgaaccaagctatcagaggttcacttgtctgaaatccctttccctgaggcatgtcagcattttggccttggatttgagccttttagttgctgcttgcccaagaatagagtcattagcacttgatgtccttgaggttgtcacttcagaattacagtctacgatggagctcacaagccatacattgaaaagtctatttgcaaaatcggtaggtgtagataagatcatacttgatgcagataatttggaagttctgcacctgaatgctttaaatctcgatctgtttgagcttaacgggaaaggaacactaaaacattttaagattgatgatgtcagtgttactcatttggatattggggacaatactgatcatttggaggcagtagacgtgagcaacttcacaatagtctggccaaaattctatagcatgatatccagggcatctaatttgcgtatgctacgattttggggtgttgtgtttgatgacgaggatgagatcgtggattcagaaactatagctgtttcatttcctcttcttaggcatctttcattgagttatgaattacgagatgggttacttcactacagccttcagggatcatcattactggagaatgtctcagttctggaacttggttggacagtaataagtgagcactttggaccctgggtgtttggtatgattggaaggtgtccaaatctcaagaaacttgttattcatggtgttctttctgagacaaaaacgcgagaggatcgccagatgttagcaagctttacctcattcatagtctgtgtcatgaggaagtatgtgcatgttgatgtacaatttgagtatgagtgacagctactaggttgggtgggcatcttgtcattgttcagatgaagctgtgccatcagttgcttgatactgggttcttccacattgatccacatctaggcaatatgatcagaacacctgacggagattatgttgcagaactgtatcaactccctctaattttatgttatattatatttggtaggaatttctactgggtctgaaacttgtaacatacagttttctgaagatctacgaaagatagtggatacttatcagatgagtgcttgcactgcctttcaagtcatccgactaatcgcgattagtcgggctggtcggtttagggtggccgattagggaagccgacccgatcagaacacctggtcgccctggtgttgatgaatttcagttggatgaagatctttaggtcactggtagtgtggtagtaagtgtttctttgctgttttgaacacctgcattactttagggtcattgggagctactgttttaagttggatgaacaaatgtcttttcttaaatgagtattgcagaatcaatgttttcaagtcggacgacttgctggtcgttctggctgaccgactagggcgattagtcggacgacttgggtgattaatcgtgattggtccaaaccgacttggacgattaatcgcgactaatcacgattaatcggacgacttgaaaacattgcataattcatgtcatgtttaccctttatatatagttatctactatgttatatactctatacaaatatggtcttatataccatatatactctatacatatgtcctagatgaacaagacgactagtagacgaccagggtcgaccagaggtcgattagttgacctagtcgtcgactaatcaagattagtcgcctagtcggacccctaggtcgatcagttggtcgctcgactagaaaacatagtgcattgcaaaagttactaatgcttccatccttttggaagctttgatgttgtcattttttattgaaagtggtgaagttggaagaataaatattgttgagggtgttggggtatgttacttttattttatgtatgttgtcagttagctgatcgaagggcgggcctggtgcagcggtagagcctaccgtctgtaaccggaaggtcccaggttcgagccctaatgcatattatatggataaggcttggtgcttaaagatacccttgcacagacctcgcacagtgcgggaagcctgcggcattgagtacaccttttttttgtcagttacctgatcatttgtttcaccctccccacccaagtacacaatgttgtattcatgtgagtggacaggttctaattttaagagcaatttctcgatggccattattcagattggtccactcagatgctggccaggtggattgtgggcctgtttggttcgctacctaacttgccacactttgcctaacttttctgcctaaggttagttcttcaattcgaacaactaaccttaggcaaagtgtggcgcagttagccacgaaccaaacaggccctgtgtctatcaaggtcaataggtgatattgacgtcgaggaatttatagttcctgtcccatatgtgaagcaagtaaatgtgcataacatatatgaactatttatataggtgcagtggtggaaaaggtttttcatgctaaaagattccccttgttatacaaatctgccatttttttgcttgtagcatctgcccgttttttccctgacaaacgtgtcatcaattaatttgtaaaaaaaatgatagattaagcggcgatcggcatgctctgccgtagcaccgactcgacacacgagacagcgtgtgagcagaagaccgaggtgagatttcgtacacactcatcccaaacggtctgaatcagaaggggaatcgctggcgcgtaggctatgaatactgtgagacaaaagagatttgatattttattgctagctgcagatcagagaacctgaagtatattgatttcataggtggttcttgctggatcatgtaaagctccatctcttataatagcttgaacttatacatatttggtacttgttttaaatttataatgcacaaattattgatattcgtatagatgagatgatatgatatgatccatgatgttcttctgctacttcagagctctctttgttctctgtgactgacagcaagagatgaaccaacgtgttttgttgcattgggagcagaggctggagataatcgtaggagttgccaaaggtgttgcttatctgcaaggactaagaaaggaagtgatacacagtgatctaaaaccatccgacatactcttggatgaaaactagagagctaaaattgcagattttggcaccacaaaagtgttcgtggatggccagacgaatccaacacttgtacaatagagtatggctgaaacctgacctcctcgtctgctgtttcaattcaagtacagtagaatcacttggtaacatgcatatataacatcagttagctatgatgtaagcttcctaagaatttgttttttttcatagtagtatttttccccaaactaaactgcaagataaagttgtggtaacaaagtgtaggatttatcctagccacctactctatagtgcacattttttgcttctgttctgttctccatgcgcgccaatccgtcctcaacttactgaactttttttagattaatagcttactaaactgtttatattggcaacaggggacacagggctctagagtacactgtttgagatccagtgtttcaaagtccagccaaaaatgttgaaattcaggttcagttcagaactaagtttcagttctgtctaagccatgatagtgttcaatttagttattaaataattgttgttctttggttacaaacaattgtactttttaattgttgaaacattatacttttggttaattccaaagtattaaataattgtagttgtttgatgaatttggacaatgatgatgatgatttagaatctgatccagagtttgatgaatgatgatgaagagatggtatacaatacaatcagggtaggggcaaaagtttagattgttcgaaagcaaaaaaaaataaaaaaataaaaagaagactggaccaatactagaggagctatgggacattttatcactccaggttttgtaagtacctcagaatctatggaaaaattgagactgtctaattacaagaattgaatatttgaattccagtttgattgatagttgaagtattgacgaatctgcaattgaaatcattagcctttaattgatttgggattttaagtatactgtatagatgctacattctttgtgtcacatatatgtttgctttttttatcaatatattatgacaaaaaaatgctagagtccagataaggcatgcaacgtgcgcccaattttctagtattcttcacaatgaagaggaccaagataacatggaagatgcggatgcatggactcactagtcattagttatttattttcgtgtttaccgtgcaatgttcttaacgtttcagtttgatcatttatctttattttagttaattctcggtgcaatgttaatgggatagtttttgccaatagttgcaaacataatgggtagttttcactgctaagtaccctagtcatgagcaaagcctgggtctgctactgtttgtaacccttcatgggcgtcgttgtgcgctgcagctaagatcaccggagcagctaatggcttgttcgctgcggctttaatccgactgcggctgcggcttctacagtattttctctctagggattgcagctgcaacagtattttgcagctgcaacagtggtttttgtagtgcagccgaacgcgctctaagatcaccggaaggagagtgtagtcgctgggcatgaacatgtgctggccaaacataacgagttccgaggtccgaccctaatggcgttgtgcaaggcccacaaaaatgctgggtctgctttagttgctgcttgtatgctgtgagcctgtgactaaggaagttgaacgatggtgttgagacggcaaagcaggtagcagcagtgccacattggctcattgtgcctagatagtgtgtctgccaacatgttcaagcatcctggcttatgttcaataacagagccaaagcccaggatcttacattgactctatccatcttttgtgatgtcatgttccagaaattctgattttgcaaatttatggtggctgaactgctcccccctccccaccccaccccaatacttcaaacatctctcactggtgggttaatgtaagctcaatgtaaatccaaag

SEQ ID NO: 31355 - DNA, 3869 bp, Zea Mays
acgtctcgtcagttttttcctttttcccgtggcccgtgggtgtgcgtcctaggtgtgcggcgggcggtgcgccgtgcgcctcctctcctcgccgcgacgctgccgtgttcgcgattcagcgccgtgctcgacgcccctcctctcctcagaagtcagcgccgcatctccggttgcagagacttgcgctgccacatctccgcttttcgtccttcagttgctcgacgcccctcctcccctcagaagtcagcgcagcgtctccactctccacgccggcgcgtcggcgacgcgggtccttcgaataagacggtttgttctcgcatcgggcgtcagccggattcgagggacatagatgatggaagtcgatcttgggtgccaccacgtcgaagcggcttgtgctgtgtagatccggcgaaagcgcgcaggcaaagcccgggtctgcgtcgtcattggcctcatgatcttcgtattgccatcgcgctaaagggaacgaaggcgacgaggtcttaaactttgattgatatatgcggatatgaaaatgcatgcaactacatgctagaagtctgtcttggttgtgttggagaaaaattctttgttacgtttttgttgatagcgttgagtgccaaaaatggagcttctccctgttgaagtcgttggcaacattctttcccatcttggtgttgcgcgtgatgttatgattgcctctgcggtatgccgcaagtggcgagatgcatgcaggaggcatctccgtttgctgtccttcaactccaatgactttccacgggacatgactacacgtcagttggagattgtcatcacacagactatatttcagactatggggctgcaacgcctttcgattcacattgataacacccatgagttctctgcagcaccagtgattgcatggctcatgtataccagggagaccctccgaagcctgtcttacaatgtcaggacaatacccaatgtaagcattcttgaaaagtgtggtaggcaaaagctcgaagtgctagatttggaattggaccataacaccatcacaggtgtcgaaccaagctatcagaggttcacttgtctgaaatccctttccctgaggcatgtcagcattttggccttggatttgagccttttagttgctgcttgcccaagaatagagtcattagcacttgatgtccttgaggttgtcacttcagaattacagtctacgatggagctcacaagccatacattgaaaagtctatttgcaaaatcggtaggtgtagataagatcatacttgatgcagataatttggaagttctgcacctgaatgctttaaatctcgatctgtttgagcttaacgggaaaggaacactaaaacattttaagattgatgatgtcagtgttactcatttggatattggggacaatactgatcatttggaggcagtagacgtgagcaacttcacaatagtctggccaaaattctatagcatgatatccagggcatctaatttgcgtatgctacgattttggggtgttgtgtttgatgacgaggatgagatcgtggattcagaaactatagctgtttcatttcctcttcttaggcatctttcattgagttatgaattacgagatgggttacttcactacagccttcagggatcatcattactggagaatgtctcagttctggaacttggttggacagtaataagtgagcactttggaccctgggtgtttggtatgattggaaggtgtccaaatctcaagaaacttgttattcatggtgttctttctgagacaaaaacgcgagaggatcgccagatgttagcaagctttacctcattcatagtctgtgtcatgaggaagtatgtgcatgttgatgtacaatttgagtatgagtgacagctactaggttgggtgggcatcttgtcattgttcagatgaagctgtgccatcagttgcttgatactgggttcttccacattgatccacatctaggcaatatgatcagaacacctgacggagattatgttgcagaactgtatcaactccctctaattttatgttatattatatttgcaagagatgaaccaacgtgttttgttgcattgggagcagaggctggagataatcgtaggagttgccaaaggtgttgcttatctgcaaggactaagaaaggaagtgatacacagtgatctaaaaccatccgacatactcttggatgaaaactagagagctaaaattgcagattttggcaccacaaaagtgttcgtggatggccagacgaatccaacacttgtacaatagagggacacagggctctagagtacactgtttgagatccagtgtttcaaagtccagccaaaaatgttgaaattcaggttcagttcagaactaagtttcagttctgtctaagccatgatagtgttcaatttagttattaaataattgttgttctttggttacaaacaattgtactttttaattgttgaaacattatacttttggttaattccaaagtattaaataattgtagttgtttgatgaatttggacaatgatgatgatgatttagaatctgatccagagtttgatgaatgatgatgaagagatggtatacaatacaatcagggtaggggcaaaagtttagattgttcgaaagcaaaaaaaaataaaaaaataaaaagaagactggaccaatactagaggagctatgggacattttatcactccaggttttgtaagtacctcagaatctatggaaaaattgagactgtctaattacaagaattgaatatttgaattccagtttgattgatagttgaagtattgacgaatctgcaattgaaatcattagcctttaattgatttgggattttaagtatactgtatagatgctacattctttgtgtcacatatatgtttgctttttttatcaatatattatgacaaaaaaatgctagagtccagataaggcatgcaacgtgcgcccaattttctagtattcttcacaatgaagaggaccaagataacatggaagatgcggatgcatggactcactagtcattagttatttattttcgtgtttaccgtgcaatgttcttaacgtttcagtttgatcatttatctttattttagttaattctcggtgcaatgttaatgggatagtttttgccaatagttgcaaacataatgggtagttttcactgctaagtaccctagtcatgagcaaagcctgggtctgctactgtttgtaacccttcatgggcgtcgttgtgcgctgcagctaagatcaccggagcagctaatggcttgttcgctgcggctttaatccgactgcggctgcggcttctacagtattttctctctagggattgcagctgcaacagtattttgcagctgcaacagtggtttttgtagtgcagccgaacgcgctctaagatcaccggaaggagagtgtagtcgctgggcatgaacatgtgctggccaaacataacgagttccgaggtccgaccctaatggcgttgtgcaaggcccacaaaaatgctgggtctgctttagttgctgcttgtatgctgtgagcctgtgactaaggaagttgaacgatggtgttgagacggcaaagcaggtagcagcagtgccacattggctcattgtgcctagatagtgtgtctgccaacatgttcaagcatcctggcttatgttcaataacagagccaaagcccaggatcttacattgactctatccatcttttgtgatgtcatgttccagaaattctgattttgcaaatttatggtggctgaactgctcccccctccccaccccaccccaatacttcaaacatctctcactggtgggttaatgtaagctcaatgtaaatccaaag

SEQ ID NO: 31356 - DNA, 3767 bp, Zea Mays
attatgtaaatgtaaattatggggaaatgacactttgctgacgtgatgaaagatcttccatagttgcttgatactgggttcttccacattgatccacatctaggcaatatgatcagaacacctgacggagattatgttgcagaactgtatcaactccctctaattttatgttatattatatttggtaggaatttctactgggtctgaaacttgtaacatacagttttctgaagatctacgaaagatagtggatacttatcagatgagtgcttgcactgcctttcaagtcatccgactaatcgcgattagtcgggctggtcggtttagggtggccgattagggaagccgacccgatcagaacacctggtcgccctggtgttgatgaatttcagttggatgaagatctttaggtcactggtagtgtggtagtaagtgtttctttgctgttttgaacacctgcattactttagggtcattgggagctactgttttaagttggatgaacaaatgtcttttcttaaatgagtattgcagaatcaatgttttcaagtcggacgacttgctggtcgttctggctgaccgactagggcgattagtcggacgacttgggtgattaatcgtgattggtccaaaccgacttggacgattaatcgcgactaatcacgattaatcggacgacttgaaaacattgcataattcatgtcatgtttaccctttatatatagttatctactatgttatatactctatacaaatatggtcttatataccatatatactctatacatatgtcctagatgaacaagacgactagtagacgaccagggtcgaccagaggtcgattagttgacctagtcgtcgactaatcaagattagtcgcctagtcggacccctaggtcgatcagttggtcgctcgactagaaaacatagtgcattgcaaaagttactaatgcttccatccttttggaagctttgatgttgtcattttttattgaaagtggtgaagttggaagaataaatattgttgagggtgttggggtatgttacttttattttatgtatgttgtcagttagctgatcgaagggcgggcctggtgcagcggtagagcctaccgtctgtaaccggaaggtcccaggttcgagccctaatgcatattatatggataaggcttggtgcttaaagatacccttgcacagacctcgcacagtgcgggaagcctgcggcattgagtacaccttttttttgtcagttacctgatcatttgtttcaccctccccacccaagtacacaatgttgtattcatgtgagtggacaggttctaattttaagagcaatttctcgatggccattattcagattggtccactcagatgctggccaggtggattgtgggcctgtttggttcgctacctaacttgccacactttgcctaacttttctgcctaaggttagttcttcaattcgaacaactaaccttaggcaaagtgtggcgcagttagccacgaaccaaacaggccctgtgtctatcaaggtcaataggtgatattgacgtcgaggaatttatagttcctgtcccatatgtgaagcaagtaaatgtgcataacatatatgaactatttatataggtgcagtggtggaaaaggtttttcatgctaaaagattccccttgttatacaaatctgccatttttttgcttgtagcatctgcccgttttttccctgacaaacgtgtcatcaattaatttgtaaaaaaaatgatagattaagcggcgatcggcatgctctgccgtagcaccgactcgacacacgagacagcgtgtgagcagaagaccgaggtgagatttcgtacacactcatcccaaacggtctgaatcagaaggggaatcgctggcgcgtaggctatgaatactgtgagacaaaagagatttgatattttattgctagctgcagatcagagaacctgaagtatattgatttcataggtggttcttgctggatcatgtaaagctccatctcttataatagcttgaacttatacatatttggtacttgttttaaatttataatgcacaaattattgatattcgtatagatgagatgatatgatatgatccatgatgttcttctgctacttcagagctctctttgttctctgtgactgacagcaagagatgaaccaacgtgttttgttgcattgggagcagaggctggagataatcgtaggagttgccaaaggtgttgcttatctgcaaggactaagaaaggaagtgatacacagtgatctaaaaccatccgacatactcttggatgaaaactagagagctaaaattgcagattttggcaccacaaaagtgttcgtggatggccagacgaatccaacacttgtacaatagagggacacagggctctagagtacactgtttgagatccagtgtttcaaagtccagccaaaaatgttgaaattcagagtttgatgaatgatgatgaagagatggtatacaatacaatcagggtaggggcaaaagtttagattgttcgaaagcaaaaaaaaataaaaaaataaaaagaagactggaccaatactagaggagctatgggacattttatcactccaggttttgtaagtacctcagaatctatggaaaaattgagactgtctaattacaagaattgaatatttgaattccagtttgattgatagttgaagtattgacgaatctgcaattgaaatcattagcctttaattgatttgggattttaagtatactgtatagatgctacattctttgtgtcacatatatgtttgctttttttatcaatatattatgacaaaaaaatgctagagtccagataaggcatgcaacgtgcgcccaattttctagtattcttcacaatgaagaggaccaagataacatggaagatgcggatgcatggactcactagtcattagttatttattttcgtgtttaccgtgcaatgttcttaacgtttcagtttgatcatttatctttattttagttaattctcggtgcaatgttaatgggatagtttttgccaatagttgcaaacataatgggtagttttcactgctaagtaccctagtcatgagcaaagcctgggtctgctactgtttgtaacccttcatgggcgtcgttgtgcgctgcagctaagatcaccggagcagctaatggcttgttcgctgcggctttaatccgactgcggctgcggcttctacagtattttctctctagggattgcagctgcaacagtattttgcagctgcaacagtggtttttgtagtgcagccgaacgcgctctaagatcaccggaaggagagtgtagtcgctgggcatgaacatgtgctggccaaacataacgagttccgaggtccgaccctaatggcgttgtgcaaggcccacaaaaatgctgggtctgctttagttgctgcttgtatgctgtgagcctgtgactaaggaagttgaacgatggtgttgagacggcaaagcaggtagcagcagtgccacattggctcattgtgcctagatagtgtgtctgccaacatgttcaagcatcctggcttatgttcaataacagagccaaagcccaggatcttacattgactctatccatcttttgtgatgtcatgttccagaaattctgattttgcaaatttatggtggctgaactgctcccccctccccaccccaccccaatacttcaaacatctctcactggtgggttaatgtaagctcaatgtaaatccaaag

SEQ ID NO: 31357 - DNA, 1969 bp, Zea Mays
ccatcgccaccgcccacagcgcttcctgctggtctcttgttggtcgtagaactagcagtggccatggtgcaaggcgaggagagttcttggaggatggagagggcagcgctgcctctcaaccaggcgctcgcgtacggagtccaagcccacgccgccgccgccgctgcaccgccgacctgcttcctggacttccagcctgcggccgcatccgctgcctacttcgggttcggtgagctggaggaggccctcatccacggtggtggcgccgccagcgccggcggcggcgtcgatccgggcgtgatcatcaagaacgacgtcgcgcaggccccccacgctggagatcttcccttcgtggccaatgaggcaccaacagcagctgcacagtgggaattcgcagtcagtagggagcaccggcactgactcgagctcagctcagaacacaatgtctcagatggagttggtgtccccagcctcctctgcgccgcggcaggaggtcatgatggtgaccactgatgattacagctacaagccaggcctcgccgctgcgcccgctgctgccgccccgccgagctttcagcagcaccacccgctcccgctgcagctgcacggaggagagggagggggagaccatgacaagaggaagcatggatccacaagaaaagatggcaagttggtagatgccaagacggaacggcggctggcgcagaacagagaggctgcgaggaagagcaggctgaggaagaaggcttacgtgcagcagctcgagactagcaggatcaggcttcagcaggtcgagcatgagctccagagagcacggtcacaggcgccgccatgttcgacatggagtacgcgcggtggcttgacgacgacaccaagcggctggcggagctccgaggcgggctgcaggcgcacctgctggacggcaacctgggactcatcgtggaggagtgcatgcagcactacgacgagctgttccagctcaaggcggcgctcgcgcgctccgacgtcttccacctcctcaccggctcctgggccacccccgccgagcgctgcttcttctggatgggcggcttccgcccgtccgagctgctcaagatcctgataccgcagctggacccgctgacggagcagcagctgctggggatctgcaatctgcagcagtcgtcggagcaagcggaggaagctctcgcccagggcctgcaccagctgcaccagtccctggccgacacagtcgccgcgggcacgctcaacgacggcgccgccgcccccaactacatgaacatcatggccgtcgcacttgagaagctcgccagcctcgaaaatttctatcaacaggccgacaatctaaggcaccagacgttgcatcagatgcgccggatcctgaccactcggcaggctgcgcggtgcttcctctccattggggagtactacagccgcctcagagctctcagcaacctctgggcttcccgtccccgcgacaacttcatcgggacagagagcctcagccccacagcaacggaactgcaagccctgcaccaccagcagcagaaccagttcgccggattttgaggcctcacctggtgagggagggtgtaaaactttggccgcgagggtggtgttacaaagattagaggttttgagagggagatgcattgtaatgttctatcattaaagtactgagaaagcaacatcactaggcgaaaagggcggggagaaggaattgctgtagtgcgatgttgggtggctcacctgttcatatggctcttgaactgattgaagggttagcaccgcagaatttttgtgcgtgtcaggagagaacaaatcagttacacaagattctggctgctcacttgccagagaggactaactgcaattagagtgacagattaaccattaaatacctttccaaatcaagtattttagcaaacacattgtcggtagtagactatctccaaggacaatactggac

SEQ ID NO: 31358 - DNA, 2011 bp, Zea Mays
ccatcgccaccgcccacagcgcttcctgctggtctcttgttggtcgtagaactagcagtggccatggtgcaaggcgaggagagttcttggaggatggagagggcagcgctgcctctcaaccaggcgctcgcgtacggagtccaagcccacgccgccgccgccgctgcaccgccgacctgcttcctggacttccagcctgcggccgcatccgctgcctacttcgggttcggtgagctggaggaggccctcatccacggtggtggcgccgccagcgccggcggcggcgtcgatccgggcgtgatcatcaagaacgacgtcgcgcaggcaaagtcagcggcaggatatctcgcgggcgctggcaccggcaggccccccacgctggagatcttcccttcgtggccaatgaggcaccaacagcagctgcacagtgggaattcgcagtcagtagggagcaccggcactgactcgagctcagctcagaacacaatgtctcagatggagttggtgtccccagcctcctctgcgccgcggcaggaggtcatgatggtgaccactgatgattacagctacaagccaggcctcgccgctgcgcccgctgctgccgccccgccgagctttcagcagcaccacccgctcccgctgcagctgcacggaggagagggagggggagaccatgacaagacggaacggcggctggcgcagaacagagaggctgcgaggaagagcaggctgaggaagaaggcttacgtgcagcagctcgagactagcaggatcaggcttcagcaggtcgagcatgagctccagagagcacggtcacagggcctgttcgttggagggtgcagcgccgccggggacatgagctctggcgccgccatgttcgacatggagtacgcgcggtggcttgacgacgacaccaagcggctggcggagctccgaggcgggctgcaggcgcacctgctggacggcaacctgggactcatcgtggaggagtgcatgcagcactacgacgagctgttccagctcaaggcggcgctcgcgcgctccgacgtcttccacctcctcaccggctcctgggccacccccgccgagcgctgcttcttctggatgggcggcttccgcccgtccgagctgctcaagatcctgataccgcagctggacccgctgacggagcagcagctgctggggatctgcaatctgcagcagtcgtcggagcaagcggaggaagctctcgcccagggcctgcaccagctgcaccagtccctggccgacacagtcgccgcgggcacgctcaacgacggcgccgccgcccccaactacatgaacatcatggccgtcgcacttgagaagctcgccagcctcgaaaatttctatcaacaggccgacaatctaaggcaccagacgttgcatcagatgcgccggatcctgaccactcggcaggctgcgcggtgcttcctctccattggggagtactacagccgcctcagagctctcagcaacctctgggcttcccgtccccgcgacaacttcatcgggacagagagcctcagccccacagcaacggaactgcaagccctgcaccaccagcagcagaaccagttcgccggattttgaggcctcacctggtgagggagggtgtaaaactttggccgcgagggtggtgttacaaagattagaggttttgagagggagatgcattgtaatgttctatcattaaagtactgagaaagcaacatcactaggcgaaaagggcggggagaaggaattgctgtagtgcgatgttgggtggctcacctgttcatatggctcttgaactgattgaagggttagcaccgcagaatttttgtgcgtgtcaggagagaacaaatcagttacacaagattctggctgctcacttgccagagaggactaactgcaattagagtgacagattaaccattaaatacctttccaaatcaagtattttagcaaacacattgtcggtagtagactatctccaaggacaatactggac

SEQ ID NO: 31359 - DNA, 820 bp, Zea Mays
gtacagagggcccacagccaaaatactagaggcctggtgttccatgccttgaaaaagttgcaagattcaatccatgcatagtggtcaggaaaaggacacagacacctaaaattcagccccatggacaacaagaagcctaaaataaagatggggcttgctgttccatcagaagttgttaaagaaatggccgacaatctaaggcaccagacgttgcatcagatgcgccggatcctgaccactcggcaggctgcgcggtgcttcctctccattggggagtactacagccgcctcagagctctcagcaacctctgggcttcccgtccccgcgacaacttcatcgggacagagagcctcagccccacagcaacggaactgcaagccctgcaccaccagcagcagaaccagttcgccggattttgaggcctcacctggtgagggagggtgtaaaactttggccgcgagggtggtgttacaaagattagaggttttgagagggagatgcattgtaatgttctatcattaaagtactgagaaagcaacatcactaggcgaaaagggcggggagaaggaattgctgtagtgcgatgttgggtggctcacctgttcatatggctcttgaactgattgaagggttagcaccgcagaatttttgtgcgtgtcaggagagaacaaatcagttacacaagattctggctgctcacttgccagagaggactaactgcaattagagtgacagattaaccattaaatacctttccaaatcaagtattttagcaaacacattgtcggtagtagactatctccaaggacaatactggac

SEQ ID NO: 31360 - DNA, 1504 bp, Zea Mays
ccccgcacgcatgtcaccgaacaaccgggaccgggcaattcgtccagcagcatggacgcgcctccgccctcacagccggacgatgctgctccggcgccctcctcgaccttggcttctgctccctctccggcgccaacatccaacccacccacttccgccgccgccgccgcacccgccccggactccgccatcgccaaccctaacccgaacctagtttaggcaaccttcccctgggactcagaatattgggattgttggatcactcaatacatcccagattagtccaggcacaatatctggtccgcagaagcccagacctggtcttccatcatcaactcctattccatctggtagccaaatgccaggttcacaaagacccccatctcagtctttaatgaggccggtgactgtgagttctccttcgctggcttcacaacaaactccacaaagttcgtcttcaacatttaggccccaacagaggccacaagtttcacaaccaagaccacaacaatctcaacttgttactccacctcaacagaacacaattttaacacagcagcagcagcagcagaaacaacaacagagtgcctcacatcaaaatcaacaaattgctgcccctaaaaatcagccacagctttctcagcatccaactgctcgtactccaatatcaatgacaccaaagcctgatttgcctgctatacaaaatgttgctgttttacaatctgtggatacagctgcaactgatgcaaatgctagtgaaactggtactcgattactcaccaagagaagtatacatgaattagttgcacagattgatcctaatgaaaagctggatcctgaagttgaagatgttcttattgacatcgcagaagattttgttgagtctgtcacaacttttgcttgttctttagcaaagcataggaagtcaagcacattagaagcaaaagatgtactcctacatgcagaaagaagctggaatatcaccttgccaggcttcagtggtgatgaaatcaaactgtacaagaaacagcacataaatgatattcacagggagaggcttgctctgataaagaagtccatggcgactgacacgagaaactctgctgcccaagctgcagctaaccagaaaaatcagactccgaaaccacctgccccagcttccccgtgaaacatgtccacaggccctgcaaacacagtatcagtgtaccacgcatcacatctgtggtgttcggacagttgtcggttgtatgttggtagtgttgcaatgagtacatgtatagattattctgtcgttactcgttactaggatctggttagaatgttgtttagttaatccaatgcatggtttctgttattgtatatcacttctgttctaaactataaatcatttagggctagtctaggagccacaaaacctgagtggattgaaggggttaaaatcccctcatttaattttaaataagaagggaaaatatcatatgcaatcacttatcctggtgcaagc

SEQ ID NO: 31361 - DNA, 1548 bp, Zea Mays
ccccgcacgcatgtcaccgaacaaccgggaccgggcaattcgtccagcagcatggacgcgcctccgccctcacagccggacgatgctgctccggcgccctcctcgaccttggcttctgctccctctccggcgccaacatccaacccacccacttccgccgccgccgccgcacccgccccggactccgccatcgccaaccctaacccgaacctagccgcggcctcctcggcatccgttccggccgcatcctcctcggctcctcctataccacgcggaggggttgtcctgggggtgcccgcgccgcgttccgcacagacgcccgctggttacactgggttcgttccgccgcctccgcttgctcaccagtttggatcgatgcatcgaggccccgaccagcccccaccttcatcttcacagagacccccatctcagtctttaatgaggccggtgactgtgagttctccttcgctggcttcacaacaaactccacaaagttcgtcttcaacatttaggccccaacagaggccacaagtttcacaaccaagaccacaacaatctcaacttgttactccacctcaacagaacacaattttaacacagcagcagcagcagcagaaacaacaacagagtgcctcacatcaaaatcaacaaattgctgcccctaaaaatcagccacagctttctcagcatccaactgctcgtactccaatatcaatgacaccaaagcctgatttgcctgctatacaaaatgttgctgttttacaatctgtggatacagctgcaactgatgcaaatgctagtgaaactggtactcgattactcaccaagagaagtatacatgaattagttgcacagattgatcctaatgaaaagctggatcctgaagttgaagatgttcttattgacatcgcagaagattttgttgagtctgtcacaacttttgcttgttctttagcaaagcataggaagtcaagcacattagaagcaaaagatgtactcctacatgcagaaagaagctggaatatcaccttgccaggcttcagtggtgatgaaatcaaactgtacaagaaacagcacataaatgatattcacagggagaggcttgctctgataaagaagtccatggcgactgacacgagaaactctgctgcccaagctgcagctaaccagaaaaatcagactccgaaaccacctgccccagcttccccgtgaaacatgtccacaggccctgcaaacacagtatcagtgtaccacgcatcacatctgtggtgttcggacagttgtcggttgtatgttggtagtgttgcaatgagtacatgtatagattattctgtcgttactcgttactaggatctggttagaatgttgtttagttaatccaatgcatggtttctgttattgtatatcacttctgttctaaactataaatcatttagggctagtctaggagccacaaaacctgagtggattgaaggggttaaaatcccctcatttaattttaaataagaagggaaaatatcatatgcaatcacttatcctggtgcaagc

SEQ ID NO: 31362 - DNA, 1677 bp, Zea Mays
ccccgcacgcatgtcaccgaacaaccgggaccgggcaattcgtccagcagcatggacgcgcctccgccctcacagccggacgatgctgctccggcgccctcctcgaccttggcttctgctccctctccggcgccaacatccaacccacccacttccgccgccgccgccgcacccgccccggactccgccatcgccaaccctaacccgaacctaggtaccgtcgcaaaccctgctcaaaccctagaggctcctggccccagctccgccgccgcgcggccgccgccgccgcgaatgagaacgccttacacgcacctggccgcgcccatcacgatgtcgtcctcctcctctgctgccacagccgcggcctcctcggcatccgttccggccgcatcctcctcggctcctcctataccacgcggaggggttgtcctgggggtgcccgcgccgcgttccgcacagacgcccgctggttacactgggttcgttccgccgcctccgcttgctcaccagtttggatcgatgcatcgaggccccgaccagcccccaccttcatcttcacagtctttaatgaggccggtgactgtgagttctccttcgctggcttcacaacaaactccacaaagttcgtcttcaacatttaggccccaacagaggccacaagtttcacaaccaagaccacaacaatctcaacttgttactccacctcaacagaacacaattttaacacagcagcagcagcagcagaaacaacaacagagtgcctcacatcaaaatcaacaaattgctgcccctaaaaatcagccacagctttctcagcatccaactgctcgtactccaatatcaatgacaccaaagcctgatttgcctgctatacaaaatgttgctgttttacaatctgtggatacagctgcaactgatgcaaatgctagtgaaactggtactcgattactcaccaagagaagtatacatgaattagttgcacagattgatcctaatgaaaagctggatcctgaagttgaagatgttcttattgacatcgcagaagattttgttgagtctgtcacaacttttgcttgttctttagcaaagcataggaagtcaagcacattagaagcaaaagatgtactcctacatgcagaaagaagctggaatatcaccttgccaggcttcagtggtgatgaaatcaaactgtacaagaaacagcacataaatgatattcacagggagaggcttgctctgataaagaagtccatggcgactgacacgagaaactctgctgcccaagctgcagctaaccagaaaaatcagactccgaaaccacctgccccagcttccccgtgaaacatgtccacaggccctgcaaacacagtatcagtgtaccacgcatcacatctgtggtgttcggacagttgtcggttgtatgttggtagtgttgcaatgagtacatgtatagattattctgtcgttactcgttactaggatctggttagaatgttgtttagttaatccaatgcatggtttctgttattgtatatcacttctgttctaaactataaatcatttagggctagtctaggagccacaaaacctgagtggattgaaggggttaaaatcccctcatttaattttaaataagaagggaaaatatcatatgcaatcacttatcctggtgcaagc

SEQ ID NO: 31363 - DNA, 715 bp, Zea Mays
gtttcctcaatccattttgcaaattgatcctaatgaaaagctggatcctgaagttgaagatgttcttattgacatcgcagaagattttgttgagtctgtcacaacttttgcttgttctttagcaaagcataggaagtcaagcacattagaagcaaaagatgtactcctacatgcagaaagaagctggaatatcaccttgccaggcttcagtggtgatgaaatcaaactgtacaagaaacagcacataaatgatattcacagggagaggcttgctctgataaagaagtccatggcgactgacacgagaaactctgctgcccaagctgcagctaaccagaaaaatcagactccgaaaccacctgccccagcttccccgtgaaacatgtccacaggccctgcaaacacagtatcagtgtaccacgcatcacatctgtggtgttcggacagttgtcggttgtatgttggtagtgttgcaatgagtacatgtatagattattctgtcgttactcgttactaggatctggttagaatgttgtttagttaatccaatgcatggtttctgttattgtatatcacttctgttctaaactataaatcatttagggctagtctaggagccacaaaacctgagtggattgaaggggttaaaatcccctcatttaattttaaataagaagggaaaatatcatatgcaatcacttatcctggtgcaagc

SEQ ID NO: 31364 - DNA, 5000 bp, Zea Mays
gatcagttctatttctcctcacaatccgccccatatcataaagcccaaccccacttcccgtttttcatgcgcgtgagggggtgtggtgttcttccgttcggttagctcgtagccgccgccgtccgtagttccctctccgcgcgtggccgccggtcccgcggcttcctcctcccgtgcgtggctgtggcgccggtcccgcggcttcctcctgagcgggcctgctcttcccgtcaggcctccgcacccacggccggatctcttcctctcgtctccacggccgccttcctaggacagccgttgcccgcgcggtgcccgcagccgcctcgtcggcgcaacgctctcttcctccccagtccctccatcggaaccaccctaagcttccttagcccattcggttctaccgaaagaatccccatcctctgtcgcgtccgccacctcctctgcggcttaccagccggactcctcaagcctcccgcttagccccctcgccggtgatggccgcggccccgccggtagccggagaagatattaaagacggcgttgaggtgtgcctgttcgatgaatcagcagatgggttctcgagaactgtgcgcgccatctcggagctcgtcgacatagagcccgaaacagacttccctgaggcggaagttgagcggctctcctcctcaataacgttcctcagagaatggaggcacttctcgtatgagccaaaaagtgtaacattcactaatggcaccgagtccacttcatatagagatgacatgcacagtgtaactttaccacagttttcatctgcttctgttccccagattacacctcaggaagaccgaggggataatacggtcagctttgattttattctatatgcgggggggaatgtctgggccttggactggtgccctaggttgtgcgacaagcctgactcttctataaactgtgagtatcttgctgtttctgcgcatcctcctggttcttcttaccataaacttggcatgcccttaaccgggagaggtatcattcaagtttggtgtctgttagcaccatttgaagattcacattctcaccagccagtgaatgcattcaataatggtaagcaaagaggaaggcctagaaaaataccttgtagtgataagctggtacctgttccaaaaggaccaagggggaggccaaaaaagagatcttacgatgatcagttagaacctgttccgaaaagaccaaggggcagaccaagaaagtatccattaccagttgcaaaatttgaaggttcatctcaaaacggtgaaagtcaggatattattctttttgatcccctttctacttcaagttttattccagatgacctttcattggcttctgtcatgccaactgaaaagtctgtgcaatcaacacctaaaagaggcgctgatgttgaattagggaaagagacaacttgtcagactgcttcatttggctgcagtttggaccacactgcttgcacagagtttaatgccaagttatgtattgttgcagttgatgcagcattgccacctattgacaaactgacctgttcacctggtactgtatcaggagatgtgtgtacagccccaactctaacaactgcaatctgtacaaaacctaagagaccacgggggagacctcgaaagtatccagttcaaatcaatggtagatctgtttcaggcactgttgctgaattaggacaagagtcaacttgtcagccagtttcatttggccacactgtttgcacagagtttaatgctaatttaagtattgttccagttgatgcagcattgccaattgtcgacaaactgtgcagttcatctggtactgtagtaaaagaaagtgtgtgtaccgaaccatctccagcaactgcaactcgtaagcaaccaaagagaacacgggggatgcctcgaaagtattcagacactatgattgacctggggaaagatacaactggtcatcctgttttatttggacgcagtatggatcacactgcttgcacagagtctaactctagttttagcattgttgcagttgatgcatcatcactgtttgcatcttcatctactgcaacttgtgatgataagtcaaaaggtcagagcattagagggaaagataagaagaaaacaatttctaatgctctatattgccctgtggtttctggtgttgaatcacagagcatttgttccacagaaattcttccaaatgatcctgcagtctctgttgagaatgctttgccatctgcacagaacacggtatcaatgaatgagctttgttcggctagcttgttaaaccgtgagggtaatgcgtgtaaaagtgctctttcagatgattctgaactgcctatccacatttcacctaaatcaagtaataaaagagagtcaagtggcaggaggggaagaggaaggcctaaaacgataccactttctgctggaactggtcattttgtggcttctgttgccagtctcccaaagacaacctgtgtactgactagttcaagcaatctcacgtcgttgaacaagagtggtggcaaatttatagtaagtagcgttagttcatgtggctgtgatgttgagaaatgcagtgttcattcaggtgttttgttgtctgatgatgcaccaccagcacatggcttacaaaatacaaattgtaaggaagaatcgaataccaaaataggaaaagcgggatctagaaataagcctgttgcagttgagcacaatcattttactgatcttaatgtaaaagaacaaaaagtgcagacaactccaatgtcaggtgatcctgtgatcttggttgaaaattgtatggaaggacaaggccccagaaaggctggggggcaacttcaaaggatacctgcttcaaacaagagtagtggcgcatctgttggtggtggaacatataaaatagagacattatccacaccaatgactaaaggatcatctaaaaataatgacatggcttatggggctggtttgaatcagtctcagaatgcaattgttggttgtgaaggcatggaagttattgaaagcaacactgccaattatacttctcattgtaatgaaaatgcacgagcaaatcaagttgcacccagtttcaagaacagtgatagggtcattgatgaaacggaagctgcggaacttgggccactcaaggaaccaagggaagatgacaatttgtttacttgtgtaaactcaaactcagcttcaattacaagtgacattgctcaaccaagagttgtcttgtgtttagctcacaacggcaaagtcgcttgggacatcaaatggaagcctcctttactaagtcaacctgaacagaaatcacgacttggttttcttgcagtattgttggggaatggcgctcttgaagtgtgggaagttccatcaccatgtatgatccagaaaatatattccccctctaaggtggagggttctgaccctcgttttctaaagctccaacctgtatttaggtgtgtcaaagtgaagtgcaggaacaggcaaagttgattggtcaccttctcctcctcatgatatgatattggcgggttgtcatgatggaacggttgctttatggaacttctcgatgaatttgccaacacaagattcaaaaccttttatgtgtgtcactgctgattctgttcccattagagctctctcttgggcaccatatataagtgaagaaagcacagatacctttgtcactgctggagaggatggtctaaagttctgggatttaagagatccataccatcctctttgggagctaactactgctccaagggctgtattaagtcttcattggctaaaagatggaagggggatcattatctcactggaagatggtacattgaagtttctaagcttgcctcggattgcaaatgatgttccagccactggaaggccattttccggaacaaaaactcagggtgttgcaacttatcagttgtcagaatatttgatttggagtgtccatgcttcagaacctacaggttgtgtggcttactgtggggcagatggtactgctgtgtacttccagctaaaatcgagattctgggataaggagcctgggcgtaaccgtgttccttatttcctctgtggatcattatcagaggatggagaaaatattaagattggcagcaggctgcaaacatctccattaccaaatgtgcctgtggggaccaaaaagggttcaaaaccatcccaaagtatagttcaggcgcttgctacaagcgatgtcactagcctgctgacatatcagctcaactcccccacaggaaacaatgatgccgtaaatctagaagctcatgatgatcaagatgatggacgcagcaaagagcaaggagcaggtgctgtaaatcaagaacttgatggtgaacaagatgatggacaccgtgaagaacaagcagcaggcatggtaaccacagaatttggcgatgatcaagccgatggacacagcgaagaacaaggagctggtgcaataatctcagccactcctgcaaaggaagagaatgatggaacatggaacgacaagggtgttcaatcccctaaagaccttaatgtcgtccctccgaattctgtcgctttgaatcaagtgcggtggaacatgaacaagggtagccagagatggctgtgctatggaggtgctgcaggcatcatacgatgccagagaatctgaagagccgcaatctggaatgctcttcgagaaacagaggcttgtcacacagatggtgaacatgatgcattcgggaggaaataataaatgccatagtgctcgagattctggtttcctgatgtggttcctggacgctgacatgctattgtactgagttgtatcgaatttcgtgatgtgatcatgtgatttatggtcgctgacactattctacacccgcttcgtctcggaacaaagttaattgaactatatcccatcacgacactcgagtcttctgagcgcttagcgtctctctcaaatagatcaggtttctttgcaagctacctgttctgagctag

SEQ ID NO: 31365 - DNA, 5014 bp, Zea Mays
gatcagttctatttctcctcacaatccgccccatatcataaagcccaaccccacttcccgtttttcatgcgcgtgagggggtgtggtgttcttccgttcggttagctcgtagccgccgccgtccgtagttccctctccgcgcgtggccgccggtcccgcggcttcctcctcccgtgcgtggctgtggcgccggtcccgcggcttcctcctgagcgggcctgctcttcccgtcaggcctccgcacccacggccggatctcttcctctcgtctccacggccgccttcctaggacagccgttgcccgcgcggtgcccgcagccgcctcgtcggcgcaacgctctcttcctccccagtccctccatcggaaccaccctaagcttccttagcccattcggttctaccgaaagaatccccatcctctgtcgcgtccgccacctcctctgcggcttaccagccggactcctcaagcctcccgcttagccccctcgccggtgatggccgcggccccgccggtagccggagaagatattaaagacggcgttgaggtgtgcctgttcgatgaatcagcagatgggttctcgagaactgtgcgcgccatctcggagctcgtcgacatagagcccgaaacagacttccctgaggcggaagttgagcggctctcctcctcaataacgttcctcagagaatggaggcacttctcgtatgagccaaaaagtgtaacattcactaatggcaccgagtccacttcatatagagatgacatgcacagtgtaactttaccacagttttcatctgcttctgttccccagattacacctcaggaagaccgaggggataatacggtcagctttgattttattctatatgcgggggggaatgtctgggccttggactggtgccctaggttgtgcgacaagcctgactcttctataaactgtgagtatcttgctgtttctgcgcatcctcctggttcttcttaccataaacttggcatgcccttaaccgggagaggtatcattcaagtttggtgtctgttagcaccatttgaagattcacattctcaccagccagtgaatgcattcaataatggtaagcaaagaggaaggcctagaaaaataccttgtagtgataagctggtacctgttccaaaaggaccaagggggaggccaaaaaagagatcttacgatgatcagttagaacctgttccgaaaagaccaaggggcagaccaagaaagtatccattaccagttgcaaaatttgaaggttcatctcaaaacggtgaaagtcaggatattattctttttgatcccctttctacttcaagttttattccagatgacctttcattggcttctgtcatgccaactgaaaagtctgtgcaatcaacacctaaaagaggcgctgatgttgaattagggaaagagacaacttgtcagactgcttcatttggctgcagtttggaccacactgcttgcacagagtttaatgccaagttatgtattgttgcagttgatgcagcattgccacctattgacaaactgacctgttcacctggtactgtatcaggagatgtgtgtacagccccaactctaacaactgcaatctgtacaaaacctaagagaccacgggggagacctcgaaagtatccagttcaaatcaatggtagatctgtttcaggcactgttgctgaattaggacaagagtcaacttgtcagccagtttcatttggccacactgtttgcacagagtttaatgctaatttaagtattgttccagttgatgcagcattgccaattgtcgacaaactgtgcagttcatctggtactgtagtaaaagaaagtgtgtgtaccgaaccatctccagcaactgcaactcgtaagcaaccaaagagaacacgggggatgcctcgaaagtattcagacactatgattgacctggggaaagatacaactggtcatcctgttttatttggacgcagtatggatcacactgcttgcacagagtctaactctagttttagcattgttgcagttgatgcatcatcactgtttgcatcttcatctactgcaacttgtgatgataagtcaaaaggtcagagcattagagggaaagataagaagaaaacaatttctaatgctctatattgccctgtggtttctggtgttgaatcacagagcatttgttccacagaaattcttccaaatgatcctgcagtctctgttgagaatgctttgccatctgcacagaacacggtatcaatgaatgagctttgttcggctagcttgttaaaccgtgagggtaatgcgtgtaaaagtgctctttcagatgattctgaactgcctatccacatttcacctaaatcaagtaataaaagagagtcaagtggcaggaggggaagaggaaggcctaaaacgataccactttctgctggaactggtcattttgtggcttctgttgccagtctcccaaagacaacctgtgtactgactagttcaagcaatctcacgtcgttgaacaagagtggtggcaaatttatagtaagtagcgttagttcatgtggctgtgatgttgagaaatgcagtgttcattcaggtgttttgttgtctgatgatgcaccaccagcacatggcttacaaaatacaaattgtaaggaagaatcgaataccaaaataggaaaagcgggatctagaaataagcctgttgcagttgagcacaatcattttactgatcttaatgtaaaagaacaaaaagtgcagacaactccaatgtcaggtgatcctgtgatcttggttgaaaattgtatggaaggacaaggccccagaaaggctggggggcaacttcaaaggatacctgcttcaaacaagagtagtggcgcatctgttggtggtggaacatataaaatagagacattatccacaccaatgactaaaggatcatctaaaaataatgacatggcttatggggctggtttgaatcagtctcagaatgcaattgttggttgtgaaggcatggaagttattgaaagcaacactgccaattatacttctcattgtaatgaaaatgcacgagcaaatcaagttgcacccagtttcaagaacagtgatagggtcattgatgaaacggaagctgcggaacttgggccactcaaggaaccaagggaagatgacaatttgtttacttgtgtaaactcaaactcagcttcaattacaagtgacattgctcaaccaagagttgtcttgtgtttagctcacaacggcaaagtcgcttgggacatcaaatggaagcctcctttactaagtcaacctgaacagaaatcacgacttggttttcttgcagtattgttggggaatggcgctcttgaagtgtgggaagttccatcaccatgtatgatccagaaaatatattccccctctaaggtggagggttctgaccctcgttttctaaagctccaacctgtatttaggtgtgtcaaagtgaagtgcaggaacaggcaaagcattcccttgacagttgattggtcaccttctcctcctcatgatatgatattggcgggttgtcatgatggaacggttgctttatggaacttctcgatgaatttgccaacacaagattcaaaaccttttatgtgtgtcactgctgattctgttcccattagagctctctcttgggcaccatatataagtgaagaaagcacagatacctttgtcactgctggagaggatggtctaaagttctgggatttaagagatccataccatcctctttgggagctaactactgctccaagggctgtattaagtcttcattggctaaaagatggaagggggatcattatctcactggaagatggtacattgaagtttctaagcttgcctcggattgcaaatgatgttccagccactggaaggccattttccggaacaaaaactcagggtgttgcaacttatcagttgtcagaatatttgatttggagtgtccatgcttcagaacctacaggttgtgtggcttactgtggggcagatggtactgctgtgtacttccagctaaaatcgagattctgggataaggagcctgggcgtaaccgtgttccttatttcctctgtggatcattatcagaggatggagaaaatattaagattggcagcaggctgcaaacatctccattaccaaatgtgcctgtggggaccaaaaagggttcaaaaccatcccaaagtatagttcaggcgcttgctacaagcgatgtcactagcctgctgacatatcagctcaactcccccacaggaaacaatgatgccgtaaatctagaagctcatgatgatcaagatgatggacgcagcaaagagcaaggagcaggtgctgtaaatcaagaacttgatggtgaacaagatgatggacaccgtgaagaacaagcagcaggcatggtaaccacagaatttggcgatgatcaagccgatggacacagcgaagaacaaggagctggtgcaataatctcagccactcctgcaaaggaagagaatgatggaacatggaacgacaagggtgttcaatcccctaaagaccttaatgtcgtccctccgaattctgtcgctttgaatcaagtgcggtggaacatgaacaagggtagccagagatggctgtgctatggaggtgctgcaggcatcatacgatgccagagaatctgaagagccgcaatctggaatgctcttcgagaaacagaggcttgtcacacagatggtgaacatgatgcattcgggaggaaataataaatgccatagtgctcgagattctggtttcctgatgtggttcctggacgctgacatgctattgtactgagttgtatcgaatttcgtgatgtgatcatgtgatttatggtcgctgacactattctacacccgcttcgtctcggaacaaagttaattgaactatatcccatcacgacactcgagtcttctgagcgcttagcgtctctctcaaatagatcaggtttctttgcaagctacctgttctgagctag

SEQ ID NO: 31366 - DNA, 5582 bp, Zea Mays
gatcagttctatttctcctcacaatccgccccatatcataaagcccaaccccacttcccgtttttcatgcgcgtgagggggtgtggtgttcttccgttcggttagctcgtagccgccgccgtccgtagttccctctccgcgcgtggccgccggtcccgcggcttcctcctcccgtgcgtggctgtggcgccggtcccgcggcttcctcctgagcgggcctgctcttcccgtcaggcctccgcacccacggccggatctcttcctctcgtctccacggccgccttcctaggacagccgttgcccgcgcggtgcccgcagccgcctcgtcggcgcaacgctctcttcctccccagtccctccatcggaaccaccctaagcttccttagcccattcggttctaccgaaagaatccccatcctctgtcgcgtccgccacctcctctgcggcttaccagccggactcctcaagcctcccgcttagccccctcgccggtgatggccgcggccccgccggtagccggagaagatattaaagacggcgttgaggtgtgcctgttcgatgaatcagcagatgggttctcgagaactgtgcgcgccatctcggagctcgtcgacatagagcccgaaacagacttccctgaggcggaagttgagcggctctcctcctcaataacgttcctcagagaatggaggcacttctcgtatgagccaaaaagtgtaacattcactaatggcaccgagtccacttcatatagagatgacatgcacagtgtaactttaccacagttttcatctgcttctgttccccagattacacctcaggaagaccgaggggataatacggtcagctttgattttattctatatgcgggggggaatgtctgggccttggactggtgccctaggttgtgcgacaagcctgactcttctataaactgtgagtatcttgctgtttctgcgcatcctcctggttcttcttaccataaacttggcatgcccttaaccgggagaggtatcattcaagtttggtgtctgttagcaccatttgaagattcacattctcaccagccagtgaatgcattcaataatggtaagcaaagaggaaggcctagaaaaataccttgtagtgataagctggtacctgttccaaaaggaccaagggggaggccaaaaaagagatcttacgatgatcagttagaacctgttccgaaaagaccaaggggcagaccaagaaagtatccattaccagttgcaaaatttgaaggttcatctcaaaacggtgaaagtcaggatattattctttttgatcccctttctacttcaagttttattccagatgacctttcattggcttctgtcatgccaactgaaaagtctgtgcaatcaacacctaaaagaggtagagggcgacctaggaaaaacccaagtgacaaactgacagactcatctggtattgtatcagaagatgtgtgtacagccctacctccaacaactgcaatctctacaaaacctaaaagaccacgggggaggcctcgaaaatatccaattccaatgaatgatggatctgtttcaggcgctgatgttgaattagggaaagagacaacttgtcagactgcttcatttggctgcagtttggaccacactgcttgcacagagtttaatgccaagttatgtattgttgcagttgatgcagcattgccacctattgacaaactgacctgttcacctggtactgtatcaggagatgtgtgtacagccccaactctaacaactgcaatctgtacaaaacctaagagaccacgggggagacctcgaaagtatccagttcaaatcaatggtagatctgtttcaggcactgttgctgaattaggacaagagtcaacttgtcagccagtttcatttggccacactgtttgcacagagtttaatgctaatttaagtattgttccagttgatgcagcattgccaattgtcgacaaactgtgcagttcatctggtactgtagtaaaagaaagtgtgtgtaccgaaccatctccagcaactgcaactcgtaagcaaccaaagagaacacgggggatgcctcgaaagtattcagacactatgattgacctggggaaagatacaactggtcatcctgttttatttggacgcagtatggatcacactgcttgcacagagtctaactctagttttagcattgttgcagttgatgcatcatcactgtttgcatcttcatctactgcaacttgtgatgataagtcaaaaggtcagagcattagagggaaagataagaagaaaacaatttctaatgctctatattgccctgtggtttctggtgttgaatcacagagcatttgttccacagaaattcttccaaatgatcctgcagtctctgttgagaatgctttgccatctgcacagaacacggtatcaatgaatgagctttgttcggctagcttgttaaaccgtgagggtaatgcgtgtaaaagtgctctttcagatgattctgaactgcctatccacatttcacctaaatcaagtaataaaagagagtcaagtggcaggaggggaagaggaaggcctaaaacgataccactttctgctggaactggtcattttgtggcttctgttgccagtctcccaaagacaacctgtgtactgactagttcaagcaatctcacgtcgttgaacaagagtggtggcaaatttatagtaagtagcgttagttcatgtggctgtgatgttgagaaatgcagtgttcattcaggtgttttgttgtctgatgatgcaccaccagcacatggcttacaaaatacaaattgtaaggaagaatcgaataccaaaataggaaaagcgggatctagaaataagcctgttgcagttgagcacaatcattttactgatcttaatgtaaaagaacaaaaagtgcagacaactccaatgtcaggtgatcctgtgatcttggttgaaaattgtatggaaggacaaggccccagaaaggctggggggcaacttcaaaggatacctgcttcaaacaagagtagtggcgcatctgttggtggtggaacatataaaatagagacattatccacaccaatgactaaaggatcatctaaaaataatgacatggcttatggggctggtttgaatcagtctcagaatgcaattgttggttgtgaaggcatggaagttattgaaagcaacactgccaattatacttctcattgtaatgaaaatgcacgagcaaatcaagttgcacccagtttcaagaacagtgatagggtcattgatgaaacggaagctgcggaacttgggccactcaaggaaccaagggaagatgacaatttgtttacttgtgtaaactcaaactcagcttcaattacaagtgacattgctcaaccaagagttgtcttgtgtttagctcacaacggcaaagtcgcttgggacatcaaatggaagcctcctttactaagtcaacctgaacagaaatcacgacttggttttcttgcagtattgttggggaatggcgctcttgaagtgtgggaagttccatcaccatgtatgatccagaaaatatattccccctctaaggtggagggttctgaccctcgttttctaaagctccaacctgtatttaggtgtgtcaaagtgaagtgcaggaacaggcaaagcatgaatattctttttgaagccatgacctctttataatggtaaacagcattcccttgacagttgattggtcaccttctcctcctcatgatatgatattggcgggttgtcatgatggaacggttgctttatggaacttctcgatgaatttgccaacacaagattcaaaaccttttatgtgtgtcactgctgattctgttcccattagagctctctcttgggcaccatatataagtgaagaaagcacagatacctttgtcactgctggagaggatggtctaaagttctgggatttaagagatccataccatcctctttgggagctaactactgctccaagggctgtattaagtcttcattggctaaaagatggaagggggatcattatctcactggaagatggtacattgaagtttctaagcttgcctcggattgcaaatgatgttccagccactggaaggccattttccggaacaaaaactcagggtgttgcaacttatcagttgtcagaatatttgatttggagtgtccatgcttcagaacctacaggttgtgtggcttactgtggggcagatggtactgctgtgtacttccagctaaaatcgagattctgggataaggagcctgggcgtaaccgtgttccttatttcctctgtggatcattatcagaggatggagaaaatattaagattggcagcaggctgcaaacatctccattaccaaatgtgcctgtggggaccaaaaagggttcaaaaccatcccaaagtatagttcaggcgcttgctacaagcgatgtcactagcctgctgacatatcagctcaactcccccacaggaaacaatgatgccgtaaatctagaagctcatgatgatcaagatgatggacgcagcaaagagcaaggagcaggtgctgtaaatcaagaacttgatggtgaacaagatgatggacaccgtgaagaacaagcagcaggcatggtaaccacagaatttggcgatgatcaagccgatggacacagcgaagaacaaggagctggtgcaataatctcagccactcctgcaaaggaagagaatgatggaacatggaacgacaagggtgttcaatcccctaaagaccttaatgtcgtccctccgaattctgtcgctttgaatcaagtgcggtggaacatgaacaagggtagccagagatggctgtgctatggaggtgctgcaggcatcatacgatgccagagaatctgaagagccgcaatctggaatgctcttcgagaaacagaggcttgtcacacagatggtggtaggttctactctattcttttctgctacttttgaccgggtcgccgagggtggttggcttagctgtgcataggggagaaccgatgcaatagacctttgcatcttagaattgcagtccccaggttctgaatacatatggtatggaacctgggtcctgatagttgcggtagtaccagtgcatgcgaacctgagcttttgcgttccattctgtgtaagggcttgttcgtttgtctaggaatggatttggaatcgtttcagctaatcaaaacttatataacttagagaagaaatccagctagaaattgttccctaatgtggttcctaactgttaccttatgatgtgaacagaacatgatgcattcgggaggaaataataaatgccatagtgctcgagattctggtttcctgatgtggttcctggacgctgacatgctattgtactgagttgtatcgaatttcgtgatgtgatcatgtgatttatggtcgctgacactattctacacccgcttcgtctcggaacaaagttaattgaactatatcccatcacgacactcgagtcttctgagcgcttagcgtctctctcaaatagatcaggtttctttgcaagctacctgttctgagctag

SEQ ID NO: 31367 - DNA, 4766 bp, Zea Mays
gatcagttctatttctcctcacaatccgccccatatcataaagcccaaccccacttcccgtttttcatgcgcgtgagggggtgtggtgttcttccgttcggttagctcgtagccgccgccgtccgtagttccctctccgcgcgtggccgccggtcccgcggcttcctcctcccgtgcgtggctgtggcgccggtcccgcggcttcctcctgagcgggcctgctcttcccgtcaggcctccgcacccacggccggatctcttcctctcgtctccacggccgccttcctaggacagccgttgcccgcgcggtgcccgcagccgcctcgtcggcgcaacgctctcttcctccccagtccctccatcggaaccaccctaagcttccttagcccattcggttctaccgaaagaatccccatcctctgtcgcgtccgccacctcctctgcggcttaccagccggactcctcaagcctcccgcttagccccctcgccggtgatggccgcggccccgccggtagccggagaagatattaaagacggcgttgaggtgtgcctgttcgatgaatcagcagatgggttctcgagaactgtgcgcgccatctcggagctcgtcgacatagagcccgaaacagacttccctgaggcggaagttgagcggctctcctcctcaataacgttcctcagagaatggaggcacttctcgtatgagccaaaaagtgtaacattcactaatggcaccgagtccacttcatatagagatgacatgcacagtgtaactttaccacagttttcatctgcttctgttccccagattacacctcaggaagaccgaggggataatacggtcagctttgattttattctatatgcgggggggaatgtctgggccttggactggtgccctaggttgtgcgacaagcctgactcttctataaactgtgagtatcttgctgtttctgcgcatcctcctggttcttcttaccataaacttggcatgcccttaaccgggagaggtatcattcaagtttggtgtctgttagcaccatttgaagattcacattctcaccagccagtgaatgcattcaataatggtaagcaaagaggaaggcctagaaaaataccttgtagtgataagctggtacctgttccaaaaggaccaagggggaggccaaaaaagagatcttacgatgatcagttagaacctgttccgaaaagaccaaggggcagaccaagaaagtatccattaccagttgcaaaatttgaaggttcatctcaaaacggtgaaagtcaggatattattctttttgatcccctttctacttcaagttttattccagatgacctttcattggcttctgtcatgccaactgaaaagtctgtgcaatcaacacctaaaagaggcgctgatgttgaattagggaaagagacaacttgtcagactgcttcatttggctgcagtttggaccacactgcttgcacagagtttaatgccaagttatgtattgttgcagttgatgcagcattgccacctattgacaaactgacctgttcacctggtactgtatcaggagatgtgtgtacagccccaactctaacaactgcaatctgtacaaaacctaagagaccacgggggagacctcgaaagtatccagttcaaatcaatggtagatctgtttcaggcactgttgctgaattaggacaagagtcaacttgtcagccagtttcatttggccacactgtttgcacagagtttaatgctaatttaagtattgttccagttgatgcagcattgccaattgtcgacaaactgtgcagttcatctggtactgtagtaaaagaaagtgtgtgtaccgaaccatctccagcaactgcaactcgtaagcaaccaaagagaacacgggggatgcctcgaaagtattcagacactatgattgacctggggaaagatacaactggtcatcctgttttatttggacgcagtatggatcacactgcttgcacagagtctaactctagttttagcattgttgcagttgatgcatcatcactgtttgcatcttcatctactgcaacttgtgatgataagtcaaaagatgattctgaactgcctatccacatttcacctaaatcaagtaataaaagagagtcaagtggcaggaggggaagaggaaggcctaaaacgataccactttctgctggaactggtcattttgtggcttctgttgccagtctcccaaagacaacctgtgtactgactagttcaagcaatctcacgtcgttgaacaagagtggtggcaaatttatagtaagtagcgttagttcatgtggctgtgatgttgagaaatgcagtgttcattcaggtgttttgttgtctgatgatgcaccaccagcacatggcttacaaaatacaaattgtaaggaagaatcgaataccaaaataggaaaagcgggatctagaaataagcctgttgcagttgagcacaatcattttactgatcttaatgtaaaagaacaaaaagtgcagacaactccaatgtcaggtgatcctgtgatcttggttgaaaattgtatggaaggacaaggccccagaaaggctggggggcaacttcaaaggatacctgcttcaaacaagagtagtggcgcatctgttggtggtggaacatataaaatagagacattatccacaccaatgactaaaggatcatctaaaaataatgacatggcttatggggctggtttgaatcagtctcagaatgcaattgttggttgtgaaggcatggaagttattgaaagcaacactgccaattatacttctcattgtaatgaaaatgcacgagcaaatcaagttgcacccagtttcaagaacagtgatagggtcattgatgaaacggaagctgcggaacttgggccactcaaggaaccaagggaagatgacaatttgtttacttgtgtaaactcaaactcagcttcaattacaagtgacattgctcaaccaagagttgtcttgtgtttagctcacaacggcaaagtcgcttgggacatcaaatggaagcctcctttactaagtcaacctgaacagaaatcacgacttggttttcttgcagtattgttggggaatggcgctcttgaagtgtgggaagttccatcaccatgtatgatccagaaaatatattccccctctaaggtggagggttctgaccctcgttttctaaagctccaacctgtatttaggtgtgtcaaagtgaagtgcaggaacaggcaaagttgattggtcaccttctcctcctcatgatatgatattggcgggttgtcatgatggaacggttgctttatggaacttctcgatgaatttgccaacacaagattcaaaaccttttatgtgtgtcactgctgattctgttcccattagagctctctcttgggcaccatatataagtgaagaaagcacagatacctttgtcactgctggagaggatggtctaaagttctgggatttaagagatccataccatcctctttgggagctaactactgctccaagggctgtattaagtcttcattggctaaaagatggaagggggatcattatctcactggaagatggtacattgaagtttctaagcttgcctcggattgcaaatgatgttccagccactggaaggccattttccggaacaaaaactcagggtgttgcaacttatcagttgtcagaatatttgatttggagtgtccatgcttcagaacctacaggttgtgtggcttactgtggggcagatggtactgctgtgtacttccagctaaaatcgagattctgggataaggagcctgggcgtaaccgtgttccttatttcctctgtggatcattatcagaggatggagaaaatattaagattggcagcaggctgcaaacatctccattaccaaatgtgcctgtggggaccaaaaagggttcaaaaccatcccaaagtatagttcaggcgcttgctacaagcgatgtcactagcctgctgacatatcagctcaactcccccacaggaaacaatgatgccgtaaatctagaagctcatgatgatcaagatgatggacgcagcaaagagcaaggagcaggtgctgtaaatcaagaacttgatggtgaacaagatgatggacaccgtgaagaacaagcagcaggcatggtaaccacagaatttggcgatgatcaagccgatggacacagcgaagaacaaggagctggtgcaataatctcagccactcctgcaaaggaagagaatgatggaacatggaacgacaagggtgttcaatcccctaaagaccttaatgtcgtccctccgaattctgtcgctttgaatcaagtgcggtggaacatgaacaagggtagccagagatggctgtgctatggaggtgctgcaggcatcatacgatgccagagaatctgaagagccgcaatctggaatgctcttcgagaaacagaggcttgtcacacagatggtgaacatgatgcattcgggaggaaataataaatgccatagtgctcgagattctggtttcctgatgtggttcctggacgctgacatgctattgtactgagttgtatcgaatttcgtgatgtgatcatgtgatttatggtcgctgacactattctacacccgcttcgtctcggaacaaagttaattgaactatatcccatcacgacactcgagtcttctgagcgcttagcgtctctctcaaatagatcaggtttctttgcaagctacctgttctgagctag

SEQ ID NO: 31368 - DNA, 815 bp, Zea Mays
agcattatgttggcccttttgcttactccatttgcatgatgccaggacatttattgagacagcatgcctaagataaagacaagtcgtgtcaagtatcctgaaggatgggagcttattgaaccaaccatccgtgagttggatgccaaaatgagagaagctgaaaatgatccacatgatggaaagagaaagtgtgaagcgctctggcctattttccgtatttctcatcaaaggagccgctacatatatgatctttactacagaaggaaggagatatcacgggagctttatgagttctgcctggaccagagctatgcagaccgtaacctgatcgcaaagtggaaaaaggatacgagcgcctttgctgccttcggtgcatacagacacgtgaccacaactttgcaacgacttgtgtctgccgagtccccaagcatctgagggaggagcaagtgatagaatgtgtccattgcggctgcaggggttgtgccagcggtgactaatcttgtcatcatgttgttgggctcacgactcatcatcaccatcctaaccacattagatgtctcgtgagcatggatcggctatggtgattagcatgaatgtgttgtggtaactagttggaagactaaatttcctgacgtttggatgtttgcaactgctatgtactataaagactcctcgtgccacaaatgtttttgttaaattagtagcgcttttgcatcttgtatgattctgtaaattgtcttttatcaccaattgctcaggagccaagctagtacattgctcgaatccttattgagccccagccccggttctatttt

SEQ ID NO: 31369 - DNA, 906 bp, Zea Mays
agcattatgttggcccttttgcttactccatttgcatgatgccaggacatttattgagacagcatgcctaagataaagacaagtcgtgtcaagtatcctgaaggatgggagcttattgaaccaaccatccgtgagttggatgccaaaatgagagaagctgaaaatgatccacatgatggaaagagaaagtgtgaagcgctctggcctattttccgtatttctcatcaaaggagccgctacatatatgatctttactacagaaggaaggagatatcacgggagctttatgagttctgcctggaccagagctatgcagaccgtaacctgatcgcaaagtggaaaaagccaggatacgagcgcctttgctgccttcggtgcatacagacacgtgaccacaactttgcaacgacttgtgtctgccgagtccccaagcatctgagggaggagcaagtgatagaatgtgtccattgcggctgcaggggttgtgccagcggtgactaatcttgtcatcatgttgttgggctcacgactcatcatcaccatcctaaccacattagatgtctcgtgagcatggatcggctatggtgattagcatgaatgggttgtgccagcggtgactaatcttgtcatcatgttgttgggctcacgactcatcatcaccatcctgaccacattggatgtctcgtgagcatggatcggctacggtgattagcatgaatgtgttgtggtaactagtgggaagactaaatttcctgacgtttggatgtttccaactgctatgtactataaagattcctcgtgccacaaatgtttacgttaaattagtagcgcttttgcatcttgtatgattctgtaaattgtttttttatcaccaattgctcaggagccaggctagtacattgctcg

SEQ ID NO: 31370 - DNA, 1018 bp, Zea Mays
aaataggtgttttacgttttagggttgtaaaaaaacttcttccatatctcggccgaggcttcctctgctcgggatcgaccgcgagagcttcgctccaccccgcgcggccgcgcctgccgcctgcgctagccggaggtcggccagccgccccagcctcaacagtcgcacagccgccgccgaggcaaactcgaagccaccccgccgccgcagccacagccgcgccgagcttgagccgtcgttgctccgctgaatcgcccccatcgtctctcctgaagagagaggacatttattgagacatcatgcctaagataaagacaagtcgtgtcaagtatcctgaaggatgggagcttattgaaccaaccatccgtgagttggatgccaaaatgagagaagctgaaaatgatccacatgatgggaagagaaagtgtgaagctctctggcctattttccgtatttctcatcaaaggagccgctacatatatgatctttactacagaaggaaggagatatcacgggagctttatgagttctgcctggaccagagctatgcagatcgtaacctgatcgcaaagtggaaaaaggttacgagcgcctttgctgccttcggtgcatacagacacgtgaccacaactttgcaacgacttgtgtctgccgggtccccaagcatctgagggaggagcaagtgatagaatgtgtccattgcggctgcaggggttgtgccagcggtgactaatcttgtcatcatgttgttgggctcacgactcatcatcaccatcctgaccacattggatgtctcgtgagcatggatcggctacggtgattagcatgaatgtgttgtggtaactagtgggaagactaaatttcctgacgtttggatgtttccaactgctatgtactataaagattcctcgtgccacaaatgtttacgttaaattagtagcgcttttgcatcttgtatgattctgtaaattgtttttttatcaccaattgctcaggagccaggctagtacattgctcg

SEQ ID NO: 31371 - DNA, 1960 bp, Zea Mays
ccgaagtctcatcttttgactaggcgcgtcaccgattcggtatctgctgcttttctggatcttgacgagtcctggttcgtggctgcactgcgggtaccacttgacgacgtcgatcgtggccccggcgctgctgagcctgccgttcgcgttcgcgtcgctggggtgggcggcggggacgatctgcctcgtcatcgccgcggccgtcaccttctactcctacaacctcatctcgctcgtcctggagcaccacgcgcggcagggccgccggcagctccgcttcagggacatggccacggacatactaggtcctggatggggcaaatactatattgggccgatccagttcctggtgtgtttcggagcagtcgtcgggtgcactctcctggccggacagagcatgaaggcaatctacctgctagccaaccccggcggcacgatcaagctgtacgtgttcgtggccatcttcggcgtcttcatgatgatcctggcgcagctgccgtccttccactcgctccgccacgtcaacctcgtctccctgctgctctgcctcgcctacagcttctgcgccgtcgccggctccatatacctaggaaactccgataaggcgcccccaaaggactactccatctcaggtgacgcccagaaccgtgtgttcggcgtcttcaacgccatcgctatcatcgccaccacgtatggcaacggcatcatcccagagatacaggcaacagtggcggcgccggtgacggggaagatgttccgggggctgtgcctgtgctacgcggtggtggtcacgaccttcttcagcgtggccatctcggggtactgggcggtcggcaaccaggcgcagggcatcctgctgagcaacttcatggtggacggcgcggccgtgatccccaagggcctcctcctcgtcacccagctcttcacgctgctgcagctctcggcggtgggcgtggtgtacctgcagcccaccaacgaggtcctggagggcctcttctcggacgccaagcagggtcagtacgcggcgcggaacgtggtgccgcgcctcgtgtcgcgcacggtggccgtcgcgctggccaccaccgtcgcggccatgctgcccttcttcggggacatgaactcgctcatcggcgccttcggtttcctgccgctcgacttcgccgtgccagctctcttctacaacgtcaccttcaagccgtccaagaagggattcgtgttctggctcaacaagactatcgccgtcgtcttctcggggctcgccgtcatcgcgtccgtcgcggcggtgcggcagattgccttggacgccaaaacttacaagcttttcgccaacgtgtgaggagagcccaaactcaagcaactacaaacgccctagatgtttttgtggtgagcgttttgtggtggtgtacgatctacgatggtacgaacacgcgaaaaaaagtgttttcctgcttggctaagtaagctaagaactagtataataccccgacggcatacgaatcatatttctaaaaaaatctatatattaaagctgggcgctaagggtatgtttgtttccgcttatagattatataatctggattataatctaaattatataatatagattataatctagatatattataatctatatgtagttgtttggtagtttagattatataaatgtagattatttataaagacaacaatatccttgtttatttatttgaggtgagaaaagaaggatgtcatatattgtaatttatatttatataaccatgggtagtgggtcttttgccaaaataatctcaaataagctagacttgaggagattatgagattatcataatctggactttatattatataatctgaacccataatctagttgtttgtttacctattgaattatttgcgctggattatataatccgaaacaaacagggcctaagggcctggcctgtttgtttacccccagatt

SEQ ID NO: 31372 - DNA, 1251 bp, Zea Mays
acgtgtcttctccgtcctgcgaactggcctctgccatccccgttgccaaaacaactcttccttcgttcagtgtcgaactatcgatgcggccgacccgcgcggcgtcgcgtgggggatgggcgttatacgagctgtacaggacaacgagccgcgtggcggcgccggcagtgctattgtggcggcgactgcaagggctggagcacccgacgcggtggccggagcggctaggacggccgtccgcggcgcggcctcggccgggctctccgctcgtgtggtttcatgccgtatcccttggcgagggaatggccgcgcttcccattgttcgccactgcgtccgcctccgtcccggcctccccgtgcttttcaccaccaccaccctctcctcgtccgaagttatcatggatctactccctgatggtgtcatatatcagtttgctcctcttgactgtcctactgcaatagatagttttattggatactggaagccaagtttggtacttcttctggaaagtgaactctggccaaacctcatcatgtctgcagcagcaaaagggattgcagtggctcttttaaatgcacgcatatcattgaaatccttcaaccactggtcgatgcctctaatgttcccattagtttctttgatgctctctaaactatcacttgttgtcccattgagtactattcaagctgttcgttttcagctgctacatacaccaccaggaatcatacattttgctggagatttaaaatatggtatactcaagttttgtctagtctttcctgagaatagattttaagtgatcatatgagtgatttagttttaaagattgtcttgggagcttgaaagataaccaggtttacaaatcaaatgatttattagatgattcatgtaattcacatagctgttggagatgttaataccggggagaatcaggtcaaggaaataaaagatttgcaacggcagtttagcaataggcccctctggatggctgcttctattcacagaggtgaagaagaagtcatcctccgcattcatgaagagttggtcaacgtgtatcccgttctactactaattcttgtgccaagacatcctgaagactgtaagaatatttccttggcactaaagaaacagaaggtcaattttgtgctgaggtcaactagggaagtggtctcttcaatcactagggtatatatggttgatactttagacaatatgcttatcattctgagacacatggagcattagctaac

SEQ ID NO: 31373 - DNA, 1956 bp, Zea Mays
acgtgtcttctccgtcctgcgaactggcctctgccatccccgttgccaaaacaactcttccttcgttcagtgtcgaactatcgatgcggccgacccgcgcggcgtcgcgtgggggatgggcgttatacgagctgtacaggacaacgagccgcgtggcggcgccggcagtgctattgtggcggcgactgcaagggctggagcacccgacgcggtggccggagcggctaggacggccgtccgcggcgcggcctcggccgggctctccgctcgtgtggtttcatgccgtatcccttggcgagggaatggccgcgcttcccattgttcgccactgcgtccgcctccgtcccggcctccccgtgcttttcaccaccaccaccctctcctcgtccgaagttatcatggatctactccctgatggtgtcatatatcagtttgctcctcttgactgtcctactgcaatagatagttttattggatactggaagccaagtttggtacttcttctggaaagtgaactctggccaaacctcatcatgtctgcagcagcaaaagggattgcagtggctcttttaaatgcacgcatatcattgaaatccttcaaccactggtcgatgcctctaatgttcccattagtttctttgatgctctctaaactatcacttgttgtcccattggtaagtacccatggcaatgctgacgttatttttatgtacatctattactgctgccattattcgtttcttatcattacagagtactattcaagctgttcgttttcagctgctacatacaccaccaggaatcatacattttgctggagatttaaaatatgctgttggagatgttaataccggggagaatcaggtcaaggaaataaaagatttgcaacggcagtttagcaataggcccctctggatggctgcttctattcacagaggtgaagaagaaggtaagaactcaggatctgcacctcttgctgatttctggactaataaaatgtattatatcacttattcacttcagttccagtaatctgtaaaaataactgttagcatttcacattttcataataacggttactcctgctatccctaatctgtgttgacttcttcgagttctctaagaacaactttgattaccactcctgcaaccgttgatttctgaaaatggtgttagaatcttataccaagaataacactttcaatggcagatatatgatgtcattacataatggtgaggattaaaagtttaatttacatttaattaagatagttaaatagcgtatatttatagattgtcatactaatggaatatttgttcaagatatacaggagtactgtatcaattcttctatatcctcaagcttggaataaatcaatactaaaagtgtctttgttttagagaatcacctctgtcatagtttcattcatgtagttttatcccccccccccctgaacaatattcatgtgatttcttatgaatgatcttctgtcatatcattattctgcctcatttcttgtatttctgtttgtactctgatcaggaaaaatggagtggcttttgtgaaaatacatctcagttatttattaatcattttcacattttcagtatggagtgacttggagatattacattcctgacttattattcttgcgttctcaacatgaagggaatgatttcagttttttcacaagccatcttgattttttgctttattttttcagtcatcctccgcattcatgaagagttggtcaacgtgtatcccgttctactactaattcttgtgccaagacatcctgaagactgtaagaatatttccttggcactaaagaaacagaaggtcaattttgtgctgaggtcaactagggaagtggtctcttcaatcactagggtatatatggttgatactttagacaatatgcttatcattctgagacacatggagcattagctaac

SEQ ID NO: 31374 - DNA, 1270 bp, Zea Mays
acgtgtcttctccgtcctgcgaactggcctctgccatccccgttgccaaaacaactcttccttcgttcagtgtcgaactatcgatgcggccgacccgcgcggcgtcgcgtgggggatgggcgttatacgagctgtacaggacaacgagccgcgtggcggcgccggcagtgctattgtggcggcgactgcaagggctggagcacccgacgcggtggccggagcggctaggacggccgtccgcggcgcggcctcggccgggctctccgctcgtgtggtttcatgccgtatcccttggcgagggaatggccgcgcttcccattgttcgccactgcgtccgcctccgtcccggcctccccgtgcttttcaccaccaccaccctctcctcgtccgaagttatcatggatctactccctgatggtgtcatatatcagtttgctcctcttgactgtcctactgcaatagatagttttattggatactggaagccaagtttggtacttcttctggaaagtgaactctggccaaacctcatcatgtctgcagcagcaaaagggattgcagtggctcttttaaatgcacgcatatcattgaaatccttcaaccactggtcgatgcctctaatgttcccattagtttctttgatgctctctaaactatcacttgttgtcccattgagtactattcaagctgttcgttttcagctgctacatacaccaccaggaatcatacattttgctggagatttaaaatatgctgttggagatgttaataccggggagaatcaggtcaaggaaataaaagatttgcaacggcagtttagcaataggcccctctggatggctgcttctattcacagaggtgaagaagaagtcatcctccgcattcatgaagagttggtcaacgtgtatcccgttctactactaattcttgtgccaagacatcctgaagactgtaagaatatttccttggcactaaagaaacagaaggtcaattttgtgctgaggtcaactagggaagtggtctcttcaatcactagggtatatatggttgatactttaggggaattaagaatgctttacagggtcaccccaattgcagttgttggtggttcatttctacctggcttagccggccataatttttctgaggctgctgccgctggttgtgctgttatgactggaccccacgttggacacttctaccatatgctggtcgaaatgtggcaaataaatcctttagctgtcaagcagagtgttcttttattcattca

SEQ ID NO: 31375 - DNA, 1678 bp, Zea Mays
acgtgtcttctccgtcctgcgaactggcctctgccatccccgttgccaaaacaactcttccttcgttcagtgtcgaactatcgatgcggccgacccgcgcggcgtcgcgtgggggatgggcgttatacgagctgtacaggacaacgagccgcgtggcggcgccggcagtgctattgtggcggcgactgcaagggctggagcacccgacgcggtggccggagcggctaggacggccgtccgcggcgcggcctcggccgggctctccgctcgtgtggtttcatgccgtatcccttggcgagggaatggccgcgcttcccattgttcgccactgcgtccgcctccgtcccggcctccccgtgcttttcaccaccaccaccctctcctcgtccgaagttatcatggatctactccctgatggtgtcatatatcagtttgctcctcttgactgtcctactgcaatagatagttttattggatactggaagccaagtttggtacttcttctggaaagtgaactctggccaaacctcatcatgtctgcagcagcaaaagggattgcagtggctcttttaaatgcacgcatatcattgaaatccttcaaccactggtcgatgcctctaatgttcccattagtttctttgatgctctctaaactatcacttgttgtcccattgagtactattcaagctgttcgttttcagctgctacatacaccaccaggaatcatacattttgctggagatttaaaatatgatgattcatgtaattcacatagctgttggagatgttaataccggggagaatcaggtcaaggaaataaaagatttgcaacggcagtttagcaataggcccctctggatggctgcttctattcacagaggtgaagaagaagtcatcctccgcattcatgaagagttggtcaacgtgtatcccgttctactactaattcttgtgccaagacatcctgaagactgtaagaatatttccttggcactaaagaaacagaaggtcaattttgtgctgaggtcaactagggaagtggtctcttcaatcactagggtatatatggttgatactttaggggaattaagaatgctttacagggtcaccccaattgcagttgttggtggttcatttctacctggcttagccggccataatttttctgaggctgctgccgctggttgtgctgttatgactggaccccacgttggacacttctaccatatgctggtcgaaatgtggcaaataaatcctttagctgtcaagcaggtgtcaggagaatttgaactgctgcaaacactaaaagaactgcttggtgatgccagcactctgggagcacgtcaaagagctgcaaaagatgcattttcgattatgtcagatggagttgtgaaccgtgtatgggatttagtctgcaggctgggcattgattcccaaacaaatacgttgagcagttgacttagctgaggcttattcttgtaatctctgtgggactgtaggagtggaaatgcacagggagactgaaaccaaaaaccggcgattgtggcatgctggcgacctggtgagtgttttggggataggaaagcgggaatgggaaatggacacaatttcctcgaatgtatgccataggttggactgcaatttgcaaattgacctgaggtaaccaggtaccttttat

SEQ ID NO: 31376 - DNA, 1640 bp, Zea Mays
acgtgtcttctccgtcctgcgaactggcctctgccatccccgttgccaaaacaactcttccttcgttcagtgtcgaactatcgatgcggccgacccgcgcggcgtcgcgtgggggatgggcgttatacgagctgtacaggacaacgagccgcgtggcggcgccggcagtgctattgtggcggcgactgcaagggctggagcacccgacgcggtggccggagcggctaggacggccgtccgcggcgcggcctcggccgggctctccgctcgtgtggtttcatgccgtatcccttggcgagggaatggccgcgcttcccattgttcgccactgcgtccgcctccgtcccggcctccccgtgcttttcaccaccaccaccctctcctcgtccgaagttatcatggatctactccctgatggtgtcatatatcagtttgctcctcttgactgtcctactgcaatagatagttttattggatactggaagccaagtttggtacttcttctggaaagtgaactctggccaaacctcatcatgtctgcagcagcaaaagggattgcagtggctcttttaaatgcacgcatatcattgaaatccttcaaccactggtcgatgcctctaatgttcccattagtttctttgatgctctctaaactatcacttgttgtcccattgagtactattcaagctgttcgttttcagctgctacatacaccaccaggaatcatacattttgctggagatttaaaatatgctgttggagatgttaataccggggagaatcaggtcaaggaaataaaagatttgcaacggcagtttagcaataggcccctctggatggctgcttctattcacagaggtgaagaagaagtcatcctccgcattcatgaagagttggtcaacgtgtatcccgttctactactaattcttgtgccaagacatcctgaagactgtaagaatatttccttggcactaaagaaacagaaggtcaattttgtgctgaggtcaactagggaagtggtctcttcaatcactagggtatatatggttgatactttaggggaattaagaatgctttacagggtcaccccaattgcagttgttggtggttcatttctacctggcttagccggccataatttttctgaggctgctgccgctggttgtgctgttatgactggaccccacgttggacacttctaccatatgctggtcgaaatgtggcaaataaatcctttagctgtcaagcaggtgtcaggagaatttgaactgctgcaaacactaaaagaactgcttggtgatgccagcactctgggagcacgtcaaagagctgcaaaagatgcattttcgattatgtcagatggagttgtgaaccgtgtatgggatttagtctgcaggctgggcattgattcccaaacaaatacgttgagcagttgacttagctgaggcttattcttgtaatctctgtggagtggaaatgcacagggagactgaaaccaaaaaccggcgattgtggcatgctggcgacctgttttggggataggaaagcgggaatgggaaatggacacaatttcctcgaatgtatgccataggttggactgcaatttgcaaattgacctgaggtaaccaggtaccttttat

SEQ ID NO: 31377 - DNA, 1767 bp, Zea Mays
acgtgtcttctccgtcctgcgaactggcctctgccatccccgttgccaaaacaactcttccttcgttcagtgtcgaactatcgatgcggccgacccgcgcggcgtcgcgtgggggatgggcgttatacgagctgtacaggacaacgagccgcgtggcggcgccggcagtgctattgtggcggcgactgcaagggctggagcacccgacgcggtggccggagcggctaggacggccgtccgcggcgcggcctcggccgggctctccgctcgtgtggtttcatgccgtatcccttggcgagggaatggccgcgcttcccattgttcgccactgcgtccgcctccgtcccggcctccccgtgcttttcaccaccaccaccctctcctcgtccgaagttatcatggatctactccctgatggtgtcatatatcagatagttttattggatactggaagccaagtttggtacttcttctggaaagtgaactctggccaaacctcatcatgtctgcagcagcaaaagggattgcagtggctcttttaaatgcacgcatatcattgaaatccttcaaccactggtcgatgcctctaatgttcccattagtttctttgatgctctctaaactatcacttgttgtcccattgagtactattcaagctgttcgttttcagctgctacatacaccaccaggaatcatacattttgctggagatttaaaatatggtatactcaagttttgtctagtctttcctgagaatagattttaagtgatcatatgagtgatttagttttaaagattgtcttgggagcttgaaagataaccaggtttacaaatcaaatgatttattagatgattcatgtaattcacatagctgttggagatgttaataccggggagaatcaggtcaaggaaataaaagatttgcaacggcagtttagcaataggcccctctggatggctgcttctattcacagaggtgaagaagaagtcatcctccgcattcatgaagagttggtcaacgtgtatcccgttctactactaattcttgtgccaagacatcctgaagactgtaagaatatttccttggcactaaagaaacagaaggtcaattttgtgctgaggtcaactagggaagtggtctcttcaatcactagggtatatatggttgatactttaggggaattaagaatgctttacagggtcaccccaattgcagttgttggtggttcatttctacctggcttagccggccataatttttctgaggctgctgccgctggttgtgctgttatgactggaccccacgttggacacttctaccatatgctggtcgaaatgtggcaaataaatcctttagctgtcaagcaggtgtcaggagaatttgaactgctgcaaacactaaaagaactgcttggtgatgccagcactctgggagcacgtcaaagagctgcaaaagatgcattttcgattatgtcagatggagttgtgaaccgtgtatgggatttagtctgcaggctgggcattgattcccaaacaaatacgttgagcagttgacttagctgaggcttattcttgtaatctctgtgggactgtaggagtggaaatgcacagggagactgaaaccaaaaaccggcgattgtggcatgctggcgacctgttttggggataggaaagcgggaatgggaaatggacacaatttcctcgaatgtatgccataggttggactgcaatttgcaaattgacctgaggtaaccaggtaccttttat

SEQ ID NO: 31378 - DNA, 1977 bp, Zea Mays
acgtgtcttctccgtcctgcgaactggcctctgccatccccgttgccaaaacaactcttccttcgttcagtgtcgaactatcgatgcggccgacccgcgcggcgtcgcgtgggggatgggcgttatacgagctgtacaggacaacgagccgcgtggcggcgccggcagtgctattgtggcggcgactgcaagggctggagcacccgacgcggtggccggagcggctaggacggccgtccgcggcgcggcctcggccgggctctccgctcgtgtggtttcatgccgtatcccttggcgagggaatggccgcgcttcccattgttcgccactgcgtccgcctccgtcccggcctccccgtgcttttcaccaccaccaccctctcctcgtccgaagttatcatggatctactccctgatggtgtcatatatcagatagttttattggatactggaagccaagtttggtacttcttctggaaagtgaactctggccaaacctcatcatgtctgcagcagcaaaagggattgcagtggctcttttaaatgcacgcatatcattgaaatccttcaaccactggtcgatgcctctaatgttcccattagtttctttgatgctctctaaactatcacttgttgtcccattgagtactattcaagctgttcgttttcagctgctacatacaccaccaggaatcatacattttgctggagatttaaaatatgctgttggagatgttaataccggggagaatcaggtcaaggaaataaaagatttgcaacggcagtttagcaataggcccctctggatggctgcttctattcacagaggtgaagaagaagtcatcctccgcattcatgaagagttggtcaacgtgtatcccgttctactactaattcttgtgccaagacatcctgaagactgtaagaatatttccttggcactaaagaaacagaaggtcaattttgtgctgaggtcaactagggaagtggtctcttcaatcactagggtatatatggttgatactttaggggaattaagaatgctttacagggtcaccccaattgcagttgttggtggttcatttctacctggcttagccggccataatttttctgaggctgctgccgctggttgtgctgttatgactggaccccacgttggacacttctaccatatgctggtcgaaatgtggcaaataaatcctttagctgtcaagcaggtgtcaggagaatttgaactgctgcaaacactaaaagaactgcttggtgatgccagcactctgggagcacgtcaaagagctgcaaaagatgcattttcgattatgtcagatggagttgtgaaccgtgtatgggatttagtctgcaggctgggcattgattcccaaacaaatacgttgagcagttgacttagctgaggcttattcttgtaatctctgtgggactgtaggagtggaaatgcacagggagactgaaaccaaaaaccggcgattgtggcatgctggcgacctggtgagtggtgagtggtgacaaaggactaagctcacatgatagaacatatatccacgtcatttgctcgacttgctcctgtcggaaatttagatatattccataaaaatcctttgagatgtctgtcatcttttcatttccttgtagcatggatatgatatattttgtcattccttagtgccagccagcagatgatgttttgcagtgccttttcctttgttaaattggcacattcaaggctccaggaatttcaagggccatgccaattttagggttagatgtgaactgttaaatgcatatgacatgctttttcaggcgtgatatgtgtgattgatgttcttttctatcttggcaaagtacagttttggggataggaaagcgggaatgggaaatggacacaatttcctcgaatgtatgccataggttggactgcaatttgcaaattgacctgaggtaaccaggtaccttttat

SEQ ID NO: 31379 - DNA, 1999 bp, Zea Mays
acgtgtcttctccgtcctgcgaactggcctctgccatccccgttgccaaaacaactcttccttcgttcagtgtcgaactatcgatgcggccgacccgcgcggcgtcgcgtgggggatgggcgttatacgagctgtacaggacaacgagccgcgtggcggcgccggcagtgctattgtggcggcgactgcaagggctggagcacccgacgcggtggccggagcggctaggacggccgtccgcggcgcggcctcggccgggctctccgctcgtgtggtttcatgccgtatcccttggcgagggaatggccgcgcttcccattgttcgccactgcgtccgcctccgtcccggcctccccgtgcttttcaccaccaccaccctctcctcgtccgaagttatcatggatctactccctgatggtgtcatatatcagtttgctcctcttgactgtcctactgcaatagatagttttattggatactggaagccaagtttggtacttcttctggaaagtgaactctggccaaacctcatcatgtctgcagcagcaaaagggattgcagtggctcttttaaatgcacgcatatcattgaaatccttcaaccactggtcgatgcctctaatgttcccattagtttctttgatgctctctaaactatcacttgttgtcccattgagtactattcaagctgttcgttttcagctgctacatacaccaccaggaatcatacattttgctggagatttaaaatatgctgttggagatgttaataccggggagaatcaggtcaaggaaataaaagatttgcaacggcagtttagcaataggcccctctggatggctgcttctattcacagaggtgaagaagaagtcatcctccgcattcatgaagagttggtcaacgtgtatcccgttctactactaattcttgtgccaagacatcctgaagactgtaagaatatttccttggcactaaagaaacagaaggtcaattttgtgctgaggtcaactagggaagtggtctcttcaatcactagggtatatatggttgatactttaggggaattaagaatgctttacagggtcaccccaattgcagttgttggtggttcatttctacctggcttagccggccataatttttctgaggctgctgccgctggttgtgctgttatgactggaccccacgttggacacttctaccatatgctggtcgaaatgtggcaaataaatcctttagctgtcaagcaggtgtcaggagaatttgaactgctgcaaacactaaaagaactgcttggtgatgccagcactctgggagcacgtcaaagagctgcaaaagatgcattttcgattatgtcagatggagttgtgaaccgtgtatgggatttagtctgcaggctgggcattgattcccaaacaaatacgttgagcagttgacttagctgaggcttattcttgtaatctctgtggagtggaaatgcacagggagactgaaaccaaaaaccggcgattgtggcatgctggcgacctggtgagtggtgagtggtgacaaaggactaagctcacatgatagaacatatatccacgtcatttgctcgacttgctcctgtcggaaatttagatatattccataaaaatcctttgagatgtctgtcatcttttcatttccttgtagcatggatatgatatattttgtcattccttagtgccagccagcagatgatgttttgcagtgccttttcctttgttaaattggcacattcaaggctccaggaatttcaagggccatgccaattttagggttagatgtgaactgttaaatgcatatgacatgctttttcaggcgtgatatgtgtgattgatgttcttttctatcttggcaaagtacagttttggggataggaaagcgggaatgggaaatggacacaatttcctcgaatgtatgccataggttggactgcaatttgcaaattgacctgaggtaaccaggtaccttttat

SEQ ID NO: 31380 - DNA, 2751 bp, Zea Mays
acgtgtcttctccgtcctgcgaactggcctctgccatccccgttgccaaaacaactcttccttcgttcagtgtcgaactatcgatgcggccgacccgcgcggcgtcgcgtgggggatgggcgttatacgagctgtacaggacaacgagccgcgtggcggcgccggcagtgctattgtggcggcgactgcaagggctggagcacccgacgcggtggccggagcggctaggacggccgtccgcggcgcggcctcggccgggctctccgctcgtgtggtttcatgccgtatcccttggcgagggaatggccgcgcttcccattgttcgccactgcgtccgcctccgtcccggcctccccgtgcttttcaccaccaccaccctctcctcgtccgaagttatcatggatctactccctgatggtgtcatatatcagtttgctcctcttgactgtcctactgcaatagatagttttattggatactggaagccaagtttggtacttcttctggaaagtgaactctggccaaacctcatcatgtctgcagcagcaaaagggattgcagtggctcttttaaatgcacgcatatcattgaaatccttcaaccactggtcgatgcctctaatgttcccattagtttctttgatgctctctaaactatcacttgttgtcccattgagtactattcaagctgttcgttttcagctgctacatacaccaccaggaatcatacattttgctggagatttaaaatatggtcaaggaaataaaagatttgcaacggcagtttagcaataggcccctctggatggctgcttctattcacagaggtgaagaagaaggtaagaactcaggatctgcacctcttgctgatttctggactaataaaatgtattatatcacttattcacttcagttccagtaatctgtaaaaataactgttagcatttcacattttcataataacggttactcctgctatccctaatctgtgttgacttcttcgagttctctaagaacaactttgattaccactcctgcaaccgttgatttctgaaaatggtgttagaatcttataccaagaataacactttcaatggcagatatatgatgtcattacataatggtgaggattaaaagtttaatttacatttaattaagatagttaaatagcgtatatttatagattgtcatactaatggaatatttgttcaagatatacaggagtactgtatcaattcttctatatcctcaagcttggaataaatcaatactaaaagtgtctttgttttagagaatcacctctgtcatagtttcattcatgtagttttatcccccccccccctgaacaatattcatgtgatttcttatgaatgatcttctgtcatatcattattctgcctcatttcttgtatttctgtttgtactctgatcaggaaaaatggagtggcttttgtgaaaatacatctcagttatttattaatcattttcacattttcagtatggagtgacttggagatattacattcctgacttattattcttgcgttctcaacatgaagggaatgatttcagttttttcacaagccatcttgattttttgctttattttttcagtcatcctccgcattcatgaagagttggtcaacgtgtatcccgttctactactaattcttgtgccaagacatcctgaagactgtaagaatatttccttggcactaaagaaacagaaggtcaattttgtgctgaggtcaactagggaagtggtctcttcaatcactagggtatatatggttgatactttaggggaattaagaatgctttacagggtcaccccaattgcagttgttggtggttcatttctacctggcttagccggccataatttttctgaggctgctgccgctggttgtgctgttatgactggaccccacgttggacacttctaccatatgctggtcgaaatgtggcaaataaatcctttagctgtcaagcaggtgtcaggagaatttgaactgctgcaaacactaaaagaactgcttggtgatgccagcactctgggagcacgtcaaagagctgcaaaagatgcattttcgattatgtcagatggagttgtgaaccgtgtatgggatttagtctgcaggctgggcattgattcccaaacaaatacgttgagcagttgacttagctgaggcttattcttgtaatctctgtgggactgtaggagtggaaatgcacagggagactgaaaccaaaaaccggcgattgtggcatgctggcgacctggtgagtggtgagtggtgacaaaggactaagctcacatgatagaacatatatccacgtcatttgctcgacttgctcctgtcggaaatttagatatattccataaaaatcctttgagatgtctgtcatcttttcatttccttgtagcatggatatgatatattttgtcattccttagtgccagccagcagatgatgttttgcagtgccttttcctttgttaaattggcacattcaaggctccaggaatttcaagggccatgccaattttagggttagatgtgaactgttaaatgcatatgacatgctttttcaggcgtgatatgtgtgattgatgttcttttctatcttggcaaagtacagttttggggataggaaagcgggaatgggaaatggacacaatttcctcgaatgtatgccataggttggactgcaatttgcaaattgacctgaggtaaccaggtaccttttat

SEQ ID NO: 31381 - DNA, 2246 bp, Zea Mays
acgtgtcttctccgtcctgcgaactggcctctgccatccccgttgccaaaacaactcttccttcgttcagtgtcgaactatcgatgcggccgacccgcgcggcgtcgcgtgggggatgggcgttatacgagctgtacaggacaacgagccgcgtggcggcgccggcagtgctattgtggcggcgactgcaagggctggagcacccgacgcggtggccggagcggctaggacggccgtccgcggcgcggcctcggccgggctctccgctcgtgtggtttcatgccgtatcccttggcgagggaatggccgcgcttcccattgttcgccactgcgtccgcctccgtcccggcctccccgtgcttttcaccaccaccaccctctcctcgtccgaagttatcatggatctactccctgatggtgtcatatatcagtttgctcctcttgactgtcctactgcaatagatagttttattggatactggaagccaagtttggtacttcttctggaaagtgaactctggccaaacctcatcatgtctgcagcagcaaaagggattgcagtggctcttttaaatgcacgcatatcattgaaatccttcaaccactggtcgatgcctctaatgttcccattagtttctttgatgctctctaaactatcacttgttgtcccattggtaagtacccatggcaatgctgacgttatttttatgtacatctattactgctgccattattcgtttcttatcattacagagtactattcaagctgttcgttttcagctgctacatacaccaccaggaatcatacattttgctggagatttaaaatatggtatactcaagttttgtctagtctttcctgagaatagattttaagtgatcatatgagtgatttagttttaaagattgtcttgggagcttgaaagataaccaggtttacaaatcaaatgatttattagatgattcatgtaattcacatagctgttggagatgttaataccggggagaatcaggtcaaggaaataaaagatttgcaacggcagtttagcaataggcccctctggatggctgcttctattcacagaggtgaagaagaagtcatcctccgcattcatgaagagttggtcaacgtgtatcccgttctactactaattcttgtgccaagacatcctgaagactgtaagaatatttccttggcactaaagaaacagaaggtcaattttgtgctgaggtcaactagggaagtggtctcttcaatcactagggtatatatggttgatactttaggggaattaagaatgctttacagggtcaccccaattgcagttgttggtggttcatttctacctggcttagccggccataatttttctgaggctgctgccgctggttgtgctgttatgactgagtgaactctggcatgcaggaccccacgttggacacttctaccatatgctggtcgaaatgtggcaaataaatcctttagctgtcaagcaggtgtcaggagaatttgaactgctgcaaacactaaaagaactgcttggtgatgccagcactctgggagcacgtcaaagagctgcaaaagatgcattttcgattatgtcagatggagttgtgaaccgtgtatgggatttagtctgcaggctgggcattgattcccaaacaaatacgttgagcagttgacttagctgaggcttattcttgtaatctctgtggagtggaaatgcacagggagactgaaaccaaaaaccggcgattgtggcatgctggcgacctggtgagtggtgagtggtgacaaaggactaagctcacatgatagaacatatatccacgtcatttgctcgacttgctcctgtcggaaatttagatatattccataaaaatcctttgagatgtctgtcatcttttcatttccttgtagcatggatatgatatattttgtcattccttagtgccagccagcagatgatgttttgcagtgccttttcctttgttaaattggcacattcaaggctccaggaatttcaagggccatgccaattttagggttagatgtgaactgttaaatgcatatgacatgctttttcaggcgtgatatgtgtgattgatgttcttttctatcttggcaaagtacagttttggggataggaaagcgggaatgggaaatggacacaatttcctcgaatgtatgccataggttggactgcaatttgcaaattgacctgaggtaaccaggtaccttttat

SEQ ID NO: 31382 - DNA, 2026 bp, Zea Mays
acgtgtcttctccgtcctgcgaactggcctctgccatccccgttgccaaaacaactcttccttcgttcagtgtcgaactatcgatgcggccgacccgcgcggcgtcgcgtgggggatgggcgttatacgagctgtacaggacaacgagccgcgtggcggcgccggcagtgctattgtggcggcgactgcaagggctggagcacccgacgcggtggccggagcggctaggacggccgtccgcggcgcggcctcggccgggctctccgctcgtgtggtttcatgccgtatcccttggcgagggaatggccgcgcttcccattgttcgccactgcgtccgcctccgtcccggcctccccgtgcttttcaccaccaccaccctctcctcgtccgaagttatcatggatctactccctgatggtgtcatatatcagtttgctcctcttgactgtcctactgcaatagatagttttattggatactggaagccaagtttggtacttcttctggaaagtgaactctggccaaacctcatcatgtctgcagcagcaaaagggattgcagtggctcttttaaatgcacgcatatcattgaaatccttcaaccactggtcgatgcctctaatgttcccattagtttctttgatgctctctaaactatcacttgttgtcccattgagtactattcaagctgttcgttttcagctgctacatacaccaccaggaatcatacattttgctggagatttaaaatatgctgttggagatgttaataccggggagaatcaggtcaaggaaataaaagatttgcaacggcagtttagcaataggcccctctggatggctgcttctattcacagaggtgaagaagaagtcatcctccgcattcatgaagagttggtcaacgtgtatcccgttctactactaattcttgtgccaagacatcctgaagactgtaagaatatttccttggcactaaagaaacagaaggtcaattttgtgctgaggtcaactagggaagtggtctcttcaatcactagggtatatatggttgatactttaggggaattaagaatgctttacagggtcaccccaattgcagttgttggtggttcatttctacctggcttagccggccataatttttctgaggctgctgccgctggttgtgctgttatgactggtgaactctggcatgcaggaccccacgttggacacttctaccatatgctggtcgaaatgtggcaaataaatcctttagctgtcaagcaggtgtcaggagaatttgaactgctgcaaacactaaaagaactgcttggtgatgccagcactctgggagcacgtcaaagagctgcaaaagatgcattttcgattatgtcagatggagttgtgaaccgtgtatgggatttagtctgcaggctgggcattgattcccaaacaaatacgttgagcagttgacttagctgaggcttattcttgtaatctctgtgggactgtaggagtggaaatgcacagggagactgaaaccaaaaaccggcgattgtggcatgctggcgacctggtgagtggtgagtggtgacaaaggactaagctcacatgatagaacatatatccacgtcatttgctcgacttgctcctgtcggaaatttagatatattccataaaaatcctttgagatgtctgtcatcttttcatttccttgtagcatggatatgatatattttgtcattccttagtgccagccagcagatgatgttttgcagtgccttttcctttgttaaattggcacattcaaggctccaggaatttcaagggccatgccaattttagggttagatgtgaactgttaaatgcatatgacatgctttttcaggcgtgatatgtgtgattgatgttcttttctatcttggcaaagtacagttttggggataggaaagcgggaatgggaaatggacacaatttcctcgaatgtatgccataggttggactgcaatttgcaaattgacctgaggtaaccaggtaccttttat

SEQ ID NO: 31383 - DNA, 2144 bp, Zea Mays
acgtgtcttctccgtcctgcgaactggcctctgccatccccgttgccaaaacaactcttccttcgttcagtgtcgaactatcgatgcggccgacccgcgcggcgtcgcgtgggggatgggcgttatacgagctgtacaggacaacgagccgcgtggcggcgccggcagtgctattgtggcggcgactgcaagggctggagcacccgacgcggtggccggagcggctaggacggccgtccgcggcgcggcctcggccgggctctccgctcgtgtggtttcatgccgtatcccttggcgagggaatggccgcgcttcccattgttcgccactgcgtccgcctccgtcccggcctccccgtgcttttcaccaccaccaccctctcctcgtccgaagttatcatggatctactccctgatggtgtcatatatcagatagttttattggatactggaagccaagtttggtacttcttctggaaagtgaactctggccaaacctcatcatgtctgcagcagcaaaagggattgcagtggctcttttaaatgcacgcatatcattgaaatccttcaaccactggtcgatgcctctaatgttcccattagtttctttgatgctctctaaactatcacttgttgtcccattgagtactattcaagctgttcgttttcagctgctacatacaccaccaggaatcatacattttgctggagatttaaaatatggtatactcaagttttgtctagtctttcctgagaatagattttaagtgatcatatgagtgatttagttttaaagattgtcttgggagcttgaaagataaccaggtttacaaatcaaatgatttattagatgattcatgtaattcacatagctgttggagatgttaataccggggagaatcaggtcaaggaaataaaagatttgcaacggcagtttagcaataggcccctctggatggctgcttctattcacagaggtgaagaagaagtcatcctccgcattcatgaagagttggtcaacgtgtatcccgttctactactaattcttgtgccaagacatcctgaagactgtaagaatatttccttggcactaaagaaacagaaggtcaattttgtgctgaggtcaactagggaagtggtctcttcaatcactagggtatatatggttgatactttaggggaattaagaatgctttacagggtcaccccaattgcagttgttggtggttcatttctacctggcttagccggccataatttttctgaggctgctgccgctggttgtgctgttatgactggtgaactctggcatgcaggaccccacgttggacacttctaccatatgctggtcgaaatgtggcaaataaatcctttagctgtcaagcaggtgtcaggagaatttgaactgctgcaaacactaaaagaactgcttggtgatgccagcactctgggagcacgtcaaagagctgcaaaagatgcattttcgattatgtcagatggagttgtgaaccgtgtatgggatttagtctgcaggctgggcattgattcccaaacaaatacgttgagcagttgacttagctgaggcttattcttgtaatctctgtgggactgtaggagtggaaatgcacagggagactgaaaccaaaaaccggcgattgtggcatgctggcgacctggtgagtggtgagtggtgacaaaggactaagctcacatgatagaacatatatccacgtcatttgctcgacttgctcctgtcggaaatttagatatattccataaaaatcctttgagatgtctgtcatcttttcatttccttgtagcatggatatgatatattttgtcattccttagtgccagccagcagatgatgttttgcagtgccttttcctttgttaaattggcacattcaaggctccaggaatttcaagggccatgccaattttagggttagatgtgaactgttaaatgcatatgacatgctttttcaggcgtgatatgtgtgattgatgttcttttctatcttggcaaagtacagttttggggataggaaagcgggaatgggaaatggacacaatttcctcgaatgtatgccataggttggactgcaatttgcaaattgacctgaggtaaccaggtaccttttat

SEQ ID NO: 31384 - DNA, 2796 bp, Zea Mays
acgtgtcttctccgtcctgcgaactggcctctgccatccccgttgccaaaacaactcttccttcgttcagtgtcgaactatcgatgcggccgacccgcgcggcgtcgcgtgggggatgggcgttatacgagctgtacaggacaacgagccgcgtggcggcgccggcagtgctattgtggcggcgactgcaagggctggagcacccgacgcggtggccggagcggctaggacggccgtccgcggcgcggcctcggccgggctctccgctcgtgtggtttcatgccgtatcccttggcgagggaatggccgcgcttcccattgttcgccactgcgtccgcctccgtcccggcctccccgtgcttttcaccaccaccaccctctcctcgtccgaagttatcatggatctactccctgatggtgtcatatatcagtttgctcctcttgactgtcctactgcaatagatagttttattggatactggaagccaagtttggtacttcttctggaaagtgaactctggccaaacctcatcatgtctgcagcagcaaaagggattgcagtggctcttttaaatgcacgcatatcattgaaatccttcaaccactggtcgatgcctctaatgttcccattagtttctttgatgctctctaaactatcacttgttgtcccattgagtactattcaagctgttcgttttcagctgctacatacaccaccaggaatcatacattttgctggagatttaaaatatgatgattcatgtaattcacatagctgttggagatgttaataccggggagaatcaggtcaaggaaataaaagatttgcaacggcagtttagcaataggcccctctggatggctgcttctattcacagaggtgaagaagaaggtaagaactcaggatctgcacctcttgctgatttctggactaataaaatgtattatatcacttattcacttcagttccagtaatctgtaaaaataactgttagcatttcacattttcataataacggttactcctgctatccctaatctgtgttgacttcttcgagttctctaagaacaactttgattaccactcctgcaaccgttgatttctgaaaatggtgttagaatcttataccaagaataacactttcaatggcagatatatgatgtcattacataatggtgaggattaaaagtttaatttacatttaattaagatagttaaatagcgtatatttatagattgtcatactaatggaatatttgttcaagatatacaggagtactgtatcaattcttctatatcctcaagcttggaataaatcaatactaaaagtgtctttgttttagagaatcacctctgtcatagtttcattcatgtagttttatcccccccccccctgaacaatattcatgtgatttcttatgaatgatcttctgtcatatcattattctgcctcatttcttgtatttctgtttgtactctgatcaggaaaaatggagtggcttttgtgaaaatacatctcagttatttattaatcattttcacattttcagtatggagtgacttggagatattacattcctgacttattattcttgcgttctcaacatgaagggaatgatttcagttttttcacaagccatcttgattttttgctttattttttcagtcatcctccgcattcatgaagagttggtcaacgtgtatcccgttctactactaattcttgtgccaagacatcctgaagactgtaagaatatttccttggcactaaagaaacagaaggtcaattttgtgctgaggtcaactagggaagtggtctcttcaatcactagggtatatatggttgatactttaggggaattaagaatgctttacagggtcaccccaattgcagttgttggtggttcatttctacctggcttagccggccataatttttctgaggctgctgccgctggttgtgctgttatgactggaccccacgttggacacttctaccatatgctggtcgaaatgtggcaaataaatcctttagctgtcaagcaggtgtcaggagaatttgaactgctgcaaacactaaaagaactgcttggtgatgccagcactctgggagcacgtcaaagagctgcaaaagatgcattttcgattatgtcagatggagttgtgaaccgtgtatgggatttagtctgcaggctgggcattgattcccaaacaaatacgttgagcagttgacttagctgaggcttattcttgtaatctctgtggagtggaaatgcacagggagactgaaaccaaaaaccggcgattgtggcatgctggcgacctggtgagtggtgagtggtgacaaaggactaagctcacatgatagaacatatatccacgtcatttgctcgacttgctcctgtcggaaatttagatatattccataaaaatcctttgagatgtctgtcatcttttcatttccttgtagcatggatatgatatattttgtcattccttagtgccagccagcagatgatgttttgcagtgccttttcctttgttaaattggcacattcaaggctccaggaatttcaagggccatgccaattttagggttagatgtgaactgttaaatgcatatgacatgctttttcaggcgtgatatgtgtgattgatgttcttttctatcttggcaaagtacagttttggggataggaaagcgggaatgggaaatggacacaatttcctcgaatgtatgccataggttggactgcaatttgcaaattgacctgaggtaaccaggtaccttttat

SEQ ID NO: 31385 - DNA, 2212 bp, Zea Mays
gtcatccgcgcgcccccgctctcctccatctgccgcgtgaagctctcccgaaaacctcctccacatcagcgccccccgccatgcccctgtatctcgcctagcacacgccgcgcccacgcaggcagccgtggatctcgcccccaccgtcgagcttccatgggaattcttagaccaacatgaggaggaagaaatgcctcatgttattagtgttacaccagacgtacaagaggccattggacgggaatgaggagctatctgcaaactatcttcttgagcaagctggtgaggaagattaagccagagtagttttcgtatgggtacaaacatagctttgcgtcaatcgatgccaggcaaatgtagaacgcttggtagccggtcagcgctatgtgtagaacacatactccagagatgaacatggatcacgagaactggaataattgctgtcaggtttttctcattacctgaactccattatgtgcttgggttaaccctaccaagatgtaacactgtctgcctcctgttttcctaccaagcaaatttagctccaaatgaaatgttatgttctctgaattctaatgcatataagccacacaaatgattttttacatccaaagtcacctgaccatgaatatgttgagttttaattgctcttttatgtcagctgcattgaaacaggcagatcctattaacaactccgcattggctctctgccccagccatggacccatgacatcggtggtttcgcgcacctcaaagacatgggtggggaggcatcgcggctgctgcacgccctctagagaatgcttatcgatcatcaggtgcattcaattacgctttcggttgctgcattgagaaatgaatcagtcgaactgtgaaccaactacttgaaatttcacgtgatgtggggtatagtggcaatgcataagcccacatggagcactgggtcttcgaggtgacacactgacattgcaactgaacacacttgtctatgtggctatggctacggtatacatagagtcgtacattaggtagcttattcaatcaaataatgtccggttttgtcatgaaagtgataataatcttctatataaacttggtcaaacgtaagacatttcacttaaaataaaaccagaacgtctctctttttcggtggagatagtattaatataatttcgaaaattctgatctgcgagttggtactttgataattcaaatccatgttgccaaaagctaactgatataatactttcttcaacagtaactatcatactatctgcatcttctatgatctattaaagtacctcacaagagatccaattaatgattcacacctgcaagataacacctgtagtggaaatccagttttctggtgtgagtctaaatatttcagaaacaatgaaagcatagaagaaaatgctgcagtaggacaatacctaattatcatgtgcatgcccctagaccctccatttttctcttagcgaggaagcagaaaaccaaactcaaatacaagaaatattagtcaatacaaagtggccaaatttctcgagacagaaaaagacaggtgggatgtagaaagggacttaaaagttgaaaccattggccccatgtactgcggcaaaatatttctcttcttctggcagtacagtagcttgcatcatatgtgacatcctctttatagtacaggaagtcaagaatagcccgagtgctcagcacatatgctacatgctcccaactacattaccccttctttgaagtggcgagcaaagcgagaagtttgagtggggcccaaaacctgagtggggcctaaatagaaacctacttactaatggacctttatagctacaatgaataagataaaaactccactgaaaccagaaaattgagtgggaccccgtgccccagtcagcccaacgtgagcctacccttgcttctctgctcagacatgcacataaactgaattcgtctcatttatttatgtttaaggtgtgtcgtttattcacttgctccagctgctgctatcaccccaaccaaatcaattttgaaggccgaattatctaacaacatttccaaagggaatatttcaagttcacctacacggccgcaccttctcccgaacaacgtggagcaagcaatcatttcctgtagaataatatgcgaataatgaagtcataacaccttttgatttgaacaaagggaaaacaataaatatgag

SEQ ID NO: 31386 - DNA, 2105 bp, Zea Mays
gtcatccgcgcgcccccgctctcctccatctgccgcgtgaagctctcccgaaaacctcctccacatcagcgccccccgccatgcccctgtatctcgcctagcacacgccgcgcccacgcaggcagccgtggatctcgcccccaccgtcgagcttccatggtaggcatcctcttccatactaggcggccatggcatgaacccatcccctatccgcgcccccatcgcacgggccctaatcctagaatggtgccttcctccttctctgtcgcctctgccctactcagaccttcgagacttccactggcgatacacacccactagggaattcttagaccaacatgaggaggaagaaatgcctcatgttattagtgttacaccagacgtacaagaggccattggacgggaatgaggagctatctgcaaactatcttcttgagcaagctggtgaggaagattaagccagagtagttttcgtatgggtacaaacatagctttgcgtcaatcgatgccaggcaaatgtagaacgcttggtagccggtcagcgctatgtgtagaacacatactccagagatgaacatggatcacgagaactggaataattgctgtcagccatggacccatgacatcggtggtttcgcgcacctcaaagacatgggtggggaggcatcgcggctgctgcacgccctctagagaatgcttatcgatcatcaggtgcattcaattacgctttcggttgctgcattgagaaatgaatcagtcgaactgtgaaccaactacttgaaatttcacgtgatgtggggtatagtggcaatgcataagcccacatggagcactgggtcttcgaggtgacacactgacattgcaactgaacacacttgtctatgtggctatggctacggtatacatagagtcgtacattaggtagcttattcaatcaaataatgtccggttttgtcatgaaagtgataataatcttctatataaacttggtcaaacgtaagacatttcacttaaaataaaaccagaacgtctctctttttcggtggagatagtattaatataatttcgaaaattctgatctgcgagttggtactttgataattcaaatccatgttgccaaaagctaactgatataatactttcttcaacagtaactatcatactatctgcatcttctatgatctattaaagtacctcacaagagatccaattaatgattcacacctgcaagataacacctgtagtggaaatccagttttctggtgtgagtctaaatatttcagaaacaatgaaagcatagaagaaaatgctgcagtaggacaatacctaattatcatgtgcatgcccctagaccctccatttttctcttagcgaggaagcagaaaaccaaactcaaatacaagaaatattagtcaatacaaagtggccaaatttctcgagacagaaaaagacaggtgggatgtagaaagggacttaaaagttgaaaccattggccccatgtactgcggcaaaatatttctcttcttctggcagtacagtagcttgcatcatatgtgacatcctctttatagtacaggaagtcaagaatagcccgagtgctcagcacatatgctacatgctcccaactacattaccccttctttgaagtggcgagcaaagcgagaagtttgagtggggcccaaaacctgagtggggcctaaatagaaacctacttactaatggacctttatagctacaatgaataagataaaaactccactgaaaccagaaaattgagtgggaccccgtgccccagtcagcccaacgtgagcctacccttgcttctctgctcagacatgcacataaactgaattcgtctcatttatttatgtttaaggtgtgtcgtttattcacttgctccagctgctgctatcaccccaaccaaatcaattttgaaggccgaattatctaacaacatttccaaagggaatatttcaagttcacctacacggccgcaccttctcccgaacaacgtggagcaagcaatcatttcctgtagaataatatgcgaataatgaagtcataacaccttttgatttgaacaaagggaaaacaataaatatgag

SEQ ID NO: 31387 - DNA, 2003 bp, Zea Mays
gtcatccgcgcgcccccgctctcctccatctgccgcgtgaagctctcccgaaaacctcctccacatcagcgccccccgccatgcccctgtatctcgcctagcacacgccgcgcccacgcaggcagccgtggatctcgcccccaccgtcgagcttccatggtaggcatcctcttccatactaggcggccatggcatgaacccatcccctatccgcgcccccatcgcacgggccctaatcctagaatggtgccttcctccttctctgtcgcctctgccctactcagaccttcgagacttccactggcgatacacacccactagggtacaaacatagctttgcgtcaatcgatgccaggcaaatgtagaacgcttggtagccggtcagcgctatgtgtagaacacatactccagagatgaacatggatcacgagaactggaataattgctgtcagctgcattgaaacaggcagatcctattaacaactccgcattggctctctgccccagccatggacccatgacatcggtggtttcgcgcacctcaaagacatgggtggggaggcatcgcggctgctgcacgccctctagagaatgcttatcgatcatcaggtgcattcaattacgctttcggttgctgcattgagaaatgaatcagtcgaactgtgaaccaactacttgaaatttcacgtgatgtggggtatagtggcaatgcataagcccacatggagcactgggtcttcgaggtgacacactgacattgcaactgaacacacttgtctatgtggctatggctacggtatacatagagtcgtacattaggtagcttattcaatcaaataatgtccggttttgtcatgaaagtgataataatcttctatataaacttggtcaaacgtaagacatttcacttaaaataaaaccagaacgtctctctttttcggtggagatagtattaatataatttcgaaaattctgatctgcgagttggtactttgataattcaaatccatgttgccaaaagctaactgatataatactttcttcaacagtaactatcatactatctgcatcttctatgatctattaaagtacctcacaagagatccaattaatgattcacacctgcaagataacacctgtagtggaaatccagttttctggtgtgagtctaaatatttcagaaacaatgaaagcatagaagaaaatgctgcagtaggacaatacctaattatcatgtgcatgcccctagaccctccatttttctcttagcgaggaagcagaaaaccaaactcaaatacaagaaatattagtcaatacaaagtggccaaatttctcgagacagaaaaagacaggtgggatgtagaaagggacttaaaagttgaaaccattggccccatgtactgcggcaaaatatttctcttcttctggcagtacagtagcttgcatcatatgtgacatcctctttatagtacaggaagtcaagaatagcccgagtgctcagcacatatgctacatgctcccaactacattaccccttctttgaagtggcgagcaaagcgagaagtttgagtggggcccaaaacctgagtggggcctaaatagaaacctacttactaatggacctttatagctacaatgaataagataaaaactccactgaaaccagaaaattgagtgggaccccgtgccccagtcagcccaacgtgagcctacccttgcttctctgctcagacatgcacataaactgaattcgtctcatttatttatgtttaaggtgtgtcgtttattcacttgctccagctgctgctatcaccccaaccaaatcaattttgaaggccgaattatctaacaacatttccaaagggaatatttcaagttcacctacacggccgcaccttctcccgaacaacgtggagcaagcaatcatttcctgtagaataatatgcgaataatgaagtcataacaccttttgatttgaacaaagggaaaacaataaatatgag

SEQ ID NO: 31388 - DNA, 2149 bp, Zea Mays
gtcatccgcgcgcccccgctctcctccatctgccgcgtgaagctctcccgaaaacctcctccacatcagcgccccccgccatgcccctgtatctcgcctagcacacgccgcgcccacgcaggcagccgtggatctcgcccccaccgtcgagcttccatggtaggcatcctcttccatactaggcggccatggcatgaacccatcccctatccgcgcccccatcgcacgggccctaatcctagaatggtgccttcctccttctctgtcgcctctgccctactcagaccttcgagacttccactggcgatacacacccactagaccaacatgaggaggaagaaatgcctcatgttattagtgttacaccagacgtacaagaggccattggacgggaatgaggagctatctgcaaactatcttcttgagcaagctggtgaggaagattaagccagagtagttttcgtatgggtacaaacatagctttgcgtcaatcgatgccaggcaaatgtagaacgcttggtagccggtcagcgctatgtgtagaacacatactccagagatgaacatggatcacgagaactggaataattgctgtcagctgcattgaaacaggcagatcctattaacaactccgcattggctctctgccccagccatggacccatgacatcggtggtttcgcgcacctcaaagacatgggtggggaggcatcgcggctgctgcacgccctctagagaatgcttatcgatcatcaggtgcattcaattacgctttcggttgctgcattgagaaatgaatcagtcgaactgtgaaccaactacttgaaatttcacgtgatgtggggtatagtggcaatgcataagcccacatggagcactgggtcttcgaggtgacacactgacattgcaactgaacacacttgtctatgtggctatggctacggtatacatagagtcgtacattaggtagcttattcaatcaaataatgtccggttttgtcatgaaagtgataataatcttctatataaacttggtcaaacgtaagacatttcacttaaaataaaaccagaacgtctctctttttcggtggagatagtattaatataatttcgaaaattctgatctgcgagttggtactttgataattcaaatccatgttgccaaaagctaactgatataatactttcttcaacagtaactatcatactatctgcatcttctatgatctattaaagtacctcacaagagatccaattaatgattcacacctgcaagataacacctgtagtggaaatccagttttctggtgtgagtctaaatatttcagaaacaatgaaagcatagaagaaaatgctgcagtaggacaatacctaattatcatgtgcatgcccctagaccctccatttttctcttagcgaggaagcagaaaaccaaactcaaatacaagaaatattagtcaatacaaagtggccaaatttctcgagacagaaaaagacaggtgggatgtagaaagggacttaaaagttgaaaccattggccccatgtactgcggcaaaatatttctcttcttctggcagtacagtagcttgcatcatatgtgacatcctctttatagtacaggaagtcaagaatagcccgagtgctcagcacatatgctacatgctcccaactacattaccccttctttgaagtggcgagcaaagcgagaagtttgagtggggcccaaaacctgagtggggcctaaatagaaacctacttactaatggacctttatagctacaatgaataagataaaaactccactgaaaccagaaaattgagtgggaccccgtgccccagtcagcccaacgtgagcctacccttgcttctctgctcagacatgcacataaactgaattcgtctcatttatttatgtttaaggtgtgtcgtttattcacttgctccagctgctgctatcaccccaaccaaatcaattttgaaggccgaattatctaacaacatttccaaagggaatatttcaagttcacctacacggccgcaccttctcccgaacaacgtggagcaagcaatcatttcctgtagaataatatgcgaataatgaagtcataacaccttttgatttgaacaaagggaaaacaataaatatgag

SEQ ID NO: 31389 - DNA, 2179 bp, Zea Mays
gtcatccgcgcgcccccgctctcctccatctgccgcgtgaagctctcccgaaaacctcctccacatcagcgccccccgccatgcccctgtatctcgcctagcacacgccgcgcccacgcaggcagccgtggatctcgcccccaccgtcgagcttccatggtaggcatcctcttccatactaggcggccatggcatgaacccatcccctatccgcgcccccatcgcacgggccctaatcctagaatggtgccttcctccttctctgtcgcctctgccctactcagaccttcgagacttccactggcgatacacacccactagggaattcttagaccaacatgaggaggaagaaatgcctcatgttattagtgttacaccagacgtacaagaggccattggacggcattctttgcctgcgataggaatgaggagctatctgcaaactatcttcttgagcaagctggtgaggaagattaagccagagtagttttcgtatgggtacaaacatagctttgcgtcaatcgatgccaggcaaatgtagaacgcttggtagccggtcagcgctatgtgtagaacacatactccagagatgaacatggatcacgagaactggaataattgctgtcagctgcattgaaacaggcagatcctattaacaactccgcattggctctctgccccagccatggacccatgacatcggtggtttcgcgcacctcaaagacatgggtggggaggcatcgcggctgctgcacgccctctagagaatgcttatcgatcatcaggtgcattcaattacgctttcggttgctgcattgagaaatgaatcagtcgaactgtgaaccaactacttgaaatttcacgtgatgtggggtatagtggcaatgcataagcccacatggagcactgggtcttcgaggtgacacactgacattgcaactgaacacacttgtctatgtggctatggctacggtatacatagagtcgtacattaggtagcttattcaatcaaataatgtccggttttgtcatgaaagtgataataatcttctatataaacttggtcaaacgtaagacatttcacttaaaataaaaccagaacgtctctctttttcggtggagatagtattaatataatttcgaaaattctgatctgcgagttggtactttgataattcaaatccatgttgccaaaagctaactgatataatactttcttcaacagtaactatcatactatctgcatcttctatgatctattaaagtacctcacaagagatccaattaatgattcacacctgcaagataacacctgtagtggaaatccagttttctggtgtgagtctaaatatttcagaaacaatgaaagcatagaagaaaatgctgcagtaggacaatacctaattatcatgtgcatgcccctagaccctccatttttctcttagcgaggaagcagaaaaccaaactcaaatacaagaaatattagtcaatacaaagtggccaaatttctcgagacagaaaaagacaggtgggatgtagaaagggacttaaaagttgaaaccattggccccatgtactgcggcaaaatatttctcttcttctggcagtacagtagcttgcatcatatgtgacatcctctttatagtacaggaagtcaagaatagcccgagtgctcagcacatatgctacatgctcccaactacattaccccttctttgaagtggcgagcaaagcgagaagtttgagtggggcccaaaacctgagtggggcctaaatagaaacctacttactaatggacctttatagctacaatgaataagataaaaactccactgaaaccagaaaattgagtgggaccccgtgccccagtcagcccaacgtgagcctacccttgcttctctgctcagacatgcacataaactgaattcgtctcatttatttatgtttaaggtgtgtcgtttattcacttgctccagctgctgctatcaccccaaccaaatcaattttgaaggccgaattatctaacaacatttccaaagggaatatttcaagttcacctacacggccgcaccttctcccgaacaacgtggagcaagcaatcatttcctgtagaataatatgcgaataatgaagtcataacaccttttgatttgaacaaagggaaaacaataaatatgag

SEQ ID NO: 31390 - DNA, 2048 bp, Zea Mays
gtcatccgcgcgcccccgctctcctccatctgccgcgtgaagctctcccgaaaacctcctccacatcagcgccccccgccatgcccctgtatctcgcctagcacacgccgcgcccacgcaggcagccgtggatctcgcccccaccgtcgagcttccatggtaggcatcctcttccatactaggcggccatggcatgaacccatcccctatccgcgcccccatcgcacgggccctaatcctagaatggtgccttcctccttctctgtcgcctctgccctactcagaccttcgagacttccactggcgatacacacccactagggaattcttagaccaacatgaggaggaagaaatgcctcatgttattagtgttacaccagacgtacaagaggccattggacggcattctttgcctgcgataggaatgaggagctatctgcaaactatcttcttgagcaagctggtgaggaagattaagccagagtagttttcgtatgctgcattgaaacaggcagatcctattaacaactccgcattggctctctgccccagccatggacccatgacatcggtggtttcgcgcacctcaaagacatgggtggggaggcatcgcggctgctgcacgccctctagagaatgcttatcgatcatcaggtgcattcaattacgctttcggttgctgcattgagaaatgaatcagtcgaactgtgaaccaactacttgaaatttcacgtgatgtggggtatagtggcaatgcataagcccacatggagcactgggtcttcgaggtgacacactgacattgcaactgaacacacttgtctatgtggctatggctacggtatacatagagtcgtacattaggtagcttattcaatcaaataatgtccggttttgtcatgaaagtgataataatcttctatataaacttggtcaaacgtaagacatttcacttaaaataaaaccagaacgtctctctttttcggtggagatagtattaatataatttcgaaaattctgatctgcgagttggtactttgataattcaaatccatgttgccaaaagctaactgatataatactttcttcaacagtaactatcatactatctgcatcttctatgatctattaaagtacctcacaagagatccaattaatgattcacacctgcaagataacacctgtagtggaaatccagttttctggtgtgagtctaaatatttcagaaacaatgaaagcatagaagaaaatgctgcagtaggacaatacctaattatcatgtgcatgcccctagaccctccatttttctcttagcgaggaagcagaaaaccaaactcaaatacaagaaatattagtcaatacaaagtggccaaatttctcgagacagaaaaagacaggtgggatgtagaaagggacttaaaagttgaaaccattggccccatgtactgcggcaaaatatttctcttcttctggcagtacagtagcttgcatcatatgtgacatcctctttatagtacaggaagtcaagaatagcccgagtgctcagcacatatgctacatgctcccaactacattaccccttctttgaagtggcgagcaaagcgagaagtttgagtggggcccaaaacctgagtggggcctaaatagaaacctacttactaatggacctttatagctacaatgaataagataaaaactccactgaaaccagaaaattgagtgggaccccgtgccccagtcagcccaacgtgagcctacccttgcttctctgctcagacatgcacataaactgaattcgtctcatttatttatgtttaaggtgtgtcgtttattcacttgctccagctgctgctatcaccccaaccaaatcaattttgaaggccgaattatctaacaacatttccaaagggaatatttcaagttcacctacacggccgcaccttctcccgaacaacgtggagcaagcaatcatttcctgtagaataatatgcgaataatgaagtcataacaccttttgatttgaacaaagggaaaacaataaatatgag

SEQ ID NO: 31391 - DNA, 2160 bp, Zea Mays
gtcatccgcgcgcccccgctctcctccatctgccgcgtgaagctctcccgaaaacctcctccacatcagcgccccccgccatgcccctgtatctcgcctagcacacgccgcgcccacgcaggcagccgtggatctcgcccccaccgtcgagcttccatggtaggcatcctcttccatactaggcggccatggcatgaacccatcccctatccgcgcccccatcgcacgggccctaatcctagaatggtgccttcctccttctctgtcgcctctgccctactcagaccttcgagacttccactggcgatacacacccactagggaattcttagaccaacatgaggaggaagaaatgcctcatgttattagtgttacaccagacgtacaagaggccattggacgggaatgaggagctatctgcaaactatcttcttgagcaagctggtgaggaagattaagccagagtagttttcgtatgggtacaaacatagctttgcgtcaatcgatgccaggcaaatgtagaacgcttggtagccggtcagcgctatgtgtagaacacatactccagagatgaacatggatcacgagaactggaataattgctgtcagctgcattgaaacaggcagatcctattaacaactccgcattggctctctgccccagccatggacccatgacatcggtggtttcgcgcacctcaaagacatgggtggggaggcatcgcggctgctgcacgccctctagagaatgcttatcgatcatcaggtgcattcaattacgctttcggttgctgcattgagaaatgaatcagtcgaactgtgaaccaactacttgaaatttcacgtgatgtggggtatagtggcaatgcataagcccacatggagcactgggtcttcgaggtgacacactgacattgcaactgaacacacttgtctatgtggctatggctacggtatacatagagtcgtacattaggtagcttattcaatcaaataatgtccggttttgtcatgaaagtgataataatcttctatataaacttggtcaaacgtaagacatttcacttaaaataaaaccagaacgtctctctttttcggtggagatagtattaatataatttcgaaaattctgatctgcgagttggtactttgataattcaaatccatgttgccaaaagctaactgatataatactttcttcaacagtaactatcatactatctgcatcttctatgatctattaaagtacctcacaagagatccaattaatgattcacacctgcaagataacacctgtagtggaaatccagttttctggtgtgagtctaaatatttcagaaacaatgaaagcatagaagaaaatgctgcagtaggacaatacctaattatcatgtgcatgcccctagaccctccatttttctcttagcgaggaagcagaaaaccaaactcaaatacaagaaatattagtcaatacaaagtggccaaatttctcgagacagaaaaagacaggtgggatgtagaaagggacttaaaagttgaaaccattggccccatgtactgcggcaaaatatttctcttcttctggcagtacagtagcttgcatcatatgtgacatcctctttatagtacaggaagtcaagaatagcccgagtgctcagcacatatgctacatgctcccaactacattaccccttctttgaagtggcgagcaaagcgagaagtttgagtggggcccaaaacctgagtggggcctaaatagaaacctacttactaatggacctttatagctacaatgaataagataaaaactccactgaaaccagaaaattgagtgggaccccgtgccccagtcagcccaacgtgagcctacccttgcttctctgctcagacatgcacataaactgaattcgtctcatttatttatgtttaaggtgtgtcgtttattcacttgctccagctgctgctatcaccccaaccaaatcaattttgaaggccgaattatctaacaacatttccaaagggaatatttcaagttcacctacacggccgcaccttctcccgaacaacgtggagcaagcaatcatttcctgtagaataatatgcgaataatgaagtcataacaccttttgatttgaacaaagggaaaacaataaatatgag

SEQ ID NO: 31392 - DNA, 2374 bp, Zea Mays
gtcatccgcgcgcccccgctctcctccatctgccgcgtgaagctctcccgaaaacctcctccacatcagcgccccccgccatgcccctgtatctcgcctagcacacgccgcgcccacgcaggcagccgtggatctcgcccccaccgtcgagcttccatggtaggcatcctcttccatactaggcggccatggcatgaacccatcccctatccgcgcccccatcgcacgggccctaatcctagaatggtgccttcctccttctctgtcgcctctgccctactcagaccttcgagacttccactggcgatacacacccactagggaattcttagaccaacatgaggaggaagaaatgcctcatgttattagtgttacaccagacgtacaagaggccattggacgggaatgaggagctatctgcaaactatcttcttgagcaagctggtgaggaagattaagccagagtagttttcgtatgggtacaaacatagctttgcgtcaatcgatgccaggcaaatgtagaacgcttggtagccggtcagcgctatgtgtagaacacatactccagagatgaacatggatcacgagaactggaataattgctgtcaggtttttctcattacctgaactccattatgtgcttgggttaaccctaccaagatgtaacactgtctgcctcctgttttcctaccaagcaaatttagctccaaatgaaatgttatgttctctgaattctaatgcatataagccacacaaatgattttttacatccaaagtcacctgaccatgaatatgttgagttttaattgctcttttatgtcagctgcattgaaacaggcagatcctattaacaactccgcattggctctctgccccagccatggacccatgacatcggtggtttcgcgcacctcaaagacatgggtggggaggcatcgcggctgctgcacgccctctagagaatgcttatcgatcatcaggtgcattcaattacgctttcggttgctgcattgagaaatgaatcagtcgaactgtgaaccaactacttgaaatttcacgtgatgtggggtatagtggcaatgcataagcccacatggagcactgggtcttcgaggtgacacactgacattgcaactgaacacacttgtctatgtggctatggctacggtatacatagagtcgtacattaggtagcttattcaatcaaataatgtccggttttgtcatgaaagtgataataatcttctatataaacttggtcaaacgtaagacatttcacttaaaataaaaccagaacgtctctctttttcggtggagatagtattaatataatttcgaaaattctgatctgcgagttggtactttgataattcaaatccatgttgccaaaagctaactgatataatactttcttcaacagtaactatcatactatctgcatcttctatgatctattaaagtacctcacaagagatccaattaatgattcacacctgcaagataacacctgtagtggaaatccagttttctggtgtgagtctaaatatttcagaaacaatgaaagcatagaagaaaatgctgcagtaggacaatacctaattatcatgtgcatgcccctagaccctccatttttctcttagcgaggaagcagaaaaccaaactcaaatacaagaaatattagtcaatacaaagtggccaaatttctcgagacagaaaaagacaggtgggatgtagaaagggacttaaaagttgaaaccattggccccatgtactgcggcaaaatatttctcttcttctggcagtacagtagcttgcatcatatgtgacatcctctttatagtacaggaagtcaagaatagcccgagtgctcagcacatatgctacatgctcccaactacattaccccttctttgaagtggcgagcaaagcgagaagtttgagtggggcccaaaacctgagtggggcctaaatagaaacctacttactaatggacctttatagctacaatgaataagataaaaactccactgaaaccagaaaattgagtgggaccccgtgccccagtcagcccaacgtgagcctacccttgcttctctgctcagacatgcacataaactgaattcgtctcatttatttatgtttaaggtgtgtcgtttattcacttgctccagctgctgctatcaccccaaccaaatcaattttgaaggccgaattatctaacaacatttccaaagggaatatttcaagttcacctacacggccgcaccttctcccgaacaacgtggagcaagcaatcatttcctgtagaataatatgcgaataatgaagtcataacaccttttgatttgaacaaagggaaaacaataaatatgag

SEQ ID NO: 31393 - DNA, 2029 bp, Zea Mays
gtcatccgcgcgcccccgctctcctccatctgccgcgtgaagctctcccgaaaacctcctccacatcagcgccccccgccatgcccctgtatctcgcctagcacacgccgcgcccacgcaggcagccgtggatctcgcccccaccgtcgagcttccatggtaggcatcctcttccatactaggcggccatggcatgaacccatcccctatccgcgcccccatcgcacgggccctaatcctagaatggtgccttcctccttctctgtcgcctctgccctactcagaccttcgagacttccactggcgatacacacccactagggaattcttagaccaacatgaggaggaagaaatgcctcatgttattagtgttacaccagacgtacaagaggccattggacgggaatgaggagctatctgcaaactatcttcttgagcaagctggtgaggaagattaagccagagtagttttcgtatgctgcattgaaacaggcagatcctattaacaactccgcattggctctctgccccagccatggacccatgacatcggtggtttcgcgcacctcaaagacatgggtggggaggcatcgcggctgctgcacgccctctagagaatgcttatcgatcatcaggtgcattcaattacgctttcggttgctgcattgagaaatgaatcagtcgaactgtgaaccaactacttgaaatttcacgtgatgtggggtatagtggcaatgcataagcccacatggagcactgggtcttcgaggtgacacactgacattgcaactgaacacacttgtctatgtggctatggctacggtatacatagagtcgtacattaggtagcttattcaatcaaataatgtccggttttgtcatgaaagtgataataatcttctatataaacttggtcaaacgtaagacatttcacttaaaataaaaccagaacgtctctctttttcggtggagatagtattaatataatttcgaaaattctgatctgcgagttggtactttgataattcaaatccatgttgccaaaagctaactgatataatactttcttcaacagtaactatcatactatctgcatcttctatgatctattaaagtacctcacaagagatccaattaatgattcacacctgcaagataacacctgtagtggaaatccagttttctggtgtgagtctaaatatttcagaaacaatgaaagcatagaagaaaatgctgcagtaggacaatacctaattatcatgtgcatgcccctagaccctccatttttctcttagcgaggaagcagaaaaccaaactcaaatacaagaaatattagtcaatacaaagtggccaaatttctcgagacagaaaaagacaggtgggatgtagaaagggacttaaaagttgaaaccattggccccatgtactgcggcaaaatatttctcttcttctggcagtacagtagcttgcatcatatgtgacatcctctttatagtacaggaagtcaagaatagcccgagtgctcagcacatatgctacatgctcccaactacattaccccttctttgaagtggcgagcaaagcgagaagtttgagtggggcccaaaacctgagtggggcctaaatagaaacctacttactaatggacctttatagctacaatgaataagataaaaactccactgaaaccagaaaattgagtgggaccccgtgccccagtcagcccaacgtgagcctacccttgcttctctgctcagacatgcacataaactgaattcgtctcatttatttatgtttaaggtgtgtcgtttattcacttgctccagctgctgctatcaccccaaccaaatcaattttgaaggccgaattatctaacaacatttccaaagggaatatttcaagttcacctacacggccgcaccttctcccgaacaacgtggagcaagcaatcatttcctgtagaataatatgcgaataatgaagtcataacaccttttgatttgaacaaagggaaaacaataaatatgag

SEQ ID NO: 31394 - DNA, 2393 bp, Zea Mays
gtcatccgcgcgcccccgctctcctccatctgccgcgtgaagctctcccgaaaacctcctccacatcagcgccccccgccatgcccctgtatctcgcctagcacacgccgcgcccacgcaggcagccgtggatctcgcccccaccgtcgagcttccatggtaggcatcctcttccatactaggcggccatggcatgaacccatcccctatccgcgcccccatcgcacgggccctaatcctagaatggtgccttcctccttctctgtcgcctctgccctactcagaccttcgagacttccactggcgatacacacccactagggaattcttagaccaacatgaggaggaagaaatgcctcatgttattagtgttacaccagacgtacaagaggccattggacggcattctttgcctgcgataggaatgaggagctatctgcaaactatcttcttgagcaagctggtgaggaagattaagccagagtagttttcgtatgggtacaaacatagctttgcgtcaatcgatgccaggcaaatgtagaacgcttggtagccggtcagcgctatgtgtagaacacatactccagagatgaacatggatcacgagaactggaataattgctgtcaggtttttctcattacctgaactccattatgtgcttgggttaaccctaccaagatgtaacactgtctgcctcctgttttcctaccaagcaaatttagctccaaatgaaatgttatgttctctgaattctaatgcatataagccacacaaatgattttttacatccaaagtcacctgaccatgaatatgttgagttttaattgctcttttatgtcagctgcattgaaacaggcagatcctattaacaactccgcattggctctctgccccagccatggacccatgacatcggtggtttcgcgcacctcaaagacatgggtggggaggcatcgcggctgctgcacgccctctagagaatgcttatcgatcatcaggtgcattcaattacgctttcggttgctgcattgagaaatgaatcagtcgaactgtgaaccaactacttgaaatttcacgtgatgtggggtatagtggcaatgcataagcccacatggagcactgggtcttcgaggtgacacactgacattgcaactgaacacacttgtctatgtggctatggctacggtatacatagagtcgtacattaggtagcttattcaatcaaataatgtccggttttgtcatgaaagtgataataatcttctatataaacttggtcaaacgtaagacatttcacttaaaataaaaccagaacgtctctctttttcggtggagatagtattaatataatttcgaaaattctgatctgcgagttggtactttgataattcaaatccatgttgccaaaagctaactgatataatactttcttcaacagtaactatcatactatctgcatcttctatgatctattaaagtacctcacaagagatccaattaatgattcacacctgcaagataacacctgtagtggaaatccagttttctggtgtgagtctaaatatttcagaaacaatgaaagcatagaagaaaatgctgcagtaggacaatacctaattatcatgtgcatgcccctagaccctccatttttctcttagcgaggaagcagaaaaccaaactcaaatacaagaaatattagtcaatacaaagtggccaaatttctcgagacagaaaaagacaggtgggatgtagaaagggacttaaaagttgaaaccattggccccatgtactgcggcaaaatatttctcttcttctggcagtacagtagcttgcatcatatgtgacatcctctttatagtacaggaagtcaagaatagcccgagtgctcagcacatatgctacatgctcccaactacattaccccttctttgaagtggcgagcaaagcgagaagtttgagtggggcccaaaacctgagtggggcctaaatagaaacctacttactaatggacctttatagctacaatgaataagataaaaactccactgaaaccagaaaattgagtgggaccccgtgccccagtcagcccaacgtgagcctacccttgcttctctgctcagacatgcacataaactgaattcgtctcatttatttatgtttaaggtgtgtcgtttattcacttgctccagctgctgctatcaccccaaccaaatcaattttgaaggccgaattatctaacaacatttccaaagggaatatttcaagttcacctacacggccgcaccttctcccgaacaacgtggagcaagcaatcatttcctgtagaataatatgcgaataatgaagtcataacaccttttgatttgaacaaagggaaaacaataaatatgag

SEQ ID NO: 31395 - DNA, 2750 bp, Zea Mays
aagccccttctccgccttcattccccaaacaccaaaacccggctccgcgtctccgccgaagcgggaggcgggcgggggcaggcacctgttcgcgctgcgcgaaattacactccccctccctctcttttctcactccgattccccactcgcgatggccgcgcctcgacccccgccgctgggggccctgggaggcgttgtcggtggcagcggtggcgccgcccccgccgccggggcgcccgccggagtcagcatgcggatgttccacggcgagtcgttccttggcgagatggaggtcttcccgatgaagcgggacggcgaggggggcctccctttcccgaccaacgagatccgcgtcagccacttctcgccggcgagcgagaggtgcccgcctctcgctatcctgcagaccatcgcgcccttctccgtacggtgcaagttgcagaccaagcttacgcctcccaacccgggcctccagcgcttgtatctcacttgtttcaacgagttcaagagtgctgtggtagtagttggggatgaggagctgcacctggtggcaatgccgaccaaatcagggaaggtgccatgcttttggtgctgctcagcacgctcggggctctatgcagcgtccgttggcatgctcaacttgcgctgtcttgccattgtgtttgatcttgatgagacccttattgttgctaacacaatgaagtccttcgaggatcggatcgagatgctctcccgcagaatggatgtcgaagatgatcctatcagaatagcagggatgtctgcagaaatcaaacgatatattgaggacaaagagcttctcaaagaattcattgacatggatacagttacggacaatggcaaaatagttggaacccagaaagaggaggttcaacctatgtctggtggtcaggagcgtgttttccgtccagttatcagactgcctgacaggaatgcaattttgactcgcatcaatccagagaatcgtgataccagtgtttttgtaaagctaagacctgcttgggaagaattgaggagttacctaactgcaaagggacgaaaaagatttgaggtttatgtatgtacaatggctgagagagattatgctcttgaaatgtggagacttcttgatccagaaggcaacttaataagtccacaacagctctcagaacgcgtaaattgtgtaaagtcaggttccaaaaagtccctgcagaatgttttccgagacagaagatgccatccaaagatggccatggtaattgatgaccgacttaatgtttgggatgataaagatcaacacagagttcatgtcgtccctgcatatattccatactatgctccacaagcggagatggccaatgctgttccagttctatgtgttgcaaggaatgttgcttgcaatgttcgtggtgggtttttcagagagtttgatgagaatctattgaggaaagtgttcgaactatactatgaaaatgggttattggatcttccatatgctccagatgttggtgactatttagtctgcgaggataccagttttgtaccaggcaacaaagatcaggctcctatacctgagggcatgaggggaactgaagtagagaagagattaaatgggcagtcatatcggtgggagcaaagggaaggacaacaaatgccatcttcaatccgttcaccagatgacgagggaatgcctatccgaggtactggaggagttaggaatatccagccaaatgggggctcgctagcaataaccccctcggtatatgtcacagtgttgcaagaaattgggcggctgtgcgactccaaggtggaatttagatctactgtaagcagtgtcagaagtatgctattttctgtagaggttctgtttaataatgaaaaaattggaataggcgtcggaaaaacaagagatgaagctcaagttcaagctgctgagaaagctctccaaaatttggagaacagttatttgtcatctggtgctccagttgctggagttcctaagaaagattcaaggaagtcccctgggaggagtgtgcttggaggaccaacatgtagtatttcgagatgaagtccagaattctagcccagccaggaatgaagaatatcatttccaggttgaactagcaggattgattctcgggaggggcgttggttcggacagagaggccgcgaagcttctggctgcagaagaggcactgaagaccttgaaatcaaccactgacccacaaattaagaagtatctgagacctgtaagatgcaatggctgattcccttccacgttctgagctccgcaaccaaatgagctttagctcatttcaccgttacagatgtcattgatttagcagaagtgcatcaccctttctgtgagtatggttgacatctcacctcgagcacatgatgtgtgccaaacacatgtcttgttctggaaatcctggctttgaaggtggtaacatagagagcggacatggtgctttatgcattcttttgaccatcatacaagtatagatgttatgtcttgtttaggatagtggcatagttggctgtaaacaagcaggagagtagatgcggatctaaaattcttgttttgaaggttatgctgactcattaacagttatggatcgttaaaaattgaatgcctgtaccagttgtcatgtttacatgtctgttataaagtgctaaatcctttacaaacttatttcaactacaaataaattcaagtgctcgtatttgttgagttatacattcacatctat

SEQ ID NO: 31396 - DNA, 2200 bp, Zea Mays
gccccttctccgccttcattccccaaacaccaaaacccggctccgcgtctccgccgaagcgggaggcgggcgggggcaggcacctgttcgcgctgcgcgaaattacactccccctccctctcttttctcactccgattccccactcgcgatggccgcgcctcgacccccgccgctgggggccctgggaggcgttgtcggtggcagcggtggcgccgcccccgccgccggggcgcccgccggagtcagcatgcggatgttccacggcgagtcgttccttggcgagatggaggtcttcccgatgaagcgggacggcgaggggggcctccctttcccgaccaacgagatccgcgtcagccacttctcgccggcgagcgagaggtgcccgcctctcgctatcctgcagaccatcgcgcccttctccgtacggtgcaagttgcagaccaagcttacgcctcccaacccgggcctccagcgcttgtatctcacttgtttcaacgagttcaagagtgctgtggtagtagttggggatgaggagctgcacctggtggcaatgccgaccaaatcagggaaggtgccatgcttttggtgctgctcagcacgctcggggctctatgcagcgtccgttggcatgctcaacttgcgctgtcttgccattgtgtttgatcttgatgagacccttattgttgctaacacaatgaagtccttcgaggatcggatcgagatgctctcccgcagaatggatgtcgaagatgatcctatcagaatagcagggatgtctgcagaaatcaaacgatatattgaggacaaagagcttctcaaagaattcattgacatggatacagttacggacaatggcaaaatagttggaacccagaaagaggaggttcaacctatgtctggtggtcaggagcgtgttttccgtccagttatcagactgcctgacaggaatgcaattttgactcgcatcaatccagagacctgcttgggaagaattgaggagttacctaactgcaaagggacgaaaaagatttgaggtttatgtatgtacaatggctgagagagattatgctcttgaaatgtggagacttcttgatccagaaggcaacttaataagtccacaacagctctcagaacgcgtaaattgtgtaaagtcaggttccaaaaagtccctgcagaatgttttccgagacagaagatgccatccaaagatggccatggtaattgatgaccgacttaatgtttgggatgataaagatcaacacagagttcatgtcgtccctgcatatattccatactatgctccacaagcggagatggccaatgctgttccagttctatgtgttgcaaggaatgttgcttgcaatgttcgtggtgggtttttcagagagtttgatgagaatctattgaggaaagtgttcgaactatactatgaaaatgggttattggatcttccatatgctccagatgttggtgactatttagtctgcgaggataccagttttgtaccaggcaacaaagatcaggctcctatacctgagggcatgaggggaactgaagtagagaagagattaaatgggcagtcatatcggtgggagcaaagggaaggacaacaaatgccatcttcaatccgttcaccagatgacgagggaatgcctatccgaggtactggaggagttaggaatatccagccaaatgggggctcgctagcaataaccccctcggtatatgtcacagtgttgcaagaaattgggcggctgtgcgactccaaggtggaatttagatctactgtaagcagtgtcagaagtatgctattttctgtagaggttctgtttaataatgaaaaaattggaataggcgtcggaaaaacaagagatgaagctcaagttcaagctgctgagaaagctctccaaaatttggagagtgagtatatatcctctacatcctgtgtacaccaggctttgctatgtactttaaaaagttacttgtaacagatgtaccatagtcaccaagcatcctggaagccctaaaatgctttcatgtagttttatagaaaatgtccttttaagtatcggtaaatatatgaaagtggtctgtaaatgctttactgtcattgtgttttatggctttgacagcctacgatttgtcatgcgatgaatcagttttcatcttggcttatctattgggtttttggattttatc

SEQ ID NO: 31397 - DNA, 2890 bp, Zea Mays
gccccttctccgccttcattccccaaacaccaaaacccggctccgcgtctccgccgaagcgggaggcgggcgggggcaggcacctgttcgcgctgcgcgaaattacactccccctccctctcttttctcactccgattccccactcgcgatggccgcgcctcgacccccgccgctgggggccctgggaggcgttgtcggtggcagcggtggcgccgcccccgccgccggggcgcccgccggagtcagcatgcggatgttccacggcgagtcgttccttggcgagatggaggtcttcccgatgaagcgggacggcgaggggggcctccctttcccgaccaacgagatccgcgtcagccacttctcgccggcgagcgagaggtgcccgcctctcgctatcctgcagaccatcgcgcccttctccgtacggtgcaagttgcagaccaagcttacgcctcccaacccgggcctccagcgcttgtatctcacttgtttcaacgagttcaagagtgctgtggtagtagttggggatgaggagctgcacctggtggcaatgccgaccaaatcagggaaggtgccatgcttttggtgctgctcagcacgctcggggctctatgcagcgtccgttggcatgctcaacttgcgctgtcttgccattgtgtttgatcttgatgagacccttattgttgctaacacaatgaagtccttcgaggatcggatcgagatgctctcccgcagaatggatgtcgaagatgatcctatcagaatagcagggatgtctgcagaaatcaaacgatatattgaggacaaagagcttctcaaagaattcattgacatggatacagttacggacaatggcaaaatagttggaacccagaaagaggaggttcaacctatgtctggtggtcaggagcgtgttttccgtccagttatcagactgcctgacaggaatgcaattttgactcgcatcaatccagagaatcgtgataccagtgtttttgtaaagctaagacctgcttgggaagaattgaggagttacctaactgcaaagggacgaaaaagatttgaggtttatgtatgtacaatggctgagagagattatgctcttgaaatgtggagacttcttgatccagaaggcaacttaataagtccacaacagctctcagaacgcgtaaattgtgtaaagtcaggttccaaaaagtccctgcagaatgttttccgagacagaagatgccatccaaagatggccatggtaattgatgaccgacttaatgtttgggatgataaagatcaacacagagttcatgtcgtccctgcatatattccatactatgctccacaagcggagatggccaatgctgttccagttctatgtgttgcaaggaatgttgcttgcaatgttcgtggtgggtttttcagagagtttgatgagaatctattgaggaaagtgttcgaactatactatgaaaatgggttattggatcttccatatgctccagatgttggtgactatttagtctgcgaggataccagttttgtaccaggcaacaaagatcaggctcctatacctgagggcatgaggggaactgaagtagagaagagattaaatgggcagtcatatcggtgggagcaaagggaaggacaacaaatgccatcttcaatccgttcaccagatgacgagggaatgcctatccgaggtactggaggagttaggaatatccagccaaatgggggctcgctagcaataaccccctcggtatatgtcacagtgttgcaagaaattgggcggctgtgcgactccaagtacaggtggaatttagatctactgtaagcagtgtcagaagtatgctattttctgtagaggttctgtttaataatgaaaaaattggaataggcgtcggaaaaacaagagatgaagctcaagttcaagctgctgagaaagctctccaaaatttggagaacagttatttgtcatctggtgctccagttgctggagttcctaagaaagattcaaggaagtcccctgggaggagtggtaatggctttctggaggatgctacttgttcagataacgatatctctatgcgagaaccttctggaagtgcattgaaattggatcattcaaataatgtggatacattgtcgtctattatgagtcttattagagaacattgcttggaggaccaacatgtagtatttcgagatgaagtccagaattctagcccagccaggaatgaagaatatcatttccaggttgaactagcaggattgattctcgggaggggcgttggttcggacagagaggccgcgaagcttctggctgcagaagaggcactgaagaccttgaaatcaaccactgacccacaaattaagaagtatctgagacctgtaagatgcaatggctgattcccttccacgttctgagctccgcaaccaaatgagctttagctcatttcaccgttacagatgtcattgatttagcagaagtgcatcaccctttctgtgagtatggttgacatctcacctcgagcacatgatgtgtgccaaacacatgtcttgttctggaaatcctggctttgaaggtggtaacatagagagcggacatggtgctttatgcattcttttgaccatcatacaagtatagatgttatgtcttgtttaggatagtggcatagttggctgtaaacaagcaggagagtagatgcggatctaaaattcttgttttgaaggttatgctgactcattaacagttatggatcgttaaaaattgaatgcctgtaccagttgtcatgtttacatgtctgttataaagtgctaaatcctttacaaacttatttcaactacaaataaattcaagtgctcgtatttgttgagttatacattcacatctat

SEQ ID NO: 31398 - DNA, 2831 bp, Zea Mays
gccccttctccgccttcattccccaaacaccaaaacccggctccgcgtctccgccgaagcgggaggcgggcgggggcaggcacctgttcgcgctgcgcgaaattacactccccctccctctcttttctcactccgattccccactcgcgatggccgcgcctcgacccccgccgctgggggccctgggaggcgttgtcggtggcagcggtggcgccgcccccgccgccggggcgcccgccggagtcagcatgcggatgttccacggcgagtcgttccttggcgagatggaggtcttcccgatgaagcgggacggcgaggggggcctccctttcccgaccaacgagatccgcgtcagccacttctcgccggcgagcgagaggtgcccgcctctcgctatcctgcagaccatcgcgcccttctccgtacggtgcaagttgcagaccaagcttacgcctcccaacccgggcctccagcgcttgtatctcacttgtttcaacgagttcaagagtgctgtggtagtagttggggatgaggagctgcacctggtggcaatgccgaccaaatcagggaaggtgccatgcttttggtgctgctcagcacgctcggggctctatgcagcgtccgttggcatgctcaacttgcgctgtcttgccattgtgtttgatcttgatgagacccttattgttgctaacacaatgaagtccttcgaggatcggatcgagatgctctcccgcagaatggatgtcgaagatgatcctatcagaatagcagggatgtctgcagaaatcaaacgatatattgaggacaaagagcttctcaaagaattcattgacatggatacagttacggacaatggcaaaatagttggaacccagaaagaggaggttcaacctatgtctggtggtcaggagcgtgttttccgtccagttatcagactgcctgacaggaatgcaattttgactcgcatcaatccagagaatcgtgataccagtgtttttgtaaagctaagacctgcttgggaagaattgaggagttacctaactgcaaagggacgaaaaagatttgaggtttatgtatgtacaatggctgagagagattatgctcttgaaatgtggagacttcttgatccagaaggcaacttaataagtccacaacagctctcagaacgcgtaaattgtgtaaagtcaggttccaaaaagtccctgcagaatgttttccgagacagaagatgccatccaaagatggccatggtaattgatgaccgacttaatgtttgggatgataaagatcaacacagagttcatgtcgtccctgcatatattccatactatgctccacaagcggagatggccaatgctgttccagttctatgtgttgcaaggaatgttgcttgcaatgttcgtggtgggtttttcagagagtttgatgagaatctattgaggaaagtgttcgaactatactatgaaaatgggttattggatcttccatatgctccagatgttggtgactatttagtctgcgaggataccagttttgtaccaggcaacaaagatcaggctcctatacctgagggcatgaggggaactgaagtagagaagagattaaatgggcagtcatatcggtgggagcaaagggaaggacaacaaatgccatcttcaatccgttcaccagatgacgagggaatgcctatccgaggtactggaggagttaggaatatccagccaaatgggggctcgctagcaataaccccctcggtatatgtcacagtgttgcaagaaattgggcggctgtgcgactccaaggttctgtttaataatgaaaaaattggaataggcgtcggaaaaacaagagatgaagctcaagttcaagctgctgagaaagctctccaaaatttggagaacagttatttgtcatctggtgctccagttgctggagttcctaagaaagattcaaggaagtcccctgggaggagtggtaatggctttctggaggatgctacttgttcagataacgatatctctatgcgagaaccttctggaagtgcattgaaattggatcattcaaataatgtggatacattgtcgtctattatgagtcttattagagaacattgcttggaggaccaacatgtagtatttcgagatgaagtccagaattctagcccagccaggaatgaagaatatcatttccaggttgaactagcaggattgattctcgggaggggcgttggttcggacagagaggccgcgaagcttctggctgcagaagaggcactgaagaccttgaaatcaaccactgacccacaaattaagaagtatctgagacctgtaagatgcaatggctgattcccttccacgttctgagctccgcaaccaaatgagctttagctcatttcaccgttacagatgtcattgatttagcagaagtgcatcaccctttctgtgagtatggttgacatctcacctcgagcacatgatgtgtgccaaacacatgtcttgttctggaaatcctggctttgaaggtggtaacatagagagcggacatggtgctttatgcattcttttgaccatcatacaagtatagatgttatgtcttgtttaggatagtggcatagttggctgtaaacaagcaggagagtagatgcggatctaaaattcttgttttgaaggttatgctgactcattaacagttatggatcgttaaaaattgaatgcctgtaccagttgtcatgtttacatgtctgttataaagtgctaaatcctttacaaacttatttcaactacaaataaattcaagtgctcgtatttgttgagttatacattcacatctat

SEQ ID NO: 31399 - DNA, 1900 bp, Zea Mays
atttcatgggctgcaatagaggcttgtctactttggggatacaatttattgactctactaagctttttgagatttaatacaatactattggactgaggcactcagcataaattcttctatgtttggaagaatcgtgataccagtgtttttgtaaagctaagacctgcttgggaagaattgaggagttacctaactgcaaagggacgaaaaagatttgaggtttatgtatgtacaatggctgagagagattatgctcttgaaatgtggagacttcttgatccagaaggcaacttaataagtccacaacagctctcagaacgcgtaaattgtgtaaagtcaggttccaaaaagtccctgcagaatgttttccgagacagaagatgccatccaaagatggccatggtaattgatgaccgacttaatgtttgggatgataaagatcaacacagagttcatgtcgtccctgcatatattccatactatgctccacaagcggagatggccaatgctgttccagttctatgtgttgcaaggaatgttgcttgcaatgttcgtggtgggtttttcagagagtttgatgagaatctattgaggaaagtgttcgaactatactatgaaaatgggttattggatcttccatatgctccagatgttggtgactatttagtctgcgaggataccagttttgtaccaggcaacaaagatcaggctcctatacctgagggcatgaggggaactgaagtagagaagagattaaatgggcagtcatatcggtgggagcaaagggaaggacaacaaatgccatcttcaatccgttcaccagatgacgagggaatgcctatccgaggtactggaggagttaggaatatccagccaaatgggggctcgctagcaataaccccctcggtatatgtcacagtgttgcaagaaattgggcggctgtgcgactccaaggtggaatttagatctactgtaagcagtgtcagaagtatgctattttctgtagaggttctgtttaataatgaaaaaattggaataggcgtcggaaaaacaagagatgaagctcaagttcaagctgctgagaaagctctccaaaatttggagaacagttatttgtcatctggtgctccagttgctggagttcctaagaaagattcaaggaagtcccctgggaggagtgtgcttggaggaccaacatgtagtatttcgagatgaagtccagaattctagcccagccaggaatgaagaatatcatttccaggttgaactagcaggattgattctcgggaggggcgttggttcggacagagaggccgcgaagcttctggctgcagaagaggcactgaagaccttgaaatcaaccactgacccacaaattaagaagtatctgagacctgtaagatgcaatggctgattcccttccacgttctgagctccgcaaccaaatgagctttagctcatttcaccgttacagatgtcattgatttagcagaagtgcatcaccctttctgtgagtatggttgacatctcacctcgagcacatgatgtgtgccaaacacatgtcttgttctggaaatcctggctttgaaggtggtaacatagagagcggacatggtgctttatgcattcttttgaccatcatacaagtatagatgttatgtcttgtttaggatagtggcatagttggctgtaaacaagcaggagagtagatgcggatctaaaattcttgttttgaaggttatgctgactcattaacagttatggatcgttaaaaattgaatgcctgtaccagttgtcatgtttacatgtctgttataaagtgctaaatcctttacaaacttatttcaactacaaataaattcaagtgctcgtatttgttgagttatacattcacatctat

SEQ ID NO: 31400 - DNA, 1076 bp, Zea Mays
taacgacctattgacctaaatcctcattttgagagcttatggcctaggttctgtttaataatgaaaaaattggaataggcgtcggaaaaacaagagatgaagctcaagttcaagctgctgagaaagctctccaaaatttggagaacagttatttgtcatctggtgctccagttgctggagttcctaagaaagattcaaggaagtcccctgggaggagtggtaatggctttctggaggatgctacttgttcagataacgatatctctatgcgagaaccttctggaagtgcattgaaattggatcattcaaataatgtggatacattgtcgtctattatgagtcttattagagaacattgcttggaggaccaacatgtagtatttcgagatgaagtccagaattctagcccagccaggaatgaagaatatcatttccaggttgaactagcaggattgattctcgggaggggcgttggttcggacagagaggccgcgaagcttctggctgcagaagaggcactgaagaccttgaaatcaaccactgacccacaaattaagaagtatctgagacctgtaagatgcaatggctgattcccttccacgttctgagctccgcaaccaaatgagctttagctcatttcaccgttacagatgtcattgatttagcagaagtgcatcaccctttctgtgagtatggttgacatctcacctcgagcacatgatgtgtgccaaacacatgtcttgttctggaaatcctggctttgaaggtggtaacatagagagcggacatggtgctttatgcattcttttgaccatcatacaagtatagatgttatgtcttgtttaggatagtggcatagttggctgtaaacaagcaggagagtagatgcggatctaaaattcttgttttgaaggttatgctgactcattaacagttatggatcgttaaaaattgaatgcctgtaccagttgtcatgtttacatgtctgttataaagtgctaaatcctttacaaacttatttcaactacaaataaattcaagtgctcgtatttgttgagttatacattcacatctat

SEQ ID NO: 31401 - DNA, 1187 bp, Zea Mays
cctaaatcctcattttgagagcttatggcctaggttctgtttaataatgaaaaaattggaataggcgtcggaaaaacaagagatgaagctcaagttcaagctgctgagaaagctctccaaaatttggagaacagttatttgtcatctggtgctccagttgctggagttcctaagaaagattcaaggaagtcccctgggaggagtggtaatggctttctggaggatgctacttgttcagataacgatatctctatgcgagaaccttctggaagtgcattgaaattggatcattcaaataatgtggatacattgtcgtctattatgagtcttattagagaacattgcttggaggaccaacatgtagtatttcgagatgaagtccagaattctagcccagccaggaatgaagaatatcatttccaggttgaactagcaggattgattctcgggaggggcgttggttcggacagagaggccgcgaagcttctggtaattgattacccaaatcattactgactggaaaagcaaaaataaatcgagtggactgtctaacatgctacatacattattcaaaagaagaatgtgctattttgttttggtaaaaactcagcatggctgcagaagaggcactgaagaccttgaaatcaaccactgacccacaaattaagaagtatctgagacctgtaagatgcaatggctgattcccttccacgttctgagctccgcaaccaaatgagctttagctcatttcaccgttacagatgtcattgatttagcagaagtgcatcaccctttctgtgagtatggttgacatctcacctcgagcacatgatgtgtgccaaacacatgtcttgttctggaaatcctggctttgaaggtggtaacatagagagcggacatggtgctttatgcattcttttgaccatcatacaagtatagatgttatgtcttgtttaggatagtggcatagttggctgtaaacaagcaggagagtagatgcggatctaaaattcttgttttgaaggttatgctgactcattaacagttatggatcgttaaaaattgaatgcctgtaccagttgtcatgtttacatgtctgttataaagtgctaaatcctttacaaacttatttcaactacaaataaattcaagtgctcgtatttgttgagttatacattcacatctat

SEQ ID NO: 31402 - DNA, 666 bp, Zea Mays
tctgtcttccactaagggaccatctccttacactttaggtgttgatgcctattacacgcgtgcacaagttcaggatgatatgattgatatttggctgcagaagaggcactgaagaccttgaaatcaaccactgacccacaaattaagaagtatctgagacctgtaagatgcaatggctgattcccttccacgttctgagctccgcaaccaaatgagctttagctcatttcaccgttacagatgtcattgatttagcagaagtgcatcaccctttctgtgagtatggttgacatctcacctcgagcacatgatgtgtgccaaacacatgtcttgttctggaaatcctggctttgaaggtggtaacatagagagcggacatggtgctttatgcattcttttgaccatcatacaagtatagatgttatgtcttgtttaggatagtggcatagttggctgtaaacaagcaggagagtagatgcggatctaaaattcttgttttgaaggttatgctgactcattaacagttatggatcgttaaaaattgaatgcctgtaccagttgtcatgtttacatgtctgttataaagtgctaaatcctttacaaacttatttcaactacaaataaattcaagtgctcgtatttgttgagttatacattcacatctat

SEQ ID NO: 31403 - DNA, 1895 bp, Zea Mays
tttaaatattgtcatagaattatctctacttgtattaatgaatataaatgactttgaattacaaatgtaccttcggtcctgcggaaggcaaaagtacaagcgtgatgcgaaagcaaatgacagattcacatgaatagtacagaggtactgttcatctatttataggcacaggtcgcagcctgtgacaaattacaattatgccccttgcgaaagtttatagcattgactcagacctatatgtataaaaaggtcattctatctctatgtcggtttaaaacgccgaagctccatgaaaagggaccttcggccatctcttggagacgacttcagccgaagctgcttcttcgtgtgagaccttcggcgcaccgaagcacgaccccaacagtaatctacaatgcaaaagcaatagtttgcatgtccatatacatagcctactagagagtctaaagcggctagttttatattctattgaacatgggatgaggggaggtgtggggcatcgttggagatggttttatagaggcctatcaaacaggactttaagtttgttaatctcttgcttttatatagatattagaatttatttaatttaaatttaggttaggcacaacttaattctataaaaaaaataggtagctcattgttgttggcataaattatacagaaagcaaaggttctaccattcaactgacggaaaggaaaatttcagctaactgaattgacaaaataagacgtcaccattttagttggcaatgattatatttatagaaaacattcttttgtgatcattattttgtaaaaggcggaataaaaataggaaaacaattccgacatttcatctatcagaattcagatgcgctgccctacgccctcaagtgggcttcgaatgtgatggtcataggcctaatttcatagcccagtcaagctagtcgctcgggggaggggaaggcccaatctttttcagcatgtgtagcataaacaaaacgatttaccagcgcataacaataatttaaaaaatagatatagaaaacaagcctgactcctcatcctgcaaacgagtactctctccgttcataaatatatgacaccattaattttttaaaaaaactttgaccacacgtcttatttaaaaattagtattaattatcatttattttttatgatttgtttttatcaggtagtttatgcttgacttaaaattttacatttttgaatgaatattttgaataagacgagtggtcaaagttttctaaaaaaagtaaacgatgtcatatatttgtgaacagatgtagtattaagttctggtatagaaatgaaaggcagagaacaattgtaaattacagtgtacaacggaaagcagttgtttgcaaaagataacgatcacttcattcagttgtattgtctctataagttcatttgtttttatctttaatcgagaagccgccctattcaaatttccaaaaggggggggggtgctaaagacattttacaacctgaataatgctactgtaaaatatcaaaataatgtcacttattcggaaaagacacattaattatttgtaatttctcattactggtgtcaacttccagcaagaaatgtgtcaataaatgttcttggtatgctaaatggttagctacatgatcaatcagttctggaaaaaccaaaaattgagaaagcataactacactcaactatattttggaaaaattatgtcacgtaatactgtcataactcgtcacatgtacacttatctctgcactccaagaaagagtttcgtgatgtaaccaaggtttgatcatgttggatgaaagcacctgcaacgaggaaaacattttgtaagaaatccagcatgaaggtgtaaagggcagtttgctgaatgcatggtcaaacacag

SEQ ID NO: 31404 - DNA, 1690 bp, Zea Mays
tttaaatattgtcatagaattatctctacttgtattaatgaatataaatgactttgaattacaaatgtaccttcggtcctgcggaaggcaaaagtacaagcgtgatgcgaaagcaaatgacagattcacatgaatagtacagaggtactgttcatctatttataggcacaggtcgcagcctgtgacaaattacaattatgccccttgcgaaagtttatagcattgactcagacctatatgtataaaaaggtcattctatctctatgtcggtttaaaacgccgaagctccatgaaaagggaccttcggccatctcttggagacgacttcagccgaagctgcttcttcgtgtgagaccttcggcgcaccgaagcacgaccccaacagtaatctacaatgcaaaagcaatagtttgcatgtccatatacatagcctactagagagtctaaagcggctagttttatattctattgaacatgggatgaggggaggtgtggggcatcgttggagatggttttatagaggcctatcaaacaggactttaagtttgttaatctcttgcttttatatagatattagaatttatttaatttaaatttaggttaggcacaacttaattctataaaaaaaataggtagctcattgttgttggcataaattatacagaaagcaaaggttctaccattcaactgacggaaaggaaaatttcagctaactgaattgacaaaataagacgtcaccattttagttggcaatgattatatttatagaaaacattcttttgtgatcattattttgtaaaaggcggaataaaaataggaaaacaattccgacatttcatctatcagaattcagatgcgctgccctacgccctcaagtgggcttcgaatgtgatggtcataggcctaatttcatagcccagtcaagctagtcgctcgggggaggggaaggcccaatctttttcagcatgtgtagcataaacaaaacgatttaccagcgcataacaataatttaaaaaatagatatagaaaacaagcctgactcctcatcctgcaaacgagtactctctccgttcataaatagatgtagtattaagttctggtatagaaatgaaaggcagagaacaattgtaaattacagtgtacaacggaaagcagttgtttgcaaaagataacgatcacttcattcagttgtattgtctctataagttcatttgtttttatctttaatcgagaagccgccctattcaaatttccaaaaggggggggggtgctaaagacattttacaacctgaataatgctactgtaaaatatcaaaataatgtcacttattcggaaaagacacattaattatttgtaatttctcattactggtgtcaacttccagcaagaaatgtgtcaataaatgttcttggtatgctaaatggttagctacatgatcaatcagttctggaaaaaccaaaaattgagaaagcataactacactcaactatattttggaaaaattatgtcacgtaatactgtcataactcgtcacatgtacacttatctctgcactccaagaaagagtttcgtgatgtaaccaaggtttgatcatgttggatgaaagcacctgcaacgaggaaaacattttgtaagaaatccagcatgaaggtgtaaagggcagtttgctgaatgcatggtcaaacacag

SEQ ID NO: 31405 - DNA, 3579 bp, Zea Mays
actttgcctaagtttagtcgttcgaattgaagaactaatcttaggcagaaaagttaggcaaaattcgaacgactaaccttaggtaaagtgtgacacatttagccatctctttcgtagggaagaaaaaaaaaccattagctttccgtcccggccgggcatcgtaaatgtggatggatccacgcacgatatgacacggctgcccgttggcgccactttacccgtctgtccgcctcataaattcaacgtgttggtgagaaaacacgaaacagacgagataacgcaacggctttcattcaccttacctggcgcggcgtacagcgacctcatcagctcagcttggggctaaacaagcgacaggtatcgctgctagctaggcgctactcgaacggtgctctcccgtggtcactggagcaccgcatagacatcgctctctagaagtaatggccactcaagttagctgcgactgcgaggagaggatgacttgctgcactactgcaattatacaccgtcacctcgcgcgtcgtggccctggcctgcaaatgcaatgcaatgtcatgaccaacctcgcgcgcgtatattaactccacctcgccgccccactccactgccaagcaactcgcacgcagcagtacgacgtctctcctctgggtctggggccgagacaccgagcacgtactaccagcaagatggtggcgtctcccagattcaagcccatcgaggagtgctgctcggaggggcggtcggagcagacggtggccgccgacctggacggcacgctgctcatctccaggagcgcgttcccctactacctcctcgtggctctcgaggccggcagcgtcctccgcgccgcgctgctgctcctgtccgtgccgttcgtctacgtcacctacgccttcttctccgagtcgctggccatcagcacgctggtgtacatctccgtggcggggctcaaggtgcgcagcatcgagatggtggcgcgctccgtgctccccaggttctacgcgggcgacgtgcacccggagagctggagggtgttcagctccttcggcaggcgctacgtcgtcacggccagccccagggtcatggtcgagcccttcgccagggccttcctcggcgccgacaaggtcgtcgggaccgagctggaggtcggcagggacggcaaggccacgggcttcatggccaggccaggcgtgctcgtcggcgaccacaagaagaaggccgtcgtcaaggagctcggcgacgcgctgcccgacgtcggcatgggggatagggagaccgacttcgacttcatgtccatctgcaaggttccacgtactccgatcccacggctcagctaccacttcttaatttcctgctaaaataatagtaataatagtttcatctcgatcgctggatgcattcgtacgtagtatttggtagcacccagacccaggttcgcaattacagactatttattaccggcaacacggaacatatcgggtagttgaagactggaattaaagtagaaataacacccaactgttccacaatttaggtaacatctgaccgctatttaaatgacagttgttcaattttccatccgcctgaaggccacccagattggaatttaaggcgtgattgtgaatttggtctgactgagggtttgtagtagcatatcgacatggaaagaaagaaagaaagaaatttgaaatgtcatcgtaggcaatcgttgcgccctgctgtgctttcactagttcccgtccatctgttctctcaagaatttattagatagtttagcagcttgtcaggtccttatgacacatgcatgcagacactgtatacgcacgtccatctgtttacgggtggcgttgtcacaaccagataggaagggggatcatcggtttcactagcggctgagccgggcggattgaaggcgcgcccgtccggctccatttacgccacggttgtttggtggagaattcatggcgccctgtccccgcgcgcaatgaaggagaccgccccagctggctggcgcgtgagccatgaaagctggagctgagcgtgccagatctatttgcagtctctcgcactcaacaaatgattaaaaaaaataatgcccatacggatcatgtaaacgacggtataaagtactatttttactgtagattgcgtttacagagtgaagtttaaaatagaaagtgctgaagtaccatgtgtaaacgactatgtaaagtgttgttttagaccgtagattgcattttgcagagtggaatttcaaatagaacgtgagatagagagtgaaatagagacaatccgagtgaagtacattatattgacagcgtgcgtggctgtgcaggaggcctacctggtgacgtcaaggaagtacagcccggtgcccaggaaccagctgctgagcccgctgatcgtgcacgacggccgcctcgtgcagcgcccgacgccgctcgtcgcgctcgtcaccttcctctggatgccgttcggcttcgcgctggcgctcatgcgcgtgtacatcaacctgccgctgcccgagcgcatcgtctactacacctacaagctcatgggcatcaggctcgtcgtcaagggcaccccgccgccgccgcccaagaagggccacccgggcgtcctcttcgtctgcaaccaccgcaccgtgctcgaccccgtcgaggtggccgtggcgctgcgccgcaaggtcagctgcgtcacctacagcatctccaagttctccgagctcatctcgcccatcaaggccgtcgcgctgtcgcgggagcgcgacaaggacgccgagaacatccgccgcctgctggaggagggcgacctggtcatctgccccgagggcaccacctgccgcgagcccttcctgctgcgcttcagcgcgctcttcgccgagctcaccgaccgcatcgtgcccgtggccatcaacaccaaggagaccatgttccacggctccaccgtgcgcggcttcaagctcatggatccctacttcttcttcatgaacccgcgcccgacgtacgagatcacgttcctcacccagctccccaaagacctcacgtgcagcggcggcaagtcgcccatcgaggtggccaactatatccagaagacgctcagcggacagcttggcttcgagtgcacgtccatcacgcgcaaggagaagtacggcatgctcgctggcaccgacggccgtgtcccgtccaagaacaaggagaaggagaaggagaaggataagaactaacggccaacgtcgctctcttgctgctgcccagcagactgccgtttaattactgctcaaatttattccaatttattgttccttgtcgacaagttggccagtgtgatgtgggccgtgtactagtacaagcttgatgatgattagtatatctacaattcttcctttccggaagaagggcggaagagttgttagagccgtcttaatacaaagtttcgtcacattagtcggtttgtttggctttaatctgtaactgcttatataataattttgtctctatagattatagctgtaacaatctaaacaactgactttaataccacatcagttttacgtatttccgttgataaatgaaataa

SEQ ID NO: 31406 - DNA, 77 bp, Zea Mays
caccattgtcggagtcagaggccatcgatctagttaaggatgtgtttgcatctgcagctgagagagacatatacact

SEQ ID NO: 31407 - DNA, 1252 bp, Zea Mays
ctggctgctgctgatcgtcggcgcgccgggctcatgatcggaaattcggaaccagatcccctcactttttatcccatctttggctccggcgagctatgcgagcatgcggcaccaccaagcctgcagccgcgctcaccaggtcaaggtccaccaatttcttctaaagtcaaggttcagaacatttaacaaggatcacgcaaatctcttctttgttccgagctatgtcaagtgtgttcgcatgacaggggcactaagtgacaaagaaatcaatcagacctatgtcaaggttctgagtcagatgccatatttccgtagatcaggtgggcgcgaccacatttttgtcttcccaagtggtgcaggcgctcatctgtttcgttcatgggcaatatttctgaatcgatctattatccttactccagagggtgaccggactgacaaacgtggtacgagtgcatttaatacatggaaagatattattatacctgggaacgtggatgattctatggggaaagcaggacgccttcaactggtggagcttgcaaagcagtatcctgacaagctggaatctccagaactcaagttataggacccaaaaaattgggaaggatcgagtacttcaagcacctgagaaatgcaaagttctgcttggctccacgtggagagtcatcttggacacttcggttctacgagtccttctttgtgtgattttgtcagatgaagttgagcttcctttccagaatgtgatcgactacagtgaaatctcgataaagtggccgtcgtccaggattggacctgaactccttgagtaccttgaatcaatatcagatgaaaggatcgaggaaatgattggtcatgggcgtgagatgagatgcttgtgggtgtatgcagctgatactgagccgtgctctgccatgagcggtatcctgacggagctgcagaagaaagtgcggcggttccatcaatcgccggaaacgttctggctgcacaacagaacaattgtgaatagagatctgattgagttccacagctggaagacgcctgttccgttgccatgaaccatgtattctgatttcaactatagccggcatctgtttctgtaccatgttagacatttttcttgtgaagctgtgtttgttgttgttcttgctaatcttgagaataaacacatacatcgtgttaaggattgacaatagtacgctagatatatttttttactttatcgggatgatagaagggtaagataaaacgatat

SEQ ID NO: 31408 - DNA, 1551 bp, Zea Mays
ctgctgctgatcgtcggcgcgccgggctcatgatcggaaattcggaaccagatcccctcactttttatcccatctttggctccggcgagctatgcgagcatgcggcaccaccaagcctgcagccgcgctcaccaggtgggcgctctggtcctcgtctctgccaccttcctcctcacccgcctcttcgaccgcttcctcctcgacacatattcctccgcccccataaaccccggccggcccttctcttccgctgacctccgcatctacgtctacgctgaggacgagatccagggcctccgcgccctgctccggggacgcgacggcaccatcaacgccgccacatgcctcaagggccaatggggcacccaggtcaaggtccaccaatttcttctaaagtcaaggttcagaacatttaacaaggatcacgcaaatctcttctttgttccgagctatgtcaagtgtgttcgcatgacaggggcactaagtgacaaagaaatcaatcagacctatgtcaagatgccatatttccgtagatcaggtgggcgcgaccacatttttgtcttcccaagtggtgcaggcgctcatctgtttcgttcatgggcaatatttctgaatcgatctattatccttactccagagggtgaccggactgacaaacgtggtacgagtgcatttaatacatggaaagatattattatacctgggaacgtggatgattctatggtgaagtctgatgctcctgctgtccaaccaatcccgctaacaaaaaggaagtacttagccaacttccttggacgtgcccaggggaaagcaggacgccttcaactggtggagcttgcaaagcagtatcctgacaagctggaatctccagaactcaagttataggacccaaaaaattgggaaggatcgagtacttcaagcacctgagaaatgcaaagttctgcttggctccacgtggagagtcatcttggacacttcggttctacgagtccttctttgtgtgattttgtcagatgaagttgagcttcctttccagaatgtgatcgactacagtgaaatctcgataaagtggccgtcgtccaggattggacctgaactccttgagtaccttgaatcaatatcagatgaaaggatcgaggaaatgattggtcatgggcgtgagatgagatgcttgtgggtgtatgcagctgatactgagccgtgctctgccatgagcggtatcctgacggagctgcagaagaaagtgcggcggttccatcaatcgccggaaacgttctggctgcacaacagaacaattgtgaatagagatctgattgagttccacagctggaagacgcctgttccgttgccatgaaccatgtattctgatttcaactatagccggcatctgtttctgtaccatgttagacatttttcttgtgaagctgtgtttgttgttgttcttgctaatcttgagaataaacacatacatcgtgttaaggattgacaatagtacgctagatatatttttttactttatcgggatgatagaagggtaagataaaacgatat

SEQ ID NO: 31409 - DNA, 1550 bp, Zea Mays
ctgctgctgatcgtcggcgcgccgggctcatgatcggaaattcggaaccagatcccctcactttttatcccatctttggctccggcgagctatgcgagcatgcggcaccaccaagcctgcagccgcgctcaccaggtgggcgctctggtcctcgtctctgccaccttcctcctcacccgcctcttcgaccgcttcctcctcgacacatattcctccgcccccataaaccccggccggcccttctcttccgctgacctccgcatctacgtctacgctgaggacgagatccagggcctccgcgccctgctccggggacgcgacggcaccatcaacgccgccacatgcctcaagggccaatggggcacccaggtcaaggtccaccaatttcttctaaagtcaaggttcagaacatttaacaaggatcacgcaaatctcttctttgttccgagctatgtcaagtgtgttcgcatgacaggggcactaagtgacaaagaaatcaatcagacctatgtcaaggttctgagtcagatgccatatttccgtagatcaggtgggcgcgaccacatttttgtcttcccaagtggtgcaggcgctcatctgtttcgttcatgggcaatatttctgaatcgatctattatccttactccagagggtgaccggactgacaaacgtggtacgagtgcatttaatacatggaaagatattattatacctgggaacgtggatgattctatggtgaagtctgatgctcctgctgtccaaccaatcccgctaacaaaaaggaagtacttagccaacttccttggacgtgcccaggggaaagcaggacgccttcaactggtggagcttgcaaagcagtatcctgacaagaactcaagttataggacccaaaaaattgggaaggatcgagtacttcaagcacctgagaaatgcaaagttctgcttggctccacgtggagagtcatcttggacacttcggttctacgagtccttctttgtgtgattttgtcagatgaagttgagcttcctttccagaatgtgatcgactacagtgaaatctcgataaagtggccgtcgtccaggattggacctgaactccttgagtaccttgaatcaatatcagatgaaaggatcgaggaaatgattggtcatgggcgtgagatgagatgcttgtgggtgtatgcagctgatactgagccgtgctctgccatgagcggtatcctgacggagctgcagaagaaagtgcggcggttccatcaatcgccggaaacgttctggctgcacaacagaacaattgtgaatagagatctgattgagttccacagctggaagacgcctgttccgttgccatgaaccatgtattctgatttcaactatagccggcatctgtttctgtaccatgttagacatttttcttgtgaagctgtgtttgttgttgttcttgctaatcttgagaataaacacatacatcgtgttaaggattgacaatagtacgctagatatatttttttactttatcgggatgatagaagggtaagataaaacgatat

SEQ ID NO: 31410 - DNA, 1453 bp, Zea Mays
ctgctgctgatcgtcggcgcgccgggctcatgatcggaaattcggaaccagatcccctcactttttatcccatctttggctccggcgagctatgcgagcatgcggcaccaccaagcctgcagccgcgctcaccaggtgggcgctctggtcctcgtctctgccaccttcctcctcacccgcctcttcgaccgcttcctcctcgacacatattcctccgcccccataaaccccggccggcccttctcttccgctgacctccgcatctacgtctacgctgaggacgagatccagggcctccgcgccctgctccggggacgcgacggcaccatcaacgccgccacatgcctcaagggccaatggggcacccaggtcaaggtccaccaatttcttctaaagtcaaggttcagaacatttaacaaggatcacgcaaatctcttctttgttccgagctatgtcaagtgtgttcgcatgacaggggcactaagtgacaaagaaatcaatcagacctatgtcaagatcaggtgggcgcgaccacatttttgtcttcccaagtggtgcaggcgctcatctgtttcgttcatgggcaatatttctgaatcgatctattatccttactccagagggtgaccggactgacaaacgtggtacgagtgcatttaatacatggaaagatattattatacctgggaacgtggatgattctatggggaaagcaggacgccttcaactggtggagcttgcaaagcagtatcctgacaagctggaatctccagaactcaagttataggacccaaaaaattgggaaggatcgagtacttcaagcacctgagaaatgcaaagttctgcttggctccacgtggagagtcatcttggacacttcggttctacgagtccttctttgtgtgattttgtcagatgaagttgagcttcctttccagaatgtgatcgactacagtgaaatctcgataaagtggccgtcgtccaggattggacctgaactccttgagtaccttgaatcaatatcagatgaaaggatcgaggaaatgattggtcatgggcgtgagatgagatgcttgtgggtgtatgcagctgatactgagccgtgctctgccatgagcggtatcctgacggagctgcagaagaaagtgcggcggttccatcaatcgccggaaacgttctggctgcacaacagaacaattgtgaatagagatctgattgagttccacagctggaagacgcctgttccgttgccatgaaccatgtattctgatttcaactatagccggcatctgtttctgtaccatgttagacatttttcttgtgaagctgtgtttgttgttgttcttgctaatcttgagaataaacacatacatcgtgttaaggattgacaatagtacgctagatatatttttttactttatcgggatgatagaagggtaagataaaacgatat

SEQ ID NO: 31411 - DNA, 1351 bp, Zea Mays
ctgctgctgatcgtcggcgcgccgggctcatgatcggaaattcggaaccagatcccctcactttttatcccatctttggctccggcgagctatgcgagcatgcggcaccaccaagcctgcagccgcgctcaccaggacgagatccagggcctccgcgccctgctccggggacgcgacggcaccatcaacgccgccacatgcctcaagggccaatggggcacccaggtcaaggtccaccaatttcttctaaagtcaaggttcagaacatttaacaaggatcacgcaaatctcttctttgttccgagctatgtcaagtgtgttcgcatgacaggggcactaagtgacaaagaaatcaatcagacctatgtcaaggttctgagtcagatgccatatttccgtagatcaggtgggcgcgaccacatttttgtcttcccaagtggtgcaggcgctcatctgtttcgttcatgggcaatatttctgaatcgatctattatccttactccagagggtgaccggactgacaaacgtggtacgagtgcatttaatacatggaaagatattattatacctgggaacgtggatgattctatggggaaagcaggacgccttcaactggtggagcttgcaaagcagtatcctgacaagctggaatctccagaactcaagttataggacccaaaaaattgggaaggatcgagtacttcaagcacctgagaaatgcaaagttctgcttggctccacgtggagagtcatcttggacacttcggttctacgagtccttctttgtggaatgtgtgccagtgattttgtcagatgaagttgagcttcctttccagaatgtgatcgactacagtgaaatctcgataaagtggccgtcgtccaggattggacctgaactccttgagtaccttgaatcaatatcagatgaaaggatcgaggaaatgattggtcatgggcgtgagatgagatgcttgtgggtgtatgcagctgatactgagccgtgctctgccatgagcggtatcctgacggagctgcagaagaaagtgcggcggttccatcaatcgccggaaacgttctggctgcacaacagaacaattgtgaatagagatctgattgagttccacagctggaagacgcctgttccgttgccatgaaccatgtattctgatttcaactatagccggcatctgtttctgtaccatgttagacatttttcttgtgaagctgtgtttgttgttgttcttgctaatcttgagaataaacacatacatcgtgttaaggattgacaatagtacgctagatatatttttttactttatcgggatgatagaagggtaagataaaacgatat

SEQ ID NO: 31412 - DNA, 1470 bp, Zea Mays
ctgctgctgatcgtcggcgcgccgggctcatgatcggaaattcggaaccagatcccctcactttttatcccatctttggctccggcgagctatgcgagcatgcggcaccaccaagcctgcagccgcgctcaccaggtgggcgctctggtcctcgtctctgccaccttcctcctcacccgcctcttcgaccgcttcctcctcgacacatattcctccgcccccataaaccccggccggcccttctcttccgctgacctccgcatctacgtctacgctgaggacgagatccagggcctccgcgccctgctccggggacgcgacggcaccatcaacgccgccacatgcctcaagggccaatggggcacccaggggcactaagtgacaaagaaatcaatcagacctatgtcaaggttctgagtcagatgccatatttccgtagatcaggtgggcgcgaccacatttttgtcttcccaagtggtgcaggcgctcatctgtttcgttcatgggcaatatttctgaatcgatctattatccttactccagagggtgaccggactgacaaacgtggtacgagtgcatttaatacatggaaagatattattatacctgggaacgtggatgattctatggtgaagtctgatgctcctgctgtccaaccaatcccgctaacaaaaaggaagtacttagccaacttccttggacgtgcccaggggaaagcaggacgccttcaactggtggagcttgcaaagcagtatcctgacaagctggaatctccagaactcaagttataggacccaaaaaattgggaaggatcgagtacttcaagcacctgagaaatgcaaagttctgcttggctccacgtggagagtcatcttggacacttcggttctacgagtccttctttgtggaatgtgtgccagtgattttgtcagatgaagttgagcttcctttccagaatgtgatcgactacagtgaaatctcgataaagtggccgtcgtccaggattggacctgaactccttgagtaccttgaatcaatatcagatgaaaggatcgaggaaatgattggtcatgggcgtgagatgagatgcttgtgggtgtatgcagctgatactgagccgtgctctgccatgagcggtatcctgacggagctgcagaagaaagtgcggcggttccatcaatcgccggaaacgttctggctgcacaacagaacaattgtgaatagagatctgattgagttccacagctggaagacgcctgttccgttgccatgaaccatgtattctgatttcaactatagccggcatctgtttctgtaccatgttagacatttttcttgtgaagctgtgtttgttgttgttcttgctaatcttgagaataaacacatacatcgtgttaaggattgacaatagtacgctagatatatttttttactttatcgggatgatagaagggtaagataaaacgatat

SEQ ID NO: 31413 - DNA, 1342 bp, Zea Mays
ctgctgctgatcgtcggcgcgccgggctcatgatcggaaattcggaaccagatcccctcactttttatcccatctttggctccggcgagctatgcgagcatgcggcaccaccaagcctgcagccgcgctcaccaggtcaaggtccaccaatttcttctaaagtcaaggttcagaacatttaacaaggatcacgcaaatctcttctttgttccgagctatgtcaagtgtgttcgcatgacaggggcactaagtgacaaagaaatcaatcagacctatgtcaaggttctgagtcagatgccatatttccgtagatcaggtgggcgcgaccacatttttgtcttcccaagtggtgcaggcgctcatctgtttcgttcatgggcaatatttctgaatcgatctattatccttactccagagggtgaccggactgacaaacgtggtacgagtgcatttaatacatggaaagatattattatacctgggaacgtggatgattctatggtgaagtctgatgctcctgctgtccaaccaatcccgctaacaaaaaggaagtacttagccaacttccttggacgtgcccaggggaaagcaggacgccttcaactggtggagcttgcaaagcagtatcctgacaagctggaatctccagaactcaagttataggacccaaaaaattgggaaggatcgagtacttcaagcacctgagaaatgcaaagttctgcttggctccacgtggagagtcatcttggacacttcggttctacgagtccttctttgtggaatgtgtgccagtgattttgtcagatgaagttgagcttcctttccagaatgtgatcgactacagtgaaatctcgataaagtggccgtcgtccaggattggacctgaactccttgagtaccttgaatcaatatcagatgaaaggatcgaggaaatgattggtcatgggcgtgagatgagatgcttgtgggtgtatgcagctgatactgagccgtgctctgccatgagcggtatcctgacggagctgcagaagaaagtgcggcggttccatcaatcgccggaaacgttctggctgcacaacagaacaattgtgaatagagatctgattgagttccacagctggaagacgcctgttccgttgccatgaaccatgtattctgatttcaactatagccggcatctgtttctgtaccatgttagacatttttcttgtgaagctgtgtttgttgttgttcttgctaatcttgagaataaacacatacatcgtgttaaggattgacaatagtacgctagatatatttttttactttatcgggatgatagaagggtaagataaaacgatat

SEQ ID NO: 31414 - DNA, 1300 bp, Zea Mays
ctgctgctgatcgtcggcgcgccgggctcatgatcggaaattcggaaccagatcccctcactttttatcccatctttggctccggcgagctatgcgagcatgcggcaccaccaagcctgcagccgcgctcaccaggtcaaggtccaccaatttcttctaaagtcaaggttcagaacatttaacaaggatcacgcaaatctcttctttgttccgagctatgtcaagtgtgttcgcatgacaggggcactaagtgacaaagaaatcaatcagacctatgtcaagatcaggtgggcgcgaccacatttttgtcttcccaagtggtgcaggcgctcatctgtttcgttcatgggcaatatttctgaatcgatctattatccttactccagagggtgaccggactgacaaacgtggtacgagtgcatttaatacatggaaagatattattatacctgggaacgtggatgattctatggtgaagtctgatgctcctgctgtccaaccaatcccgctaacaaaaaggaagtacttagccaacttccttggacgtgcccaggggaaagcaggacgccttcaactggtggagcttgcaaagcagtatcctgacaagctggaatctccagaactcaagttataggacccaaaaaattgggaaggatcgagtacttcaagcacctgagaaatgcaaagttctgcttggctccacgtggagagtcatcttggacacttcggttctacgagtccttctttgtgtgattttgtcagatgaagttgagcttcctttccagaatgtgatcgactacagtgaaatctcgataaagtggccgtcgtccaggattggacctgaactccttgagtaccttgaatcaatatcagatgaaaggatcgaggaaatgattggtcatgggcgtgagatgagatgcttgtgggtgtatgcagctgatactgagccgtgctctgccatgagcggtatcctgacggagctgcagaagaaagtgcggcggttccatcaatcgccggaaacgttctggctgcacaacagaacaattgtgaatagagatctgattgagttccacagctggaagacgcctgttccgttgccatgaaccatgtattctgatttcaactatagccggcatctgtttctgtaccatgttagacatttttcttgtgaagctgtgtttgttgttgttcttgctaatcttgagaataaacacatacatcgtgttaaggattgacaatagtacgctagatatatttttttactttatcgggatgatagaagggtaagataaaacgatat

SEQ ID NO: 31415 - DNA, 1547 bp, Zea Mays
ctgctgctgatcgtcggcgcgccgggctcatgatcggaaattcggaaccagatcccctcactttttatcccatctttggctccggcgagctatgcgagcatgcggcaccaccaagcctgcagccgcgctcaccaggtgggcgctctggtcctcgtctctgccaccttcctcctcacccgcctcttcgaccgcttcctcctcgacacatattcctccgcccccataaaccccggccggcccttctcttccgctgacctccgcatctacgtctacgctgaggacgagatccagggcctccgcgccctgctccggggacgcgacggcaccatcaacgccgccacatgcctcaagggccaatggggcacccaggtcaaggtccaccaatttcttctaaagtcaaggttcagaacatttaacaaggatcacgcaaatctcttctttgttccgagctatgtcaagtgtgttcgcatgacaggggcactaagtgacaaagaaatcaatcagacctatgtcaagatcaggtgggcgcgaccacatttttgtcttcccaagtggtgcaggcgctcatctgtttcgttcatgggcaatatttctgaatcgatctattatccttactccagagggtgaccggactgacaaacgtggtacgagtgcatttaatacatggaaagatattattatacctgggaacgtggatgattctatggtgaagtctgatgctcctgctgtccaaccaatcccgctaacaaaaaggaagtacttagccaacttccttggacgtgcccaggggaaagcaggacgccttcaactggtggagcttgcaaagcagtatcctgacaagctggaatctccagaactcaagttataggacccaaaaaattgggaaggatcgagtacttcaagcacctgagaaatgcaaagttctgcttggctccacgtggagagtcatcttggacacttcggttctacgagtccttctttgtggaatgtgtgccagtgattttgtcagatgaagttgagcttcctttccagaatgtgatcgactacagtgaaatctcgataaagtggccgtcgtccaggattggacctgaactccttgagtaccttgaatcaatatcagatgaaaggatcgaggaaatgattggtcatgggcgtgagatgagatgcttgtgggtgtatgcagctgatactgagccgtgctctgccatgagcggtatcctgacggagctgcagaagaaagtgcggcggttccatcaatcgccggaaacgttctggctgcacaacagaacaattgtgaatagagatctgattgagttccacagctggaagacgcctgttccgttgccatgaaccatgtattctgatttcaactatagccggcatctgtttctgtaccatgttagacatttttcttgtgaagctgtgtttgttgttgttcttgctaatcttgagaataaacacatacatcgtgttaaggattgacaatagtacgctagatatatttttttactttatcgggatgatagaagggtaagataaaacgatat

SEQ ID NO: 31416 - DNA, 2308 bp, Zea Mays
catgatctgtgctgccagtttcagccacagaggacgccttccctcgggcaatttgggactgcgggaagatgacttgaacagcagcagcacgacgtccatcaccatgatgtccatgcatatctgcaacgtcaaacatcataatagcagctctgcctccagagtccagaccttgctgaacaaagaggaatgaagaacagaggagggagagagcagagaacaaagagtgaagaacaggcaaaagcagcacaacatccataccttcagaagagctgctcatctgaggttggacttctcagctgctgtttttcgcgactaaaatggcggagaaggctgctgactgctcatgtataaaatgggggagaaggctggtgttgctgactgctcacgtctaaaatgtcttttggcctcccagacagcatttaaaggactgttgactgctcacgtctacccaagctgtatctgaagggattgggcgtcctttggcctcccccagacagcatttaagcctaaaatggcttttggactaccaggcgcctaaaatggcttttggactaccaggcctatcggctgatcgcccaacacggtgattaatcgctataaatcgcgattaggcggacgataaggaccatcagctaccctgatcgaatcattacaccttatcgagtgctaacaaccgatcaaacctactaatcgcgactaatcgcgattagtcggacgatatgtaatcagagatattttacctgtattaaagtcacaaatatgataacaaattggtcagctaatcggctctaagatatgcatgaaacaaactaataattaatacacacaattcatgatagaatagacttttttcaaacttgcagttgctactagaagcacaagcaccacaaatcagtgaactctatgtctctaaaccaatatttgcaaccaagatccaagaactggagtatcaacaatacaagaatagatcccaaacacaggggacacaatcagcctatggtatgatctgatagatggaaggatactcagtgatgttctccccaacctcttcagctttgcaaagaatccaaaaatatccctctgggggatcaggaacaatgatcaagtgctggaatgtttcagaattcccatgacaaggcaggcccataatgaattcatcatgctacaaaacctgttgcatgccctaggtcctacacagttggagtcaaaagacctttgggtctatatatgaggccaggccggccagcaaagatacacctcggctgcatactacaagtatcacttcagaaccctacagccccaaccgactgccacttggatctggaaatccaaatgcattccacgtatcaaattctttgcatggttattactgaatgacaggttaaataccaggaatatgctgagaaggagaaagaaattcttggaagaaggatataactgtgtgctctgtcagcttggggttgaagaaacaatggaacatattttcttcgattgcactttatctgttaggcgctggtttaagttgggaattatatgggaggatgatgctgtaactttgtctcaccccttttaattaaaagttgccggggggctttgccccacggtttggttcaaaaaaaacatacaagaatagagacctggtgttgctcgatgccgctgctgctcccctgctgcagtgttgttgcatgttggctgctgccggctgccgccggtgataatgcactggccaggttgtatcaccatgtagatgtagctgaaaacttaaagagaaactagtagctagctagccgatggatgggttaaaattagacatattttattttgacttatctgtcgatagatagatagaattgttctattttggaattgttcaatataaagatgcactaaatgatcaacatagcactactacccttgttcctcttcatgatttgaacctaaaaattgcaataaaaaatattatcctcactgcattgctctactctacatattataattaacaaattaacaagcaatcctctttgacaatattcattattcatgaattcatcacaacaattggagaaatggagagtcagctcaccactcactgttttagaaacagactgtgcctttgctctagcctctaggctctagaattcacaaattaataagaaatttctaaccaaaattgcatttgtgcactgcacattgctcaaaatcatgctcatcaagtcacaaattaataagaattcatcagtgttcagtttcagcggtgctcaccaagcctaatgtctgctggactgttgtttgcttgccggtgcctgat

SEQ ID NO: 31417 - DNA, 1842 bp, Zea Mays
atatcaaatttaccagggatctacaatgagaaagtggcctttggttgagagttgagaggccacgaactccaccaagagtccaagacccaatcacaagcatccgcttccttgctcgccttttctttaaggcctccaacggtggagccggaataaactccgtccacttcggcatccgccgggaatttgattcttctcccctaaatactcacgctaccttccacctccccctacttctctccctcatcttcttcgctaccagccagacaggcagctcacgtgtgcaggcagcggccaagatgatggcggaggcgtggacgccggtgccgttcccgccgacggcgccctgcttctggctgcacgacacgcactcggttttctggcggggaggagacgcgtggacggcggcggagaacaaactgttcgagaaggcgctggcgcagatcgaccgtaacgcgcccgacaggtgggagaaggtggcggaggtggtgcgcacgaagacggtcgacgacgtgaggaaccactaccacgacctggagaacgacgtcggcttcatcgaggccgggctcgtgccgttcccgcactacagcggctcggttccgtcgttcgggttcacccacgaggattgggacggagggttcaggcgcggctactgccttaagcgcgcgcgcggctccgacccggagcggaagaagggcgtcccctggacggaggaggagcacaatacgggagaggggactggaggaacatctcgcgcaagtacgtgacgacccggacgccgacgcaggtggccagccacgcgcagaagtacttcatccgcctcaactccggcggcaaggacaagcgccggtccagcatccacgacatcaccaccgtcaacctccccgacgaagaccgcggcaacgcgccgccgtccgcggtcaccaccaccaccaacccctccgtcgccctcgtggacatgaagcccttcgttgcgccgtcgctcggcgtgccgcacccctacggcgacgtgaagctggagcctaagagctcgctggtggccggcctgggcttcaacgactccgtcctcctgatgcactgcggacagttgtaacgggctgttcttgcggcgagaaccgctcccgtcgcaacgtacgccaccaaccaccacctcatctatccccgggcgggcatcagggccggcggcacaagtcgcacgtcgtcgtgctaggcttggatgcagagttgcttcaggtgtactcctaccgatcagatggctggcacgtcccgccgcgtgtgacgaggatgaagagtggaacagtctcgtcgtccagctgccagctcgcggcagctccgagtggctgtgttgtgttcatcgagaacaagaggccatggcccatgggcgtacgcgtgccgttccagcgtccatttcggttcagtgtacaaaattcgacaagtacagagtccaacaacttccacggtaccgaacaataaagcattcgataaaaagcctcttccagcgtcaccggcggcttggattaggatccaggatcagaagatttctgtaccggcttaattgttaatgtatttttggtgtgtgcaacatctcccaccagatggtgttaacacttgtagtgtgtgatgcttgtagtggggtctcgcaaggtttttgtccgccattgttgctttgccagttactagctagtagaagtttagacatgatgttctattaaaaaaatgaaagcttagatgtgctcggctctggctggcttctccagccttcgtgtgctgcttgccgtcgctgtagaagcaacagaaacctgaaacgcagcagaagatcggtcggtctcactctcgttgtggaag

SEQ ID NO: 31418 - DNA, 2187 bp, Zea Mays
cagcccgtgcaatggtgcaactgtactaaccgcagagtgacgtcggggggtgtgggtgtggggggcggggggagtgacgcccggggtggcgatgacgacgctgcacatggacccgccggcgccgcctgcgcggcgttcggtgtcgaccagctgcgacctgcacccgggcgaggcgttcaccggcttctgcgccgcgtgcctgcgcgagcgcctccagggtctcgaggcgtctgccgccgcggcctccgcgccgggccgcaagtccacatcggccatccggtccctcttcgccagaccgttcgccgccggcagctcgtctgcgtccggtcccgctgagccgccggacctccggcggtgcaagtcgttctcgtgtggccacggcggggacgctcttgccgcagcggcggcggcggctggtgctgctgccaccagggcggacgagccgcagcggcgttcgtgtgacgtgcgggggcgcagcacgctgtgggcgctgttccaccaggacgaccgtgaccgcgtccgcgatggcacggcgttcgcggcgttcccagcctcctcatcgaccgccgcggccgcgctcgccgtcgacgtgcatcccccaccgcaggcaccgtgcatccccgacgttttctcggacgaggacatcccagtggtgatggagcccgacgagatagtcccggtggtcgagcaagaccccgtcgtcccgatggacatttctggcgaggtggaagccggaggcaatgcggcgcagagaggtatggccatcaaggatcacatcgatctcgagtcggcgcagagcaagaaggcatcgcccaaagacctcgccggtagcttctgggtcgccgcctccgtgttcagcaagaagtggcagaagtggcggcgcaagcagaagctcaagaaggaggctgccgtgagcaaaggcgccgcagcggcaatgccccctccggagaagccctcaagccgtcgttccttcgccggagtcggctccgtggggaggcaggctccgagctcgccgatggccggcgctcgtgcgacaccgacccgcgtttctccctggacgccgcgcgcatgtccatcgacgacgctggcttctcatgggacgagccccgcgcgtcctgggatgggtacctgttcggcggcggcgccggcattgggctcgggcgcgcgcctccgccgctctcccgcctccctcccatcctgtccgtcctggaggacacaccgacagacgtcgtcgagcgctccgatggccagatccccgtagaagacgacttcgaccccgacccgcccggtggctcgctacagaccagagactactacctggactcctccagccgcaggcgccggagcctggaacgttcgagctccgtacgcaggccgtccttcgaggtcacggatccaacaaggccgatggcgcccgcggtaaacgggaccgggagggagtccccgattggcggcggttcagagttctaccacttccagcacgccgaggacttgctggaccgcggcttcagctccaactcgctcatcgaggacatctccgcgagcctggaggcggcactatccgggcgcgccaagaagccgcgccggtggcgcaaggcgtggagcctgtgggggctcatccaccggcgcgccgcggggcgcaggagcggcggggggccgtcggacatcaccgaccgttccttctccgagccgtggccggacctgcgcgtccgcggagccaaccccaagatgcagcggtgcaacagcagcaacctgagcgcgcgcagctcgttcagcagcaacagcggcgggctcggcagctcccggcgcagctacgtggacgccaacggcaacgtgaggcggagggaggagcctcacgcgcaggcgcaggtggagcggacccgcagcgcgcgctactcgcccgggcgcgccgccgcggacaacggcatgctgcggttctacctgacgccgatgcggagcggcagcgggcggccgcgcggcggaggcggcctgcccagcaaggccgggcccgggcggccgctggcgacgcagtcgttcgcgcgcagcgtgctccgcctgtactagacacgaaccaggatgactgtgtcaaccgtgcgggtcctgcggccggtcacactcgcatgctcttttggaccgtgtggaattccttcccacggagacggacggaggcacagcaacaccaacaca

SEQ ID NO: 31419 - DNA, 2131 bp, Zea Mays
aacccacttcagcaggatgccaggatcactcccactcggcggctccccctttgccccgtgaggccgtgactcggcgacggagaagacaaaccatgacgcctcccggccaactgctccccttgtcccggctgcctcccggcctctccagccgctgcccgcctcccgctcatgcccaagccagagtgtcgcttctgcatccatgggcccaccgcctccatggccgcttcatgccttctcctcatctgttccggtctccagcctgcccccctcgtgctccaacgcctccagggctttcggccgccgcaggaggcgaggctcaggcggctgcggtggcggagttcgtgacgtcggagagggtcaaggtggcggcgatgctggggctagccctcgcgctctgcaacgccgaccgcgtcgtcatgtccgtcgccatcgtccctctctcgcaggcgtacgggtggaccccgtcattcgccggcgtcgtgcagtcatcctttctttggggatatctgatgtcgccgataattggtggagcacttgttgattactacggtggaaaacgagtcatggcttacggtgtagcattatggtccttggctacgttcctgtctccatgggcagctggtcgatctatctggttgtttctctttaccagagtcctgctgggtattgcagaaggagtggcactcccaagcatgaacaacatggtgttgaggtggtttcctcgcacagagagatctagtgctgtgggtattgcaatggctggctttcagcttggcaataccattgggttacttctttccccaattatcatgtcacgaactggaatatttggaccttttgtgatatttggattatttggatttctctgggtgttggtgtggataccggctatatctggcacgccaggtgaacatgcacagatatcagcatatgaactgaagtatataaccaaaggccagaaattggtgaaaccacaaattggaagtgaaaaaacaaaaaaggttccccctttcagtaaactgctttccaaatggccaacatgggctttgatttgtgcaaacgccatgcatagctggggttattttgttatcctttcatggatgccagtctatttcaaaacttatatcatgtcaatttgagagaagcagcttggttcagtgcactcccttgggtgatgatggcagttttaggctatgtggctggtgttgtatcggacatgcttattagaaatggtacagacattactttaacacggaagataatgcagtcaattggctttctggggccaggtattgctttgctctgtctgaatgcagcaaagagtccaatcattgcttcagcctggcttacagttgctgttggattgaaatccttcggccactcaggtttcttagtaaatctacaggagattgccccacaatatgctggagtcctacatggaatgtcaaatacagctgggacatttgctgccattctaggaactattggagcagggttttttgttgataggatgggttctttccgtggatttttgatattgacgtcgctcttatacttcagcagtgctcttttctgggacatctttgctactggagagcgtgttgattttgatggcactggctagcaactcagaggaactctgcggttttctgtccttaaaacacataatgttgattcaggacagtgtttttaccgccaaccatcaagaagttatttgcacctgaagataaacaacttcagttacgactgtacagtattgggttcaactttttaaagcacgcagtgagtttatcttggatgtcgagtatcagtgatagataaacacacgctgtgagtttatcttggaagttgaatatcagtgatggataaacacatggaactgtctttatagatcgttttagattttcttggagggatagtccctgacgatgtaacatggaataaacaacgggcaggatgccaaccattaatggcgccgaaagtagtacataactgaaactgatttgcagggtagttaggaaattggaatcccaaccattaagggagtatgggtttgaaaaacatgtgaatctggtgtacatgctacggaaagttgtgccctcgttggctcgttataacttgcaactttttt

SEQ ID NO: 31420 - DNA, 850 bp, Zea Mays
aagaatgcaagtggacacccgacggtattttatggatcagctatcttagtccatttcgccacctaaatgctaaattaatcaggtgccatgccactctagtttattttatcaagtttcggaacctgtctagttcatttcatcaagttcctatccattgacctgaacactcaacagtgacatcaagagaacgcttcagaggacaagccaaaggacgatgccatggtcaatttcgtctccggcagtggaattgtaaacatacctattgtgacatcctccaccaatcaaactattgtgaacagtagttgtcatacgtacatttactcctaaatcataaatcccccattggcttgacctgaaaacccatttcaaccacctttttatgataataaagatgtatgcacccagtcaaaatttgaatcagtcttgaatcagtccatcctccatcaactccgagtgtacaaaagctaagaatcagaagaacatggtacctgattatgcgcgagcagctgtcgtgccatcttcgaatcccatcagctatgcaggcagctcgcgaccggacatccccagccggccatggaggtttctctggcttcaacagcgagtcccagtcagatcctgggttctcttggacttctacctatacacctcgttcccgtatggtcaacaggaaggccaggagctcaatatcattccgggaaagagtcgctgcaattttagggtcatgcgcaaactgcttcactcctcgacctgaagtcaagaaagcacatgagaatcctccgatcgaggcccacgatgtgtctgctagtcccatctccagaatttcatcgacaagtagcacaagcaataatat

SEQ ID NO: 31421 - DNA, 923 bp, Zea Mays
tgagtacgtcaataatggaacactccgtcaacacttggatggatcaaaaggggaaccattggaatttgcacagcgtctcaacattgctattgatatagttcatgccattgcctacttgcacggatatacagatcatccaatcatccaccgagacattaagtcgtccaacattctcctaacagagcacctgcgagcaaaggttgccgattttggcttcgcgcgcctagcccccgaaaaccctgaagcgacccacgtgtcaacgctagtaaagggaacggccggatacgtggaccctgagtacctgcgcacaagccagctcaccgaccgcagcgacgtctactccttcggcgtcctcctcgtcgagctcgtcaccggccgacgccctatcgagcgtggccgcggccgcgggcgccaccaacgcctcaccaccgaatgggcgctgcgcaagtgcagggagggcttcgcagtggtggtgatggacccccggatgcggcggaccagcgctgtcgtggcggcggtggagaaggtgatggtgctggcagccgagtgcacggctccggatcgcgccgcgcgtccagcaatgcggcgctgcgccgagttgctctggtccgtgagacgcgacttgcagcaggagcagcagcgcgcgtcggccgcgagcgcaggagcgaggcggcacgatggctccacgtacgcgccgccgtcggttacgagtctgaggcaggacaggttccagaacttgagatgatctgctgcacgtgcacaatgttgaggacttgagggggaacacgatatagatttgaaaatggtgcggctgcggagtgctccctagtctcccttcgtaaaaaaaatgtcttctcgttttacaatgagaatgaattacaaaaatatataacaatatatatatatattaatacttatttctc

SEQ ID NO: 31422 - DNA, 2639 bp, Zea Mays
attttctcctgcccttctccccttccacacgaactaaaatatctccgcttctgcatttttccaaaaagcttcatggtctcgcccaatttatcggatccatcgccctcgtcacgtgacccctaccgccacctagaaaaagctcccccggccttccacagcttctcccattccactcggtgctttgcccgaggcccggagaagccttatcgcctcctccttgcacgccgaccgatcgccacaatcccccaccgctcgcctgcctggtgcccgccatgccggagatcaagtgcggcgcggccgagaaggtgaagccggcggcgagcccggaggcggagaagcccgcggacatcgctggcaacatctcctaccacgcgcagtacagcccccacttctcaccgttcgcgttcgggccggagcaggccttctacgccaccgccgagagcgtccgcgaccacctcatccagagatggaacgagacgtacttgcatttccacaagacggatccgaagcagacgtactacctgtccatggagtacctgcagggccgcgcgctcaccaacgccgtcggcaacctcggcatcaccggggcatatgcggaggccgtgaagaagttcggctacgagctcgaggccctcgcggggcaggaaaaagatgcagctctagggaatggcggcttgggtaggcttgcatcttgctttttggattcaatggcaacattgaatttgcctgcttggggctatggcctgcgttaccgatatggactgttcaaacaacacattgccaaggagggccaggaagaagttgcagaagattggcttgataaattcagcccttgggagattcccaggcatgatgtggtgttccctgtcagattttttggccatgttgagattttgcctgatggctctcggaaattggtcggaggagaagtcctgaaggctttagcatatgatgtgccaatccctggatacaagacaaaaaatgcaatcagtcttcgtctttgggaagcaaaagctactgctgaagatttcaacttatttcaattcaatgatggtcaatatgagtcagctgcccaacttcatgctagggctcaacagatatgtgccgttctttatcccggtgatgctacagaagaaggaaagcttctaaggctgaagcagcagtttttcctttgcagcgcatcacttcaggtgaatggagtggctgagttgcatagcaacattttgaagcaagaactatttgcagattatgtctctatatggcctaccaaattccaaaacaaaactaatggaatcacgcctcgaagatggctccggttttgtaaccctgagttgagtgaaatagtcacaaaatggctaaagtcagatcagtggacaagtaatcttgatctgctcactggacttcgcaaatttgcagatgatgaaaagcttcatgctgagtgggcagcagccaagttatcttgcaagaagcgcctggccaaacatgtgttggatgtgacaggtgttacgattgatccaactagcctttttgatatacagattaagcgcatacatgagtacaagagacagctcctaaacatattgggagctgtttacagatacaaaaaattaaagggaatgagtgcagaagagaagcagaaggtcacaccgcgcactgtcatgataggagggaaagcgtttgcaacatacactaatgccaaaagaatagtgaaattggtgaatgatgttggtgctgttgtgaacaatgatcccgaagttaacaaatatctgaaggttgtctttatcccaaattacaatgtatcagtggctgaagtgcttattcctggtagcgaattgtcacagcatattagtactgctggtatggaagcaagtggaacaagcaacatgaaattctctctgaatggttgtgttatcattggcacccttgatggagctaatgttgaaataagagaggaggttggagaagataatttcttccttttcggtgccaaagccgatgaagttgctgggctgaggaaggatagagaaaatggtctgttcaaaccagacccacgttttgaagaagccaagcagtttataaggagtggcgcttttggcagctatgactatgaacctctcttggattcccttgaagggaattctggatttgggcgtggtgattatttccttgttggctatgacttcccaagctacatcgatgcacaggatcgggtggatgcagcctacaaggataagaagaagtggaccaagatgtccatcttgaacacagctgggagtggcaaattcagtagcgatcgcaccatcgcccagtatgccaaggagatatgggacatcaaggctagccctgtcgtgtgaacgagggggttgcgattcaacaccaaacgtagtttcttggggtgctataatagtaaggaagaataatgacccacggtgcttgacgcccacttgcgttgtaggcatggaacgggggcacctagcttgttctacagcgctgtctattttgaattggtgcgactttgttgctcttttttcctcccccttatatcttatgaaacaagatccttttgatctgtgctctgaaataaaataattcagttatgatattcgtcgccataatgtgcttgagaaatggatgtccct

SEQ ID NO: 31423 - DNA, 2059 bp, Zea Mays
aacacatcgacgaatcaagcgccctctcatctagcattggatctccatagccaccacctctaaggaaaaagatgcagctctagggaatggcggcttgggtaggcttgcatcttgctttttggattcaatggcaacattgaatttgcctgcttggggctatggcctgcgttaccgatatggactgttcaaacaacacattgccaaggagggccaggaagaagttgcagaagattggcttgataaattcagcccttgggagattcccaggcatgatgtggtgttccctgtcagattttttggccatgttgagattttgcctgatggctctcggaaattggtcggaggagaagtcctgaaggctttagcatatgatgtgccaatccctggatacaagacaaaaaatgcaatcagtcttcgtctttgggaagcaaaagctactgctgaagatttcaacttatttcaattcaatgatggtcaatatgagtcagctgcccaacttcatgctagggctcaacagatatgtgccgttctttatcccggtgatgctacagaagaaggaaagcttctaaggctgaagcagcagtttttcctttgcagcgcatcacttcaggtgaatggagtggctgagttgcatagcaacattttgaagcaagaactatttgcagattatgtctctatatggcctaccaaattccaaaacaaaactaatggaatcacgcctcgaagatggctccggttttgtaaccctgagttgagtgaaatagtcacaaaatggctaaagtcagatcagtggacaagtaatcttgatctgctcactggacttcgcaaatttgcagatgatgaaaagcttcatgctgagtgggcagcagccaagttatcttgcaagaagcgcctggccaaacatgtgttggatgtgacaggtgttacgattgatccaactagcctttttgatatacagattaagcgcatacatgagtacaagagacagctcctaaacatattgggagctgtttacagatacaaaaaattaaagggaatgagtgcagaagagaagcagaaggtcacaccgcgcactgtcatgataggagggaaagcgtttgcaacatacactaatgccaaaagaatagtgaaattggtgaatgatgttggtgctgttgtgaacaatgatcccgaagttaacaaatatctgaaggttgtctttatcccaaattacaatgtatcagtggctgaagtgcttattcctggtagcgaattgtcacagcatattagtactgctggtatggaagcaagtggaacaagcaacatgaaattctctctgaatggttgtgttatcattggcacccttgatggagctaatgttgaaataagagaggaggttggagaagataatttcttccttttcggtgccaaagccgatgaagttgctgggctgaggaaggatagagaaaatggtctgttcaaaccagacccacgttttgaagaagccaagcagtttataaggagtggcgcttttggcagctatgactatgaacctctcttggattcccttgaagggaattctggatttgggcgtggtgattatttccttgttggctatgacttcccaagctacatcgatgcacaggatcgggtggatgcagcctacaaggataagaagaagtggaccaagatgtccatcttgaacacagctgggagtggcaaattcagtagcgatcgcaccatcgcccagtatgccaaggagatatgggacatcaaggctagccctgtcgtgtgaacgagggggttgcgattcaacaccaaacgtagtttcttggggtgctataatagtaaggaagaataatgacccacggtgcttgacgcccacttgcgttgtaggcatggaacgggggcacctagcttgttctacagcgctgtctattttgaattggtgcgactttgttgctcttttttcctcccccttatatcttatgaaacaagatccttttgatctgtgctctgaaataaaataattcagttatgatattcgtcgccataatgtgcttgagaaatggatgtccct

SEQ ID NO: 31424 - DNA, 2048 bp, Zea Mays
caggagttgggcaagggcgaatgcagcaactacacaagaagaacttgaaacatttatggaacacgaagatgaaacaaagttgaggaagaaaaatcaaatttctggagataaagatcaggagtctcacaccggggattttgtccacttcgcctacactgatgaaggatatgattgccagatttaaagaaaggaaatctgatagagtttcagggaagtggagtgagttccctactaaagttgctgttcaactgaatgacactcaccctactcttgccatccctgagctaatgaggttacttatggatgaggagggacttggttgggatgaagcttgggacattacatataggacaatttcctacaccaatcatacagttctccccgaagctcttgaaaaatggtcacaaattgtgatgaggaaattacttccccgacacatggaaattattgaggaaattgacaagcggttcaaagaattggtaatctccaaacataaggaaatggagggaaaaatcgattcaatgaaagttttagataattcgaacccccagaagccggtagtgcgcatggcaaatttgtgtgtggtgtcttctcatacggtgaatggagtggctgagttgcatagcaacattttgaagcaagaactatttgcagattatgtctctatatggcctaccaaattccaaaacaaaactaatggaatcacgcctcgaagatggctccggttttgtaaccctgagttgagtgaaatagtcacaaaatggctaaagtcagatcagtggacaagtaatcttgatctgctcactggacttcgcaaatttgcagatgatgaaaagcttcatgctgagtgggcagcagccaagttatcttgcaagaagcgcctggccaaacatgtgttggatgtgacaggtgttacgattgatccaactagcctttttgatatacagattaagcgcatacatgagtacaagagacagctcctaaacatattgggagctgtttacagatacaaaaaattaaagggaatgagtgcagaagagaagcagaaggtcacaccgcgcactgtcatgataggagggaaagcgtttgcaacatacactaatgccaaaagaatagtgaaattggtgaatgatgttggtgctgttgtgaacaatgatcccgaagttaacaaatatctgaaggttgtctttatcccaaattacaatgtatcagtggctgaagtgcttattcctggtagcgaattgtcacagcatattagtactgctggtatggaagcaagtggaacaagcaacatgaaattctctctgaatggttgtgttatcattggcacccttgatggagctaatgttgaaataagagaggaggttggagaagataatttcttccttttcggtgccaaagccgatgaagttgctgggctgaggaaggatagagaaaatggtctgttcaaaccagacccacgttttgaagaagccaagcagtttataaggagtggcgcttttggcagctatgactatgaacctctcttggattcccttgaagggaattctggatttgggcgtggtgattatttccttgttggctatgacttcccaagctacatcgatgcacaggatcgggtggatgcagcctacaaggataagaagaagtggaccaagatgtccatcttgaacacagctgggagtggcaaattcagtagcgatcgcaccatcgcccagtatgccaaggagatatgggacatcaaggctagccctgtcgtgtgaacgagggggttgcgattcaacaccaaacgtagtttcttggggtgctataatagtaaggaagaataatgacccacggtgcttgacgcccacttgcgttgtaggcatggaacgggggcacctagcttgttctacagcgctgtctattttgaattggtgcgactttgttgctcttttttcctcccccttatatcttatgaaacaagatccttttgatctgtgctctgaaataaaataattcagttatgatattcgtcgccataatgtgcttgagaaatggatgtccct

SEQ ID NO: 31425 - DNA, 1388 bp, Zea Mays
accactgagacggaaccgagtaaccgacccacgcaaaaagcgctcagcagctcctgcgcgccccctttcccccgtcggccgatttcgtttatctcctcaatcctggcttgaatccgtgatacgtcgaggcggcgaagagccgaatcgtgccgcaccgtagaggaggctcaggcttctgcagggttttggagcggggcgatggaggcggcgagcaacggtgggctgctgtaccacgaggtgcaggaggggaagctctgcgccgtgcactgcgtcaacaccactctgcagggccccttcttctccgagttcgacctcgccgcgctcgccgccgacctcgaccagcgggagcgcctggtgatgctcgagggctcccgaagccccggcgcggacaacgctaccgcaggggacttcttcgccgagggcgaggggtcccacaacgtctccctcggcggagatttcagcatccagaaggcgctggaggtttgggacctccaggttatcccccttgattccccagctgcagggtcgtcccaatttgaccctgagcaggaggttgctttcatttgccaccttcaggaccactggttttgcatcaggaaggtgaatggggagtggtataacttcaatagtctgtacccagctcctgagcacctgtcaaagttttacctctcagctttcattgacaccctgaaggggtcaggctggagtatctttgcagtcagaggcaattttcccaaggagtgccctatggcaactgaaggctctaacggttttggtcaatggctcacccctgatgacgcccggaggataacagcctcctgtaaccaggttcaagcacctactcagcaggtacaaccccctctacttggtgaccgatcaggagggatgagtgaaatggacatgattgtagcgcagcaagaagaggctgatctgaatgctgctatagctgctagcttgatggacactgggggtccatttgccagctatgatgcagatcaagaatacagcaactcacaagatgctcctgccgctggaccagctcggagcaaagaagaagctgataaatctgagccgagcgcacctccctgtgaggaggaaactcaggagttggcttcaggaagcgacaccaaaagggaggtttcttctgtagaggagaaaggaacagcgagagaagaataggatggcacttttgatcagtctgtaactgagttagactatacacagagaaactgccctccatttcagtggagttatgccttttttggttccgaacgccgtacgtatacaaaatgcatagtctgaactgaatgggcttaaaaactttaactggtgtaactgctatgtgcgaactgcatagagactagagtggccgttttgaaccccccctc

SEQ ID NO: 31426 - DNA, 1792 bp, Zea Mays
ggcggcagccgggcaaccatcccatcccactcccagcaccaccagagtggtggggccttgtctcttctcctctcccactcttcgacacagccagagccagccacggccaagtcctttctctccccttccctcttctgcctactctccaactccaggcgcgattcgaagcatacaacacctccaccgcttctcaactcccctctgcgccctcgcctcttctcttttgttttacctgctgcggaatgcggtccacgactatggatcttcgagagattacttaaaaaaacacacacacacaaatcttgcagcagcctccacacctgggattctcctccatagcgtgtgccgtcagccgtgtactactggcctccacggctccacccgcctttggttggattcctgttgccgcttcctcctcccgtgatcggccgcattgcgctgagggattctcgttcgctttttcccgacgccgcctgcggcagcggtactatttactgctccgctctttcggcggtttcttcgtctgctgccttcccagtttgctagctcttatccggaatggatgccggagcggggggagctatatgagtgattccttctccttcccgtctcttggattgcctccgttttggttctttggtgggcggccatggcgaacggcggcgagcaatcggcgatcacggcggccgtggagcggggccgcgtgagcggcgtctcccggcggctcgcgggggaggagagctccgacaacgacgacgaggggagccagcgcttctcggacgccgaggatcggtcctggcactctcactcgcgccaaggctccgccttggagttggaggactgtatctccacgtccgcgcccatcagccgcgacgccggcgccgccagtgccggcggcggggacacggccacggccacggccacggccgagcgcgccaggaagtcgggcgtgtcggagtgctcgctggacggcgtcgtcgacctggaggccgggctggctgagatcgtcaaggccagcccggacaaggccgagaggaactgccgcatctgccacctcggcctcgacagcgcctccgccgagtccggcgccggcatcgtgctcggctgctcctgcaaggacgacctctcgcgtgcccacaagcagtgcgccgagacctggttcaagatcagaggcaacaagtttctgtgatgcggagttcatcgagcagtggaatgaatcaagcaacactgcatctgcccaggcaacagccactgagcctcgtagattttggcaagggcaccggttcctcaacttcctcctcgcttgcatgaggaagcatggggaagtttcagaattcaaactggctgagcatgagaaaacaactggagatggacaagagttgctttggtgaaatgaagggtagtgttaattctgcagggaggaaggggaaagctggcaattctgtaaatattggttgagtggtggtgaatgaggagtggaacttattttcgattgcgtcatgcttccatgatttattgatttgtgtaccttctggttaagtagattattagatattcttgtcttctagcttagttggttatattctttgtggtggaatacatctatccaggtcggacattagcttgtttagtttgctgcctaaattttcacgatttggctaacttttttctctctaaggttagttgttcaatttagacgactaaccttagataaagtgtacgcagttagccgtgaaccaaacgggtccattgctcgactttgcagagggaaccatattttcatggatttatt

SEQ ID NO: 31427 - DNA, 1130 bp, Zea Mays
cgctcatcacaagggcaagtggcgagcagcggccgggcgcacgcaacccatgaaaccacaagcttgtcacgggagatcgatgccaaagcaaaccggagtgaaagcgaacggaaatctagcggacgacgagaccgcgattaggaggaattggaccgtccgcaacggcgacccgctcgtgcacctccatatccggcagccggcaccacggccacggccgcgaggaggcgaagaacgtcgtctggtcccgcaccggatcgctaagctgtcatgggcgtccgatcccgaggtgttctacatgctcaacgccgtggcccggcagaaagagctgtgcgtggcgatcaacgtgtgctggggtgaccagagggagaaggtgtgcgacgcgacggaggacgggaggagctccatctcgagtcgctcgtcatggctagccgtggcctcggccagatccaaagatctgcaagctcatgaagtactgctactgatagctggtttccttcttagttatggggagtgctatatgcgattagataggaacagatatcagaacactaatagcgtgtttggtttgcaagatgaccggtctgaaataatccgattcaaacaccgaagctgctggaactgtttggttaacgtagtggagccaactcgtccgtcacaaacacgttcagcaacataccaaatctgcaggttgggtcggttcctccaatttcgccagacaagtatgacgagtgtatgctgaacgtactcaaccctacaaccaaacacgttgtaaaagatgcacatatttgcactagtcactctatgaatttcaaattgttgctgtaaaaaattggaatcagacactgaaaatccacgctgtgctatgttctgttactgtttttttttaaaccatgcacgtcatgctgcaggagacgaaaaattgggacgaaacttgggtccagataaactgacacactgaagccgcctgaaactctgaagcagactaaaagttttcagggagcaggggaacttcagttctttattgcccaacggaagctacagaacgcatattacgtatataatcctctggttcataaggttacaaagctattaaaagggcccaaaactgcatcccaagaaagaagaaactg

SEQ ID NO: 31428 - DNA, 1208 bp, Zea Mays
atcacaagggcaagtggcgagcagcggccgggcgcacgcaacccatgaaaccacaagcttgtcacgggagatcgatgccaaagcaaaccggagtgaaagcgaacggaaatctagcggacgacgagaccgcgattaggaggaattggaccgtccgcaacggcgacccgctcgtgcacctccatatccggcagccggcaccacggccacggccgcgaggaggcgaagaacgtcgtctggtcccgcaccggatcgctaagctgtcatgggcgtccgatcccgaggtgttctacatgctcaacgccgtggcccggcagaaagaggcaagctgcgtctagatggtaatactgatgccgcgtttgtgctgcacgcaccatgctggacgcaccatgctggacgcatacagctgtgcgtggcgatcaacgtgtgctggggtgaccagagggagaaggtgtgcgacgcgacggaggacgggaggagctccatctcgagtcgctcgtcatggctagccgtggcctcggccagatccaaagatctgcaagctcatgaagtactgctactgatagctggtttccttcttagttatggggagtgctatatgcgattagataggaacagatatcagaacactaatagcgtgtttggtttgcaagatgaccggtctgaaataatccgattcaaacaccgaagctgctggaactgtttggttaacgtagtggagccaactcgtccgtcacaaacacgttcagcaacataccaaatctgcaggttgggtcggttcctccaatttcgccagacaagtatgacgagtgtatgctgaacgtactcaaccctacaaccaaacacgttgtaaaagatgcacatatttgcactagtcactctatgaatttcaaattgttgctgtaaaaaattggaatcagacactgaaaatccacgctgtgctatgttctgttactgtttttttttaaaccatgcacgtcatgctgcaggagacgaaaaattgggacgaaacttgggtccagataaactgacacactgaagccgcctgaaactctgaagcagactaaaagttttcagggagcaggggaacttcagttctttattgcccaacggaagctacagaacgcatattacgtatataatcctctggttcataaggttacaaagctattaaaagggcccaaaactgcatcccaagaaagaagaaactg

SEQ ID NO: 31429 - DNA, 1731 bp, Zea Mays
atcacaagggcaagtggcgagcagcggccgggcgcacgcaacccatgaaaccacaagcttgtcacgggagatcgatgccaaagcaaaccggagtgaaagcgaacggaaatctagcggacgacgagaccgcgattaggaggaattggaccgtccgcaacggcgacccgctcgtgcacctccatatccggcagccggcaccacggccacggccgcgaggaggcgaagaacgtcgtctggtcccgcaccggatcgctaagctgtcatgggcgtccgatcccgaggtgttctacatgctcaacgccgtggcccggcagaaagagctgtgcgtggcgatcaacgtgtgctggggtgaccagagggagaaggtgtgcgacgcgacggaggacgggaggagctccatctcgagtcgctcgtcatggctagccgtggcctcggccagatccaaaggtaaggtacgcccgctgtagcaacagcattagcagttctccctgaaacaaaacaaccattcaaggctcgcgacatgctcgacgttctgagaatcaccacacgcaaagcgtcgctcatgatccatcatcggacacgaaacgcagtccagtcatatacggctcgaacttccagtgtgccgacgaaatgatacagcatgcgtatcacctgcatatatctagcttttccttattgtttttactctgctggacgaatttatgtgctgtctgatgcatcatgccctgtgactgtcgtcaagtcaaaagtagtggctggcctctaatttccagaaatatgaatctgcaattaacctaggcaaacccaaacaacccaaacaataaatccgatctattgttgcaccttactttcagtttcagctgttagcaccttactttctctagttgcaactggactctttttttttagtgtgaagtgaaaggctggcagataaactgcccagcttgtatcactacactacaggagaatgtcactggacagcatgactaaaccattaacaaaggatgattctgcttctggtctaagttttcttcccctcttttctgcctacagatctgcaagctcatgaagtactgctactgatagctggtttccttcttagttatggggagtgctatatgcgattagataggaacagatatcagaacactaatagcgtgtttggtttgcaagatgaccggtctgaaataatccgattcaaacaccgaagctgctggaactgtttggttaacgtagtggagccaactcgtccgtcacaaacacgttcagcaacataccaaatctgcaggttgggtcggttcctccaatttcgccagacaagtatgacgagtgtatgctgaacgtactcaaccctacaaccaaacacgttgtaaaagatgcacatatttgcactagtcactctatgaatttcaaattgttgctgtaaaaaattggaatcagacactgaaaatccacgctgtgctatgttctgttactgtttttttttaaaccatgcacgtcatgctgcaggagacgaaaaattgggacgaaacttgggtccagataaactgacacactgaagccgcctgaaactctgaagcagactaaaagttttcagggagcaggggaacttcagttctttattgcccaacggaagctacagaacgcatattacgtatataatcctctggttcataaggttacaaagctattaaaagggcccaaaactgcatcccaagaaagaagaaactg

SEQ ID NO: 31430 - DNA, 1130 bp, Zea Mays
atcacaagggcaagtggcgagcagcggccgggcgcacgcaacccatgaaaccacaagcttgtcacgggagatcgatgccaaagcaaaccggagtgaaagcgaacggaaatctagcggacgacgagaccgcgattaggaggaattggaccgtccgcaacggcgacccgctcgtgcacctccatatccggcagccggcaccacggccacggccgcgaggaggcgaagaacgtcgtctggtcccgcaccggatcgctaagctgtcatgggcgtccgatcccgaggtgttctacatgctcaacgccgtggcccggcagaaagagctgtgcgtggcgatcaacgtgtgctggggtgaccagagggagaaggtgtgcgacgcgacggaggacgggaggagctccatctcgagtcgctcgtcatggctagccgtggcctcggccagatccaaaggtaagatctgcaagctcatgaagtactgctactgatagctggtttccttcttagttatggggagtgctatatgcgattagataggaacagatatcagaacactaatagcgtgtttggtttgcaagatgaccggtctgaaataatccgattcaaacaccgaagctgctggaactgtttggttaacgtagtggagccaactcgtccgtcacaaacacgttcagcaacataccaaatctgcaggttgggtcggttcctccaatttcgccagacaagtatgacgagtgtatgctgaacgtactcaaccctacaaccaaacacgttgtaaaagatgcacatatttgcactagtcactctatgaatttcaaattgttgctgtaaaaaattggaatcagacactgaaaatccacgctgtgctatgttctgttactgtttttttttaaaccatgcacgtcatgctgcaggagacgaaaaattgggacgaaacttgggtccagataaactgacacactgaagccgcctgaaactctgaagcagactaaaagttttcagggagcaggggaacttcagttctttattgcccaacggaagctacagaacgcatattacgtatataatcctctggttcataaggttacaaagctattaaaagggcccaaaactgcatcccaagaaagaagaaactg

SEQ ID NO: 31431 - DNA, 536 bp, Zea Mays
cactgcgacaaacatcttttattggtggcaagcgccggagagcgtgactgcgtgaggacattcatgggagctggataggcatgccatcattcaaatcagatctagaacggcagtccttatggacgtcacacgccagatgtgaagtgaacctccggaacgtcatacccatacgacaagacaaggcacgcgtatgggctgggcaccggccgtgttgcatgaacagcaatcctgaagcaacacctcgcgtaccgcggacaccgactcgcggaccaacagtatcgctgaaagcaaaacgatgggacaggaggttcttgtgtgttgctcgacttgactgactgagagaaagtgatattgagcctgtaaaatgaaatctcatacgagcaattgaatagctgcagaaaaacaaaagaacttcagcaaatttcagctaactgcatccaggagagacgtttggtgagcatagcttctgctagttaacctcccatcgcgacatccacaaattcttctggctttgtggtttgattcttcagcaaaag

SEQ ID NO: 31432 - DNA, 2393 bp, Zea Mays
ctagcactgagaatttaagatatggttacctccagcgtgcagggcagcggagaccctcacctcacgccgatccggccgtttcattattcccacgccgctctcctactactcccgttgcccgctgctgctgccggtgccgcccgcccgcccgcccgttccatttcatctcggcttctctcgctggaaagtaaacccgggccaacggtcactcttcccaatcgagctgccaaactttttaaagccacccgcccccgtctccccgagaccgaaacgccaagaggagcccggacaagcaacgccactccactccccccggctcgaaacgcacaccgcgcgcgcaagcccacacaccacacacagagccctcgcgcctcgtcgcgcgcgcgatcagggccggccgaggaacggagcagcgcgccgctgcaccgcatcgcaccgcactgcagcagcaggtgagcacggcacggtgcacgacgccactggcgcggcgcgtacgcacgggcacgtggtggtacttggtacctgctccgcgacaacttggagctcgatagagcgggctggcgcatcgtaggatggggagcgcgggggaggaggagagggaggcccggagcgaggcggcgttcacggactccgcctccatcgacgggagcagctccagctccgacgcagcgtccaccgacgagtggctgcccgcggcgccggtgccggtgccggcggccaggaagccgggcggctgcgcctccgacaccgacgtggccaggcagcagcacaagcacaagcgcagagcaccatcagagatggagatgatgaaggagcggttcgcgaagctgctgctcggcgaggacatgtcggggagcggcaagggcgtctgcacggcgctcgccatctccaacgcaatcaccaacctctgcgccaccatcttcgggcagctctggaggctggaaccgctcccgccggagaagaaggccatgtggcggcgggagatggactggctgctctgcatcagcgaccacatcgtcgagctggtccccacgtggcagtcgttccccgacggaaccaggcttgagatcatgacaagcaggccacggtctgatctgtacattaatcttccagcacttcggaagctggatcatatgcttctcgaaatcctggaaagcttcagagacccggaattctggtatgttgagcaaggtatcgctgcaccagactgcgacggctctgcctccttcagggtggctttccaccgccgtgatgagaagtggtggctcccggtgcctcgtgtgcctcccggtggccttcacaacaaaacaaggaagcagctccagcacaagcgtgattgtgcaaaccaaatcctgaaggctgccatggccatcaacagcaatactttagcagagatggaggtccctgaaccttatcttgactccctaccaaagaatggacggtcaaccttaggtgatatcatataccgctacataacctctgatcagttctcccctgagtgtcttcttgattgcctggacctgtccacggagtaccaggccctggaagtcgcaaaccgtgttgaggcgtcagtgtatgtgtggcgccggagggttgctgccaaaccagtaaatggattgggccgaagcagcagtgctagatcatcgtggggcatggtaaaggacatgatggtagactcggagaagagagagctgctgctagctgaacgagcggagggcctgctaatatgcttgaagcaaaggtttcctgggttgacacagacaagcctggacatgagcaaaattcagtacaacaaggatgtgggcaaatcaatcctcgagagctattcgagggtgttagaaagtttggcttcaaacatcgtcacccgcatcgacgatctgctgaacatcgacgagctgaacggacacgctgaacatttcgcagcgacaggtgacgctgactgcaagattgcagtcagccagactgctgttccatccttcccagtgccagcctctggcacgccattcatgatggcatataccacgccgagcttctcgccggcgcaattggcaagcccgtcgaagaaagagaagacgtcgctgactccaggcagacgttctcagcacagtaggggtgctggcacaaagaaaggcttgatggatcgtgtgggtacagaaatcaagggtatgatgatcagcaacggtatgatgatcgatgtctctacaactacggagcttctttgtgtgagcgtccaggttttttactggcatgttgcatttctgatttctgtgcctaggcttttactggcagcgccggtaatcagctggtcgtggctgatcactctttcagtagtgggccggccgcacaacccagacgtggggatggaccttagtaaccgggaactgggaacttag

SEQ ID NO: 31433 - DNA, 2836 bp, Zea Mays
gcgcatgccgcacaaaggcagcgctagtgcagcgtccactccgagcgtttcacaccatgaggcgcgcaaaacctcaagcaaacgatgatgagttccgttcacgctcgaggccccgagactgtgtatatatagccaccactccatcagagacttcatcagggttcagtgaagtgtagtgcagccaaggcagcagagcgtgaggtgcactaccaggcaacaaggaaaaaaatggagctccaggcaaggtgcgtctgcgtcgtcgcgatgctcctggtggccagcttcgcggggctggatacggcgcacggcgcgggagagtgcggccgcgtcccggtggaccaggtggcgctcaagcttgctccgtgcgcggcggccacgcagaacccgcgcgccgcggtgccgccgagctgctgcgcgcaggtgcgcgccatcgggcgcgtccccaagtgcctgtgcgccgtcatgctgtccgacaccgcgcggaaggccggcgtcaagcctgccgtggccatgaccatccccaagcgctgcgccatcgccaaccgccccgtcggctacaacatataccctgccatgaggtgatcatgaggagccaagtgatggcgggcagtgttgtggcagtggcacctgaaggactccaaactctgactgccaatatgccgtgacctctgtcgcatcttactttccaaagatcccgagaataatgtggctgtaataatgcctcaactttggaataaaattgtatctttttcaccaagaaaatggaaaaaaaacctaataacatgatataaataagtactgttcaccacaagctgcataacaacaggcaaagcatcagttacattataaatgcttgactcctatctccattttcagtttcataaaaaatccagacctttgtcattgattttctgtgttaaaagtaagcgtttctatgctttacagaagaactgttaataaattgaaccttatcagagcagcagaagtttgccacgtactcgttcccctatacaaacttcaagttcttatagatatcatatactatataatttaaagaacagaacaatgacatggaagatggtaacagcagccaaagtaatatatagtacgtcaatagaattaaaactaatttctgcttagcttcttgacatggaactaagttgtggagatatctaattaacactattagctaaggtttccaatacgccccgatataatgaaaccccacatcagtggctcaatagtcaggtgtgttttccttgattggcttctcactctaactgggtttatgtgacaacaacgctagcccatataagcatactgaaaaggtgtaactaataatcagccaaaataatactgaaatagcggtaattaattatttgcccacactatatgaaaacgatgtaaaggtagattcaatggggtagtgatttacactatttggaacatctggaaagaacggaacagaagaatcttcaacggcgttttcaaaacgacagtgcaagttgcctctagagtgaaagaagacatcgaacaacggcaaagagccttaacttgggatgagtagaaccgtagagtttttccttgatttcttttgcactttagtgctgcccggttacctgttgggagcgtgcttctttttaattctaagcatgtacataacatcttccctatcttaactgaaaggcagagctcctgccattttttcaaaaaaaaaaagttttcactccaagatcgttaatcccaccccacccactggcctttctccacagacacatcgttgtacatcaatctagcagctagttctgcataacaattaattgtctaccaaaaatgatgacagctcgatacaaacaaacaatgaaacaaataaataagctttccttttataggctaatactgcaaacatgaaagggagagatggaagatagactaagcgctgaactacgcactaacagaatttcatcataggagtggaattggttgggtatcctctttagggcttgtttgggagtaaggggattagaggggattgaggggctagaatcccttgctatgcaaaattaaacagtaaggaattctagcctcctcaatcccctccaatcccctgtctcccaaacaagccctcaaagaaaagttatttagacactttatcacttgagatgttaatataaaatcggtttcctcagagaaaacctttaagaaattcacgtcatgctagaactatatattctggcttttggaaaaggagagagcatatgctcccttctatatgaagaactaaggttacgtatcataggccaagtgagccaacataggtatctacgaactatcagctgcgagtattaatatggaatttgaaaaggattctctagtacaaaaatgtgagatggacagcatatgcacaggcacagtacagcaacaaacttggtagcttttaacagtaataggatcctcctgtttaccttgttctccaaggagaggccaccaggttctcttagtaataaaatgagcctgtgagccccacaaaataaaaaaaaatgcagagttaacgatcagaagcttgaacagatagttacggtatctgtttcaatattaaaataatgatataccttgccaccagtcgccatgagaatctgcgactggatctttcttgtcccctttgtactgaaaacacacacacacgttaaattcaaaaccttgcaggagtgtagagtaaattcatgatgatctaaaaaactttgaactacaaattacaagagttctatttctaggttcagtaattcttacgtcagtggaggattctgtcgctttcttggttgtagagctgccgtag

SEQ ID NO: 31434 - DNA, 2844 bp, Zea Mays
gcgcatgccgcacaaaggcagcgctagtgcagcgtccactccgagcgtttcacaccatgaggcgcgcaaaacctcaagcaaacgatgatgagttccgttcacgctcgaggccccgagactgtgtatatatagccaccactccatcagagacttcatcagggttcagtgaagtgtagtgcagccaaggcagcagagcgtgaggtgcactaccaggcaacaaggaaaaaaatggagctccaggcaaggtgcgtctgcgtcgtcgcgatgctcctggtggccagcttcgcggggctggatacggcgcacggcgcgggagagtgcggccgcgtcccggtggaccaggtggcgctcaagcttgctccgtgcgcggcggccacgcagaacccgcgcgccgcggtgccgccgagctgctgcgcgcaggtgcgcgccatcgggcgcgtccccaagtgcctgtgcgccgtcatgctgtccgacaccgcgcggaaggccggcgtcaagcctgccgtggccatgaccatccccaagcgctgcgccatcgccaaccgccccgtcggctacaagtgcggcccatataccctgccatgaggtgatcatgaggagccaagtgatggcgggcagtgttgtggcagtggcacctgaaggactccaaactctgactgccaatatgccgtgacctctgtcgcatcttactttccaaagatcccgagaataatgtggctgtaataatgcctcaactttggaataaaattgtatctttttcaccaagaaaatggaaaaaaaacctaataacatgatataaataagtactgttcaccacaagctgcataacaacaggcaaagcatcagttacattataaatgcttgactcctatctccattttcagtttcataaaaaatccagacctttgtcattgattttctgtgttaaaagtaagcgtttctatgctttacagaagaactgttaataaattgaaccttatcagagcagcagaagtttgccacgtactcgttcccctatacaaacttcaagttcttatagatatcatatactatataatttaaagaacagaacaatgacatggaagatggtaacagcagccaaagtaatatatagtacgtcaatagaattaaaactaatttctgcttagcttcttgacatggaactaagttgtggagatatctaattaacactattagctaaggtttccaatacgccccgatataatgaaaccccacatcagtggctcaatagtcaggtgtgttttccttgattggcttctcactctaactgggtttatgtgacaacaacgctagcccatataagcatactgaaaaggtgtaactaataatcagccaaaataatactgaaatagcggtaattaattatttgcccacactatatgaaaacgatgtaaaggtagattcaatggggtagtgatttacactatttggaacatctggaaagaacggaacagaagaatcttcaacggcgttttcaaaacgacagtgcaagttgcctctagagtgaaagaagacatcgaacaacggcaaagagccttaacttgggatgagtagaaccgtagagtttttccttgatttcttttgcactttagtgctgcccggttacctgttgggagcgtgcttctttttaattctaagcatgtacataacatcttccctatcttaactgaaaggcagagctcctgccattttttcaaaaaaaaaaagttttcactccaagatcgttaatcccaccccacccactggcctttctccacagacacatcgttgtacatcaatctagcagctagttctgcataacaattaattgtctaccaaaaatgatgacagctcgatacaaacaaacaatgaaacaaataaataagctttccttttataggctaatactgcaaacatgaaagggagagatggaagatagactaagcgctgaactacgcactaacagaatttcatcataggagtggaattggttgggtatcctctttagggcttgtttgggagtaaggggattagaggggattgaggggctagaatcccttgctatgcaaaattaaacagtaaggaattctagcctcctcaatcccctccaatcccctgtctcccaaacaagccctcaaagaaaagttatttagacactttatcacttgagatgttaatataaaatcggtttcctcagagaaaacctttaagaaattcacgtcatgctagaactatatattctggcttttggaaaaggagagagcatatgctcccttctatatgaagaactaaggttacgtatcataggccaagtgagccaacataggtatctacgaactatcagctgcgagtattaatatggaatttgaaaaggattctctagtacaaaaatgtgagatggacagcatatgcacaggcacagtacagcaacaaacttggtagcttttaacagtaataggatcctcctgtttaccttgttctccaaggagaggccaccaggttctcttagtaataaaatgagcctgtgagccccacaaaataaaaaaaaatgcagagttaacgatcagaagcttgaacagatagttacggtatctgtttcaatattaaaataatgatataccttgccaccagtcgccatgagaatctgcgactggatctttcttgtcccctttgtactgaaaacacacacacacgttaaattcaaaaccttgcaggagtgtagagtaaattcatgatgatctaaaaaactttgaactacaaattacaagagttctatttctaggttcagtaattcttacgtcagtggaggattctgtcgctttcttggttgtagagctgccgtag

SEQ ID NO: 31435 - DNA, 1274 bp, Zea Mays
ccgtattgttggctccacctagggttttagcacctaccgccgcaacctcccttctactgccgccgcaacctccccatccttcgaatcccatccgacctagccctgcaacccgccggacgacgatcagcgaggtccgcgaccgagatggaccggtacttgagggtggagcggtcgcggaacgagtcaaccattgaggagaacgagatccgcatcaccgcgcagggcctcatctgcaactatgtctcctacgctagctccctcctccagacctctatgctgggttgaacatatgtcgttggacaatgaaactggattagacatacctggaataagggtcaggtcagtcacatgccttgttgcagcagactatttcgtccctggatattttttttgggctgtcttaattgccagtttagctcgtattggatatgaagaaaagaccatgtacatggttgtatatgattggaggttatctttccagaacactgaggttcgtgatcaaactttgagcagaataaagagcaatattgaactcatggtagcaacaaatggtggaaatagggtggtggtgttcccacactccatgggggtcctctattttctgcattttatgaaatgggtcgaagcacccatggggggcggtggtggtccgaactggtgtgagaaccatattaaagatgtaatgaatattggaggacctttcttaggagttcccaaggctgttgctgggcttttctcatctgaagccaaagatgttgccgttgctaggtataaggtaattgattcatttatttaaagcaaaagggaatagcaaaagaatggaatattattggatgctcgacaatcttggcggagcttttccatcgtctggacctcacaagtccagggagtgcctgcctctgatcctcatcatcaggaacaagctcaagtatgcactgacgtatcgtgaggtcatttctatcctgatgcaacaccatgtacttgttgatggcagggtcaggactgacaagacctaccctgctgggtttatggatgtcatttctatccctaagacaaacgagaactacaggctgcttccgtcttcacccaatcagggatgaggatgccaaggaaaacatagaatggaattcaaatttggtggccgcaaaagtgtggagacttgatttcatataaagttattagtgcaaacaattgtattttagtttagatttagagtacatttatgtatgcgttgtttgacaatgcttatttatgatatattgaatggtacttat

SEQ ID NO: 31436 - DNA, 1586 bp, Zea Mays
caatgtaaaggccggcacggtgctctggctcccaagttcctcccagctcggcgccccaaccagtccgtctccccccaactctaatcccctccccgcctacgctcgtggctctcccggatcctcggtcccccaccgccgctttccatcgttcttgggtccagcttccgaccatcgtctctagtgctccgatcgcgcaaggatcatcgtctccgtggtcgtgtgtcgtgcttggacatctatactccctccctcctaacctctcctctctcgatccgtaaccctaaccctaatcccctcttatgtaccttggtccttggattccgaccatcatatccggtgctccgactatataagggaatggacatggcactttcaaagcttaacagtggtggatgggttcatatattccctgaaggaagtcgttcaagggatggagggaaaaccattgctcctgccaagagaggtgttggaagattggtaatggatgctgacagtcttccagttgtaataccctttgtccatactgggatgcaggatataatgcctgttggaaaatgaatccccagagcaggaaaaagggtgattgtggtcgtgggtgacccaatcaactttgatgacctgctcatcgacaactgtggtgacacccaagatattcctagagggatcttgtacgacaaagtgacacagagaattgggcagcgattgcaggaactcaaggtcgaagtcgatagactggctgcagagcaggaacctgaactccaaaaccgcaacgtgggtgatgatggataccggctgtggcagcaggtcgattgggaaggatttgggatagggagttccatgttgccatcagaaccttcagctgctgcgcaagtgccatcaagggaagccgagcctgaaccgcacctggaagtggagcaaagtgtgtctccagccccaagtgcagcaaccttttacgatgttgctgttccacactggttccagcggcatgtggacccttctgagctcatggggttcgcttcccatggcctgatcaagcatggcaagttcttggaggaaggctacagggaattccaacaatcggctactactctgcacacctggtgggtttctcgtgccaacaatgctgcacaccgatggagcactgcttaggctgcctgttagtatattaggtttattattagttctttcacccgttcagcattgttcaattttgggttatatacagggcttggattgaatgaagaggttcgacccaacatggattcgaagacaaagttcagtgatgtcaagggagttgacgaagctaaagctgaacttgaggaaattgttcactacctacgagatcctaaggtgaattgttttagtcactacctacgaagctaaacctttgtggtggaacctttgtatgtttgaacctctgttgtggaagaactagtgtgctggaattgtgtatgacttgtgatgagaatgttgtgtatgatggcttttctgtgtattatgattatgtgagctatcatgagagctcagtgtgtcgtcactgtatggtcactgtatgtgggtgccataagtgacgatcccaactttag

SEQ ID NO: 31437 - DNA, 3037 bp, Zea Mays
ctacgcgcacacgtcaaactgtcccacacgacctgtacctgccccgccgcccaccggacgcaaccgcgtccgaccaccgccgccggaaccctacgcccccgcctcgccgcgccatggcggatccgccgcccgtggctgcctccgccttgccggcgcagcccgaccaggtcgccgcctccgtgtccaccccgcagaaccccaaccctaaccccctcctctccccccaaatccccccgtccccgaccgtctccgacctctccgcgcacatctcgtcccctcagcagctcgacccggtggctgcggcagctgccgcttcgggcggcgggggatccatggattaccccccgcgcccgccgcagctgcaggcgccttcgcccacgcaggcggggcccggcgccgccgggtttggccagatcccccgctcggggtcggcctcacgcctctccacggccagccagctccagcagtacgcggctaggatgtacggcgggcagatgagcttctcgggtggcggaggtctcgtgggccaacagcagcagctggcggggcgcacccccgtgcttgggcagggccagctggggatgctgcaaggccagggtaacgcgggatctgcggcacattttgggcttcagtcgcagatgatggcgcaggctaggcaaaagggcatggcacaaggcacccaattgaataatgctaatacagctcaagcgctacaagggatgcagcacatgggtgtcatgggtactatggggatgaaccagatgagaccaaatggaactattccctatggtgctcaacaaaggttcgcccatgcgcaaatgagaccacaagcgtctcaacaacctgcactgtctccacagaaggtgcctggtcaaggtctgtcgaggacagcatcaattgcagcattaaattcacaactgtctggatcatcacaaaatggacagatggtggcaatgtctatgcctcagcaacagcagtggttgaagcaaatacaatcatccatgggctcaccagtttccccacagcaacaatatcagcagcagaggctcctgtttatgcagcaactgcagcagaagacaggattgagccaacaacaacttctccaaatccaacaacagcatccacatctcactgcccaacagctgattcagcagcaacaaattttgcagcagtttcagcagcagcaactgctacaatctccgcgtgtttcagcatctggttcacagaagtctgcgaaccttacaggctcgcagccgggtacaccattgtcaggtggaaccatgactggtggaagtgcaagtcagggagccgaaggaactagccaacttcttgggaaaagaaaaatacaagatctggttgcacaggtagaccccctaggcaaggttgaccctgaagtggaggatttacttctagaaatcgccgatgacttcattgactcggtgactgcatttgcgtgtaccttggcaaagcacaggaaatcatcagttgtcgaagccaaggatgtgttgctgcacttagaaagaaattggcatttatctgttcctggtttctcaagggaggataagaatccccaaagaaattctgtaagatcacatcactttgcaattactattgttcttcgttatactatcttgcacagaggcacaattttctctttagttcttctgtctttgcatttgtgttatacgagtatacaataagccccactggagtctacttgcttcaatgtcctaactatggtagcgaattttgcttgactttattttttaggctttacaagttattttgtaaggttgaaatttatcatgaacgctcagacagcaggttgatggaattgtaatctgcaacaggtaaagccattggtagatccccaacaatcagaaagtgacgttactggtattagaggtacaagcaataaactaggtgctaataactcagttggcaaccatcaaatacgacctccaatggcagaaacttcggctgtgccaacagtgggctctctatcgaaagcccctcgcttctaagggctatgctgctcttccctattgaaggaaaaattcctccttctgaaggtttcaggacaatctacgtcgaaaacagcccataggctctaactcaaggattgctagcaagtggaagcaaaataaacccacgagcgtctgtggcaaactgcagatgcttgtgtcttacaggaaagcagttgctgacttaccaatcgtctctggcagatcctctctacctggggtcgtatgtaactgtattttctttttgtgcccgtaaatgcccccatccgttgtatataaatgtttttgcaatgggggcattatcgtctccagttttgatgttgctatgtaggcgaacaaatactaaagtggaagttaatgaagtgtaagattgatgtcgttttccgttactgaacagttgtgccatatctaacacgctggccgtcggtgggaagctttggcatttggagctggtggtcgtttggggccaccaacccgtattccaattttcagatagcgaaaatgcatcgtgttaaggtcttgaacctgtacttcatggctcagacaacgaaagtacttgaagacactttgctagggttcggggctccaaaaacgaaacatacatttttgtgatttcgccctctacccctgaaacggctggaacaacttttgaagccaaaaccaagtcaaaaacggcgaaaccgaaactgttttgttgtagaagccatagccactaaaagatggtttttcctgcattctccgttttttataagcctaagcattataaaaaaacctttggtttcggttttggcttaaaaaactctacttgtatgtgcttatttggtaggacttctaataagccagtgaatatgtcataacaaaagcccggccaaacaatatcggaatcgcaaccatcacgatacacaaacattaattattttggagatctgtcttctgcaacgaggaacgcatcggttgccctgtctagcttgtggaattttgtacattagcagcaacggaggaaatgcacaatt

SEQ ID NO: 31438 - DNA, 2242 bp, Zea Mays
atccacatgacatctaattttttaaggacataatatctaattctttcaatgttagttttcaccctgtgagatcatgatattgacaaagaaaaatctgttggttcttactcttgaatgtgaaggtagactgtgaaagaacgctaggcaaaagggcatggcacaaggcacccaattgaataatgctaatacagctcaagcgctacaagggatgcagcacatgggtgtcatgggtactatggggatgaaccagatgagaccaaatggaactattccctatggtgctcaacaaaggttcgcccatgcgcaaatgagaccacaagcgtctcaacaacctgcactgtctccacagaaggtgcctggtcaaggtctgtcgaggacagcatcaattgcagcattaaattcacaactgtctggatcatcacaaaatggacagatggtggcaatgtctatgcctcagcaacagcagtggttgaagcaaatacaatcatccatgggctcaccagtttccccacagcaacaatatcagcagcagaggctcctgtttatgcagcaactgcagcagaagacaggattgagccaacaacaacttctccaaatccaacaacagcatccacatctcactgcccaacagctgattcagcagcaacaaattttgcagcagtttcagcagcagcaactgctacaatctccgcgtgtttcagcatctggttcacagaagtctgcgaaccttacaggctcgcagccgggtacaccattgtcaggtggaaccatgactggtggaagtgcaagtcagggagccgaaggaactagccaacttcttgggaaaagaaaaatacaagatctggttgcacaggtagaccccctaggcaaggttgaccctgaagtggaggatttacttctagaaatcgccgatgacttcattgactcggtgactgcatttgcgtgtaccttggcaaagcacaggaaatcatcagttgtcgaagccaaggatgtgttgctgcacttagaaagaaattggcatttatctgttcctggtttctcaagggaggataagaatccccaaagaaattctgtaaagccattggtagatccccaacaatcagaaagtgacgttactggtattagaggtacaagcaataaactaggtgctaataactcagttggcaaccatcaaatacgacctccaatggcagaaacttcggctgtgccaacagtgggctctctatcgaaagcccctcgcttctaagggctatgctgctcttccctattgaaggaaaaattcctgacaatctacgtcgaaaacagcccataggctctaactcaaggattgctagcaagtggaagcaaaataaacccacgagcgtctgtggcaaactgcagatgcttgtgtcttacaggaaagcagttgctgacttaccaatcgtctctggcagatcctctctacctggggtcgtatgtaactgtattttctttttgtgcccgtaaatgcccccatccgttgtatataaatgtttttgcaatgggggcattatcgtctccagttttgatgttgctatgtaggcgaacaaatactaaagtggaagttaatgaagtgtaagattgatgtcgttttccgttactgaacagttgtgccatatctaacacgctggccgtcggtgggaagctttggcatttggagctggtggtcgtttggggccaccaacccgtattccaattttcagatagcgaaaatgcatcgtgttaaggtcttgaacctgtacttcatggctcagacaacgaaagtacttgaagacactttgctagggttcggggctccaaaaacgaaacatacatttttgtgatttcgccctctacccctgaaacggctggaacaacttttgaagccaaaaccaagtcaaaaacggcgaaaccgaaactgttttgttgtagaagccatagccactaaaagatggtttttcctgcattctccgttttttataagcctaagcattataaaaaaacctttggtttcggttttggcttaaaaaactctacttgtatgtgcttatttggtaggacttctaataagccagtgaatatgtcataacaaaagcccggccaaacaatatcggaatcgcaaccatcacgatacacaaacattaattattttggagatctgtcttctgcaacgaggaacgcatcggttgccctgtctagcttgtggaattttgtacattagcagcaacggaggaaatgcacaatt

SEQ ID NO: 31439 - DNA, 2166 bp, Zea Mays
tctgttggttcttactcttgaatgtgaaggtagactgtgaaagaacgctaggcaaaagggcatggcacaaggcacccaattgaataatgctaatacagctcaagcgctacaagggatgcagcacatgggtgtcatgggtactatggggatgaaccagatgagaccaaatggaactattccctatggtgctcaacaaaggttcgcccatgcgcaaatgagaccacaagcgtctcaacaacctgcactgtctccacagaaggtgcctggtcaaggtctgtcgaggacagcatcaattgcagcattaaattcacaactgtctggatcatcacaaaatggacagatggtggcaatgtctatgcctcagcaacagcagtggttgaagcaaatacaatcatccatgggctcaccagtttccccacagcaacaatatcagcagcagaggctcctgtttatgcagcaactgcagcagaagacaggattgagccaacaacaacttctccaaatccaacaacagcatccacatctcactgcccaacagctgattcagcagcaacaaattttgcagcagtttcagcagcagcaactgctacaatctccgcgtgtttcagcatctggttcacagaagtctgcgaaccttacaggctcgcagccgggtacaccattgtcaggtggaaccatgactggtggaagtgcaagtcagggagccgaaggaactagccaacttcttgggaaaagaaaaatacaagatctggttgcacaggtagaccccctaggcaaggttgaccctgaagtggaggatttacttctagaaatcgccgatgacttcattgactcggtgactgcatttgcgtgtaccttggcaaagcacaggaaatcatcagttgtcgaagccaaggatgtgttgctgcacttagaaagaaattggcatttatctgttcctggtttctcaagggaggataagaatccccaaagaaattctgtaaagccattggtagatccccaacaatcagaaagtgacgttactggtattagaggtacaagcaataaactaggtgctaataactcagttggcaaccatcaaatacgacctccaatggcagaaacttcggctgtgccaacagtgggctctctatcgaaagcccctcgcttctaagggctatgctgctcttccctattgaaggaaaaattcctccttctgaaggtttcaggacaatctacgtcgaaaacagcccataggctctaactcaaggattgctagcaagtggaagcaaaataaacccacgagcgtctgtggcaaactgcagatgcttgtgtcttacaggaaagcagttgctgacttaccaatcgtctctggcagatcctctctacctggggtcgtatgtaactgtattttctttttgtgcccgtaaatgcccccatccgttgtatataaatgtttttgcaatgggggcattatcgtctccagttttgatgttgctatgtaggcgaacaaatactaaagtggaagttaatgaagtgtaagattgatgtcgttttccgttactgaacagttgtgccatatctaacacgctggccgtcggtgggaagctttggcatttggagctggtggtcgtttggggccaccaacccgtattccaattttcagatagcgaaaatgcatcgtgttaaggtcttgaacctgtacttcatggctcagacaacgaaagtacttgaagacactttgctagggttcggggctccaaaaacgaaacatacatttttgtgatttcgccctctacccctgaaacggctggaacaacttttgaagccaaaaccaagtcaaaaacggcgaaaccgaaactgttttgttgtagaagccatagccactaaaagatggtttttcctgcattctccgttttttataagcctaagcattataaaaaaacctttggtttcggttttggcttaaaaaactctacttgtatgtgcttatttggtaggacttctaataagccagtgaatatgtcataacaaaagcccggccaaacaatatcggaatcgcaaccatcacgatacacaaacattaattattttggagatctgtcttctgcaacgaggaacgcatcggttgccctgtctagcttgtggaattttgtacattagcagcaacggaggaaatgcacaatt

SEQ ID NO: 31440 - DNA, 3004 bp, Zea Mays
aaattgtcaaattcaaacaaacacccctaaactttacacgaccgtctctgaacgacgcagacgggcgcagaggcacggcgccgacatcccccgaggcccgagggcccagccatgaaggccctgggcgcgcacgtcgtagacctgctccgcggcccgcacctcctccgcgccgccgtcctagctttcgccgttgcggtcgccttcctcgtcggctaccactggcccaacgcctacccgcgccttgtcttcttctcgtccgcctcctcctcgttggcgtccaggtcctcccgctctcctgccgtcgcgctctcccccaactccaacatctccttcgaaccgtctctgatccctacccccaccaccccgcctgcttctcctgctcccaatgcctgccccccgccctcgctaccaccaccgactccggcgccgccgcctcccctcctgccccctccaccaccagcgcgcctcggcatcgtcggcgaggacggcgctatgcaggacgacttcgacatcgggagcgtcggcgccaacgacaccgatctggccagcgacgagaccgcgccgcaggagcctagcaacggaggcgccagcggcggaccacccagggttcggattgggaggttcctggtctgtcccgagagcatgagggagtacataccctgcctcgacaacgaggaggagatcaagcggttgccctcgacggagcgcggggagcggtttgagcggcactgccctgcccaggacaagggtctcagctgcctcgtgccggtgcccaagggctacaaggctcccataccctggcctcagagcagagacgaggtctggtttagcaatgtgcctcacacaagattggttgatgacaaaggaggacagaattggatcaccaaggtcaaagataaattcagatttcctggaggcggaactcaattcattcatggagcaaatcgatacctagaccagatttcccagatggtaccaaatgttgcatttggatctcatactagagttgtcctggatgttggttgtggagtagcaagttttggtgcctatttactttcacgtgatgtcctgacattgtcaatagctccaaaagatgttcatgaaaatcagatacagtttgctcttgagcgtggtgttcctgcaatggtagcagcatttgcaacacgccggttattatatccaagccaagcgtttgatatgattcattgctcacgctgccgaataaattggactcgtgatgtctttccactaggtctgctgggatgatatcttgttcacattctcaaagaatatttgtcattgttagatgttgaatttatttcatgattatcaaagcaagaaatacttttaatcaacggatagaaaactagatggtatcctgctcctggaggttaatagattacttagagctggaggctactttgcttgggcagcacaacctgtttataagcatgaacaggcccaacaagaggcatggaaagagatggaggacctcactacccgactttgttgggagcttgtgaagaaagagggatatattgctatgtggaggaaacccttaaataactcttgctacatgaaccgtggtcctgcagtcaaaccttcactttgtgatgctgatgataacccagatgttgtctggtatgttagtctcaaagcttgtattagtcggcttccagagaatggcgaagcaccacctcctgttcaatggcctgcacgcttaatggagccaccaaagaggcttcagggtgttgaaatggatgcctacccatcaaagaatgagattatcaaagcagaaacgaaattttgggaggacataattgatggttatatccatgtctttaagtggaggaagttcaaactccgaaatgtaatggacatgagggctggatttggagggtttgcagctgcattaattagtcggaaacttgattggtgggtgatgaatgttgttcctgttaatgagccaaatgcactgcccgtaattttggatcgggggcttcttggagtagctcatgactggtgtgaaccctttgatacataccctaggacgtatgatctactgcatgcatctggtcttttctcaaaggagcagaaaaggtgtaatatctctagcatcttgctggagatggaccggatactcaggccaggtggtaaagcatatattcgtgaccggagagaagttatacaggaaatcaaagaaataacaagcgctatggggtggcgtggtactatacgtgacactgccgaaggcgcatacgccagtaggaaggttttgatgtgtgacaagcctatggtgcgttaggcgatcaggggaaggttcgatgacacctttgtggctagtttggaaattcaaattctcagggatttaaagagatttaggatttgttcggtttgaattggattgatggggattttaggggatttaatccccttctatacaaatttgtataggaggggatttaatcctccccaatcccaaatcccctcctaaccgaataagacctgagagggaaatgaactcaatctccctcaatccacccctaaccgaataggcctgagaggaaaatgaactaatttctccttcaattctctccaatccccggagaggggatttgagtttccaaactagccattgaagtttcgaattgccaagcaggagtaaattttcaggaacttttggaactgtcaagagctgctgtcgagacttttgactaacatttgttctgtagatagggtaggtcaaggtctcatttgtaactatttatgtgatcattcgtacaatgatgatcagtgtaattcctgacagtcatttttttgttgtagtcgttattgaaatcttacaaaagtgtaggagataatttatcggaagaatggccattttttactctaggtgacactgacacaaggagtaattggttttgtttcgctgattatgtcgttatcatgatctgatctgtatgtctcagccatcggatgatctggactttaagagttatctgag

SEQ ID NO: 31441 - DNA, 2911 bp, Zea Mays
cgcagaggcacggcgccgacatcccccgaggcccgagggcccagccatgaaggccctgggcgcgcacgtcgtagacctgctccgcggcccgcacctcctccgcgccgccgtcctagctttcgccgttgcggtcgccttcctcgtcggctaccactggcccaacgcctacccgcgccttgtcttcttctcgtccgcctcctcctcgttggcgtccaggtcctcccgctctcctgccgtcgcgctctcccccaactccaacatctccttcgaaccgtctctgatccctacccccaccaccccgcctgcttctcctgctcccaatgcctgccccccgccctcgctaccaccaccgactccggcgccgccgcctcccctcctgccccctccaccaccagcgcgcctcggcatcgtcggcgaggacggcgctatgcaggacgacttcgacatcgggagcgtcggcgccaacgacaccgatctggccagcgacgagaccgcgccgcaggagcctagcaacggaggcgccagcggcggaccacccagggttcggattgggaggttcctggtctgtcccgagagcatgagggagtacataccctgcctcgacaacgaggaggagatcaagcggttgccctcgacggagcgcggggagcggtttgagcggcactgccctgcccaggacaagggtctcagctgcctcgtgccggtgcccaagggctacaaggctcccataccctggcctcagagcagagacgaggtctggtttagcaatgtgcctcacacaagattggttgatgacaaaggaggacagaattggatcaccaaggtcaaagataaattcagatttcctggaggcggaactcaattcattcatggagcaaatcgatacctagaccagatttcccagatggtaccaaatgttgcatttggatctcatactagagttgtcctggatgttggttgtggagtagcaagttttggtgcctatttactttcacgtgatgtcctgacattgtcaatagctccaaaagatgttcatgaaaatcagatacagtttgctcttgagcgtggtgttcctgcaatggtagcagcatttgcaacacgccggttattatatccaagccaagcgtttgatatgattcattgctcacgctgccgaataaattggactcgtgatgtctttccactaggtctgctgggatgatatcttgttcacattctcaaagaatatttgtcattgttagatgttgaatttatttcatgattatcaaagcaagaaatacttttaatcaacggatagaaaactagattacttagagctggaggctactttgcttgggcagcacaacctgtttataagcatgaacaggcccaacaagaggcatggaaagagatggaggacctcactacccgactttgttgggagcttgtgaagaaagagggatatattgctatgtggaggaaacccttaaataactcttgctacatgaaccgtggtcctgcagtcaaaccttcactttgtgatgctgatgataacccagatgttgtctggtatgttagtctcaaagcttgtattagtcggcttccagagaatggcgaagcaccacctcctgttcaatggcctgcacgcttaatggagccaccaaagaggcttcagggtgttgaaatggatgcctacccatcaaagaatgagattatcaaagcagaaacgaaattttgggaggacataattgatggttatatccatgtctttaagtggaggaagttcaaactccgaaatgtaatggacatgagggctggatttggagggtttgcagctgcattaattagtcggaaacttgattggtgggtgatgaatgttgttcctgttaatgagccaaatgcactgcccgtaattttggatcgggggcttcttggagtagctcatgactggtgtgaaccctttgatacataccctaggacgtatgatctactgcatgcatctggtcttttctcaaaggagcagaaaaggtgtaatatctctagcatcttgctggagatggaccggatactcaggccaggtggtaaagcatatattcgtgaccggagagaagttatacaggaaatcaaagaaataacaagcgctatggggtggcgtggtactatacgtgacactgccgaaggcgcatacgccagtaggaaggttttgatgtgtgacaagcctatggtgcgttaggcgatcaggggaaggttcgatgacacctttgtggctagtttggaaattcaaattctcagggatttaaagagatttaggatttgttcggtttgaattggattgatggggattttaggggatttaatccccttctatacaaatttgtataggaggggatttaatcctccccaatcccaaatcccctcctaaccgaataagacctgagagggaaatgaactcaatctccctcaatccacccctaaccgaataggcctgagaggaaaatgaactaatttctccttcaattctctccaatccccggagaggggatttgagtttccaaactagccattgaagtttcgaattgccaagcaggagtaaattttcaggaacttttggaactgtcaagagctgctgtcgagacttttgactaacatttgttctgtagatagggtaggtcaaggtctcatttgtaactatttatgtgatcattcgtacaatgatgatcagtgtaattcctgacagtcatttttttgttgtagtcgttattgaaatcttacaaaagtgtaggagataatttatcggaagaatggccattttttactctaggtgacactgacacaaggagtaattggttttgtttcgctgattatgtcgttatcatgatctgatctgtatgtctcagccatcggatgatctggactttaagagttatctgag

SEQ ID NO: 31442 - DNA, 2866 bp, Zea Mays
gcacggcgccgacatcccccgaggcccgagggcccagccatgaaggccctgggcgcgcacgtcgtagacctgctccgcggcccgcacctcctccgcgccgccgtcctagctttcgccgttgcggtcgccttcctcgtcggctaccactggcccaacgcctacccgcgccttgtcttcttctcgtccgcctcctcctcgttggcgtccaggtcctcccgctctcctgccgtcgcgctctcccccaactccaacatctccttcgaaccgtctctgatccctacccccaccaccccgcctgcttctcctgctcccaatgcctgccccccgccctcgctaccaccaccgactccggcgccgccgcctcccctcctgccccctccaccaccagcgcgcctcggcatcgtcggcgaggacggcgctatgcaggacgacttcgacatcgggagcgtcggcgccaacgacaccgatctggccagcgacgagaccgcgccgcaggagcctagcaacggaggcgccagcggcggaccacccagggttcggattgggaggttcctggtctgtcccgagagcatgagggagtacataccctgcctcgacaacgaggaggagatcaagcggttgccctcgacggagcgcggggagcggtttgagcggcactgccctgcccaggacaagggtctcagctgcctcgtgccggtgcccaagggctacaaggctcccataccctggcctcagagcagagacgaggtctggtttagcaatgtgcctcacacaagattggttgatgacaaaggaggacagaattggatcaccaaggtcaaagataaattcagatttcctggaggcggaactcaattcattcatggagcaaatcgatacctagaccagatttcccagatggtaccaaatgttgcatttggatctcatactagagttgtcctggatgttggttgtggagtagcaagttttggtgcctatttactttcacgtgatgtcctgacattgtcaatagctccaaaagatgttcatgaaaatcagatacagtttgctcttgagcgtggtgttcctgcaatggtagcagcatttgcaacacgccggttattatatccaagccaagcgtttgatatgattcattgctcacgctgccgaataaattggactcgtgatgatgttgaatttatttcatgattatcaaagcaagaaatacttttaatcaacggatagaaaactagatggtatcctgctcctggaggttaatagattacttagagctggaggctactttgcttgggcagcacaacctgtttataagcatgaacaggcccaacaagaggcatggaaagagatggaggacctcactacccgactttgttgggagcttgtgaagaaagagggatatattgctatgtggaggaaacccttaaataactcttgctacatgaaccgtggtcctgcagtcaaaccttcactttgtgatgctgatgataacccagatgttgtctggtatgttagtctcaaagcttgtattagtcggcttccagagaatggcgaagcaccacctcctgttcaatggcctgcacgcttaatggagccaccaaagaggcttcagggtgttgaaatggatgcctacccatcaaagaatgagattatcaaagcagaaacgaaattttgggaggacataattgatggttatatccatgtctttaagtggaggaagttcaaactccgaaatgtaatggacatgagggctggatttggagggtttgcagctgcattaattagtcggaaacttgattggtgggtgatgaatgttgttcctgttaatgagccaaatgcactgcccgtaattttggatcgggggcttcttggagtagctcatgactggtgtgaaccctttgatacataccctaggacgtatgatctactgcatgcatctggtcttttctcaaaggagcagaaaaggtgtaatatctctagcatcttgctggagatggaccggatactcaggccaggtggtaaagcatatattcgtgaccggagagaagttatacaggaaatcaaagaaataacaagcgctatggggtggcgtggtactatacgtgacactgccgaaggcgcatacgccagtaggaaggttttgatgtgtgacaagcctatggtgcgttaggcgatcaggggaaggttcgatgacacctttgtggctagtttggaaattcaaattctcagggatttaaagagatttaggatttgttcggtttgaattggattgatggggattttaggggatttaatccccttctatacaaatttgtataggaggggatttaatcctccccaatcccaaatcccctcctaaccgaataagacctgagagggaaatgaactcaatctccctcaatccacccctaaccgaataggcctgagaggaaaatgaactaatttctccttcaattctctccaatccccggagaggggatttgagtttccaaactagccattgaagtttcgaattgccaagcaggagtaaattttcaggaacttttggaactgtcaagagctgctgtcgagacttttgactaacatttgttctgtagatagggtaggtcaaggtctcatttgtaactatttatgtgatcattcgtacaatgatgatcagtgtaattcctgacagtcatttttttgttgtagtcgttattgaaatcttacaaaagtgtaggagataatttatcggaagaatggccattttttactctaggtgacactgacacaaggagtaattggttttgtttcgctgattatgtcgttatcatgatctgatctgtatgtctcagccatcggatgatctggactttaagagttatctgag

SEQ ID NO: 31443 - DNA, 3043 bp, Zea Mays
gcacggcgccgacatcccccgaggcccgagggcccagccatgaaggccctgggcgcgcacgtcgtagacctgctccgcggcccgcacctcctccgcgccgccgtcctagctttcgccgttgcggtcgccttcctcgtcggctaccactggcccaacgcctacccgcgccttgtcttcttctcgtccgcctcctcctcgttggcgtccaggtcctcccgctctcctgccgtcgcgctctcccccaactccaacatctccttcgaaccgtctctgatccctacccccaccaccccgcctgcttctcctgctcccaatgcctgccccccgccctcgctaccaccaccgactccggcgccgccgcctcccctcctgccccctccaccaccagcgcgcctcggcatcgtcggcgaggacggcgctatgcaggacgacttcgacatcgggagcgtcggcgccaacgacaccgatctggccagcgacgagaccgcgccgcaggagcctagcaacggaggcgccagcggcggaccacccagggttcggattgggaggttcctggtctgtcccgagagcatgagggagtacataccctgcctcgacaacgaggaggagatcaagcggttgccctcgacggagcgcggggagcggtttgagcggcactgccctgcccaggacaagggtctcagctgcctcgtgccggtgcccaagggctacaaggctcccataccctggcctcagagcagagacgaggtctggtttagcaatgtgcctcacacaagattggttgatgacaaaggaggacagaattggatcaccaaggtcaaagataaattcagatttcctggaggcggaactcaattcattcatggagcaaatcgatacctagaccagatttcccagatggtaccaaatgttgcatttggatctcatactagagttgtcctggatgttggttgtggagtagcaagttttggtgcctatttactttcacgtgatgtcctgacattgtcaatagctccaaaagatgttcatgaaaatcagatacagtttgctcttgagcgtggtgttcctgcaatggtagcagcatttgcaacacgccggttattatatccaagccaagcgtttgatatgattcattgctcacgctgccgaataaattggactcgtgatggtgagctgtgattgctatataattatttttaattaaacaccgcactctttgtttgttgcctttctgtatcttcgcagtttgtctgaatgctcactttttttttctcccaattttcctagtctttccactaggtctgctgggatgatatcttgttcacattctcaaagaatatttgtcattgttagatgttgaatttatttcatgattatcaaagcaagaaatacttttaatcaacggatagaaaactagatggtatcctgctcctggaggttaatagattacttagagctggaggctactttgcttgggcagcacaacctgtttataagcatgaacaggcccaacaagaggcatggaaagagatggaggacctcactacccgactttgttgggagcttgtgaagaaagagggatatattgctatgtggaggaaacccttaaataactcttgctacatgaaccgtggtcctgcagtcaaaccttcactttgtgatgctgatgataacccagatgttgtctggtatgttagtctcaaagcttgtattagtcggcttccagagaatggcgaagcaccacctcctgttcaatggcctgcacgcttaatggagccaccaaagaggcttcagggtgttgaaatggatgcctacccatcaaagaatgagattatcaaagcagaaacgaaattttgggaggacataattgatggttatatccatgtctttaagtggaggaagttcaaactccgaaatgtaatggacatgagggctggatttggaggctgcattaattagtcggaaacttgattggtgggtgatgaatgttgttcctgttaatgagccaaatgcactgcccgtaattttggatcgggggcttcttggagtagctcatgactggtgtgaaccctttgatacataccctaggacgtatgatctactgcatgcatctggtcttttctcaaaggagcagaaaaggtgtaatatctctagcatcttgctggagatggaccggatactcaggccaggtggtaaagcatatattcgtgaccggagagaagttatacaggaaatcaaagaaataacaagcgctatggggtggcgtggtactatacgtgacactgccgaaggcgcatacgccagtaggaaggttttgatgtgtgacaagcctatggtgcgttaggcgatcaggggaaggttcgatgacacctttgtggctagtttggaaattcaaattctcagggatttaaagagatttaggatttgttcggtttgaattggattgatggggattttaggggatttaatccccttctatacaaatttgtataggaggggatttaatcctccccaatcccaaatcccctcctaaccgaataagacctgagagggaaatgaactcaatctccctcaatccacccctaaccgaataggcctgagaggaaaatgaactaatttctccttcaattctctccaatccccggagaggggatttgagtttccaaactagccattgaagtttcgaattgccaagcaggagtaaattttcaggaacttttggaactgtcaagagctgctgtcgagacttttgactaacatttgttctgtagatagggtaggtcaaggtctcatttgtaactatttatgtgatcattcgtacaatgatgatcagtgtaattcctgacagtcatttttttgttgtagtcgttattgaaatcttacaaaagtgtaggagataatttatcggaagaatggccattttttactctaggtgacactgacacaaggagtaattggttttgtttcgctgattatgtcgttatcatgatctgatctgtatgtctcagccatcggatgatctggactttaagagttatctgag

SEQ ID NO: 31444 - DNA, 2774 bp, Zea Mays
gcacggcgccgacatcccccgaggcccgagggcccagccatgaaggccctgggcgcgcacgtcgtagacctgctccgcggcccgcacctcctccgcgccgccgtcctagctttcgccgttgcggtcgccttcctcgtcggctaccactggcccaacgcctacccgcgccttgtcttcttctcgtccgcctcctcctcgttggcgtccaggtcctcccgctctcctgccgtcgcgctctcccccaactccaacatctccttcgaaccgtctctgatccctacccccaccaccccgcctgcttctcctgctcccaatgcctgccccccgccctcgctaccaccaccgactccggcgccgccgcctcccctcctgccccctccaccaccagcgcgcctcggcatcgtcggcgaggacggcgctatgcaggacgacttcgacatcgggagcgtcggcgccaacgacaccgatctggccagcgacgagaccgcgccgcaggagcctagcaacggaggcgccagcggcggaccacccagggttcggattgggaggttcctggtctgtcccgagagcatgagggagtacataccctgcctcgacaacgaggaggagatcaagcggttgccctcgacggagcgcggggagcggtttgagcggcactgccctgcccaggacaagggtctcagctgcctcgtgccggtgcccaagggctacaaggctcccataccctggcctcagagcagagacgaggtctggtttagcaatgtgcctcacacaagattggttgatgacaaaggaggacagaattggatcaccaaggtcaaagataaattcagatttcctggaggcggaactcaattcattcatggagcaaatcgatacctagaccagatttcccagatggtaccaaatgttgcatttggatctcatactagagttgtcctggatgttggttgtggagtagcaagttttggtgcctatttactttcacgtgatgtcctgacattgtcaatagctccaaaagatgttcatgaaaatcagatacagtttgctcttgagcgtggtgttcctgcaatggtagcagcatttgcaacacgccggttattatatccaagccaagcgtttgatatgattcattgctcacgctgccgaataaattggactcgtgatgattacttagagctggaggctactttgcttgggcagcacaacctgtttataagcatgaacaggcccaacaagaggcatggaaagagatggaggacctcactacccgactttgttgggagcttgtgaagaaagagggatatattgctatgtggaggaaacccttaaataactcttgctacatgaaccgtggtcctgcagtcaaaccttcactttgtgatgctgatgataacccagatgttgtctggtatgttagtctcaaagcttgtattagtcggcttccagagaatggcgaagcaccacctcctgttcaatggcctgcacgcttaatggagccaccaaagaggcttcagggtgttgaaatggatgcctacccatcaaagaatgagattatcaaagcagaaacgaaattttgggaggacataattgatggttatatccatgtctttaagtggaggaagttcaaactccgaaatgtaatggacatgagggctggatttggagggtttgcagctgcattaattagtcggaaacttgattggtgggtgatgaatgttgttcctgttaatgagccaaatgcactgcccgtaattttggatcgggggcttcttggagtagctcatgactggtgtgaaccctttgatacataccctaggacgtatgatctactgcatgcatctggtcttttctcaaaggagcagaaaaggtgtaatatctctagcatcttgctggagatggaccggatactcaggccaggtggtaaagcatatattcgtgaccggagagaagttatacaggaaatcaaagaaataacaagcgctatggggtggcgtggtactatacgtgacactgccgaaggcgcatacgccagtaggaaggttttgatgtgtgacaagcctatggtgcgttaggcgatcaggggaaggttcgatgacacctttgtggctagtttggaaattcaaattctcagggatttaaagagatttaggatttgttcggtttgaattggattgatggggattttaggggatttaatccccttctatacaaatttgtataggaggggatttaatcctccccaatcccaaatcccctcctaaccgaataagacctgagagggaaatgaactcaatctccctcaatccacccctaaccgaataggcctgagaggaaaatgaactaatttctccttcaattctctccaatccccggagaggggatttgagtttccaaactagccattgaagtttcgaattgccaagcaggagtaaattttcaggaacttttggaactgtcaagagctgctgtcgagacttttgactaacatttgttctgtagatagggtaggtcaaggtctcatttgtaactatttatgtgatcattcgtacaatgatgatcagtgtaattcctgacagtcatttttttgttgtagtcgttattgaaatcttacaaaagtgtaggagataatttatcggaagaatggccattttttactctaggtgacactgacacaaggagtaattggttttgtttcgctgattatgtcgttatcatgatctgatctgtatgtctcagccatcggatgatctggactttaagagttatctgag

SEQ ID NO: 31445 - DNA, 2614 bp, Zea Mays
gcacggcgccgacatcccccgaggcccgagggcccagccatgaaggccctgggcgcgcacgtcgtagacctgctccgcggcccgcacctcctccgcgccgccgtcctagctttcgccgttgcggtcgccttcctcgtcggctaccactggcccaacgcctacccgcgccttgtcttcttctcgtccgcctcctcctcgttggcgtccaggtcctcccgctctcctgccgtcgcgctctcccccaactccaacatctccttcgaaccgtctctgatccctacccccaccaccccgcctgcttctcctgctcccaatgcctgccccccgccctcgctaccaccaccgactccggcgccgccgcctcccctcctgccccctccaccaccagcgcgcctcggcatcgtcggcgaggacggcgctatgcaggacgacttcgacatcgggagcgtcggcgccaacgacaccgatctggccagcgacgagaccgcgccgcaggagcctagcaacggaggcgccagcggcggaccacccagggttcggattgggaggttcctggtctgtcccgagagcatgagggagtacataccctgcctcgacaacgaggaggagatcaagcggttgccctcgacggagcgcggggagcggtttgagcggcactgccctgcccaggacaagggtctcagctgcctcgtgccggtgcccaagggctacaaggctcccataccctggcctcagagcagagacgaggtctggtttagcaatgtgcctcacacaagattggttgatgacaaaggaggacagaattggatcaccaaggtcaaagataaattcagatttcctggaggcggaactcaattcattcatggagcaaatcgatacctagaccagatttcccagatggtaccaaatgttgcatttggatctcatactagagttgtcctggatgttggttgtggagtagcaagttttggtgcctatttactttcacgtgatgtcctgacattgtcaatagctccaaaagatgttcatgaaaatcagatacagtttgctcttgagcgtggtgttcctgcaatggtagcagcatttgcaacacgccggttattatatccaagccaagcgtttgatatgattcattgctcacgctgccgaataaattggactcgtgatgattacttagagctggaggctactttgcttgggcagcacaacctgtttataagcatgaacaggcccaacaagaggcatggaaaggtatgttagtctcaaagcttgtattagtcggcttccagagaatggcgaagcaccacctcctgttcaatggcctgcacgcttaatggagccaccaaagaggcttcagggtgttgaaatggatgcctacccatcaaagaatgagattatcaaagcagaaacgaaattttgggaggacataattgatggttatatccatgtctttaagtggaggaagttcaaactccgaaatgtaatggacatgagggctggatttggagggtttgcagctgcattaattagtcggaaacttgattggtgggtgatgaatgttgttcctgttaatgagccaaatgcactgcccgtaattttggatcgggggcttcttggagtagctcatgactggtgtgaaccctttgatacataccctaggacgtatgatctactgcatgcatctggtcttttctcaaaggagcagaaaaggtgtaatatctctagcatcttgctggagatggaccggatactcaggccaggtggtaaagcatatattcgtgaccggagagaagttatacaggaaatcaaagaaataacaagcgctatggggtggcgtggtactatacgtgacactgccgaaggcgcatacgccagtaggaaggttttgatgtgtgacaagcctatggtgcgttaggcgatcaggggaaggttcgatgacacctttgtggctagtttggaaattcaaattctcagggatttaaagagatttaggatttgttcggtttgaattggattgatggggattttaggggatttaatccccttctatacaaatttgtataggaggggatttaatcctccccaatcccaaatcccctcctaaccgaataagacctgagagggaaatgaactcaatctccctcaatccacccctaaccgaataggcctgagaggaaaatgaactaatttctccttcaattctctccaatccccggagaggggatttgagtttccaaactagccattgaagtttcgaattgccaagcaggagtaaattttcaggaacttttggaactgtcaagagctgctgtcgagacttttgactaacatttgttctgtagatagggtaggtcaaggtctcatttgtaactatttatgtgatcattcgtacaatgatgatcagtgtaattcctgacagtcatttttttgttgtagtcgttattgaaatcttacaaaagtgtaggagataatttatcggaagaatggccattttttactctaggtgacactgacacaaggagtaattggttttgtttcgctgattatgtcgttatcatgatctgatctgtatgtctcagccatcggatgatctggactttaagagttatctgag

SEQ ID NO: 31446 - DNA, 736 bp, Zea Mays
atcaaagcaagaaatacttttaatcaacggatagaaaactagattacttagagctggaggctactttgcttgggcagcacaacctgtttataagcatgaacaggcccaacaagaggcatggaaagagatggaggacctcactacccgactttgttgggagcttgtgaagaaagagggatatattgctatgtggaggaaacccttaaataactcttgctacatgaaccgtggtcctgcagtcaaaccttcactttgtgatgctgatgataacccagatgttgtctggtatgttagtctcaaagcttgtattagtcggcttccagagaatggcgaagcaccacctcctgttcaatggcctgcacgcttaatggagccaccaaagaggcttcagggtgttgaaatggatgcctacccatcaaagaatgagattatcaaagcagaaacgaaattttgggaggacataattgatggttatatccatgtctttaagtggaggaagttcaaactccgaaatgtaatggacatgagggctggatttggagggtttgcagctgcattaattagtcggaaacttgattggtgggtgatgaatgttgttcctgttaatgagccaaatgcactgcccgtaattttggatcgggggcttcttggagtagctcatgactgttacaatcgaagttcaaccgaaagggaagtgcaatcctaagaacacaagaatttcacaggagtaggatag

SEQ ID NO: 31447 - DNA, 1571 bp, Zea Mays
tggtcagatttggaagactgatgagaggcacacttacccatctggaagccatgaaggccagtcgtcggacctcatcggtgccatgtcgcccgccaatccggaccctggtcctccaccatgattccccatcctcgcttaacccatccttggtgctgtgaatctagggttcggcggggagaacagggggacacgaacgagagaagagcctcacgggagaactgggagcggcggcggcctgaacaacaaggacttgactcaagtcgccaagggcaaaacggaccttcctcgctgctgttaacgtccgttaccacgaaaagagacggcagtggtttaaacgggacgaaaaatcttggacaatggcatgggacgaacggtagaaattccagtggttcatatggaatttggatcttttataatggtcgcaaaggaatcgccaacctagctgtatgagcaggatcagttctccagaagtaagctccttttcaagcttcctgcgtggtgatccatcgccccgttaatctagtttagtcgaaggacgcaacgagcagtcctagcaagttaagcaacggccaaaaagttggggctaacgatctgcactacgttgtgcgtatgtggccaggccatgatccaacaattcgctgttcttgttccttgatactgcctgactggctttaattcctcgtctgagagaagaaaagcgtctattatattcatctgatcaggatctactactaatactacatcaaaatagaaggatggtcaaaatgggggagaaattagcgtggatttcagaagagctagtttcaagcatggagcatatgattttgccctgctctgcttcgctccgagaatcatatgccccggcggagatccacgacgaccacgctaacattgtcggcgctccgccgggccagcgccagctttgccagcagcatggccgcgtcggagcacgccttgtcggagtcctccttgcccacacccttgacaaccgccgatccgtcctcggcgcccgcgccggctgccgggagggccacgccgttcgggcgagcggccggcgccggcggaccgttgctacggaagcacgcccggacgacctcgcacgccatctcgttggtcacgacgtcccacaggccgtcgctggccaggatcagacactcgtcgtcgtcggtgcgctccgtcaccgttacctccggctccgacgacacaaacggctttaggtacctatcccctgcgcgcgcataagccggtcagttaaaatccagtgagtggactggccccccaaaacgacaccggtggcacaaacttgagctcacctatggctcgagacatggcgaggacgccgagaacacgggcaccatcccagtaaatgacgcggccacccgccgcctcgatgcgagccagctcgtcaggtcggtcaggctgaacgaaccaggaaattgagcacgtcaagctcagacaagttgcgcgccccgtgaagcctgatgcacgggagcagtgttatacagaccttgtggtcgacggagagcggaacggggacgccgccgcgggagaggacggcgcgcgagtcgccg

SEQ ID NO: 31448 - DNA, 1496 bp, Zea Mays
gccgtcgcgtcgatgcaagttgagacgtccctgcctggctgcctggctccctgccgcaaccgcatcaacgacgcacggcgccacggccacggcacggcaccacgcgctcagacgtccacgggctaccaaccccagctcaccgcactcaacccattgctgccacggcgatcacctcacccaccccgcgcacttttctcatcgcgccaacgcaaacaccacagcgcagcagcaagcgagctaactggagtacaaagcaagccaattcgctctgtgcctgtgccgctgcctaccgtcgcgcgagacgggcgagctcctctcccggccgccgacgccgcgggggattccttttccccggaatgctctgccgctccgtccgggcggaagaggagcactaggcggcggctcggatggggcgcccggggtacatcacggtgcccatactctcggtgctcgccgcgatcggctatgtctactacaccacggtgttcctggcgatccccgcgtggctggggctctcctcggcgaccgggctcgccaacgccgcggtcttcagcgcgctcgccgccgcctgcgtcgctacctacgccgtcgccgtatcgcgcgacccgggccgcgtgccagcgtccttcgtgcccgatgtcgaggacgccgggagccccatccacgagatcaagcgcaagggtggtgatttgagatactgccagaaatgttcgcattataaacctcctcgagcgcaccattgtcgtgcctgcaaaagatgtgttctaagaatggaccaccactgtatatggattaataactgtgttgggcatgagaactacaagatattcctagtttttgttatgtatgctgtaattgcaagcttctattctatgggggtgctgtgcatttacctaaagatgaacaaccaagcagtgattcttctagaacatctatagttgtttgtggggttcttctgtgccctttagcattggcactaatggtcctattgggttggcatgtttacctcatcttacataataagactactatcgagtatcatgaaggagttagggctacatggttggctgaaaaggctggaaacgtttatcatcatccttataacctgggaatctatgagaacctagtttcggtgctaggtcctaacatgttgtgctggctgtgcccaatatcaaggaacatcggaaatggtgttcgtttccgcacatcatatgacactccactatcaacttcagcaatgtgatgcacaccatatagggacagctgatcaagaggtcgtctggctacgaaccttgggaatgaccctgcagagtagtaatcgtctggcacagcattatagacagtcaatgcaaggctgggctagcgaatcacttcctgcattggctgaaaccctgagcgagaggcagaatagtctgcacgcatactcggaggcccggcgcagaccgtaaagcagtacctctgttgaccagcagcgtatgcctctttactgtgaaggc

SEQ ID NO: 31449 - DNA, 2165 bp, Zea Mays
gccgtcgcgtcgatgcaagttgagacgtccctgcctggctgcctggctccctgccgcaaccgcatcaacgacgcacggcgccacggccacggcacggcaccacgcgctcagacgtccacgggctaccaaccccagctcaccgcactcaacccattgctgccacggcgatcacctcacccaccccgcgcacttttctcatcgcgccaacgcaaacaccacagcgcagcagcaagcgagctaactggagtacaaagcaagccaattcgctctgtgcctgtgccgctgcctaccgtcgcgcgagacgggcgagctcctctcccggccgccgacgccgcgggggattccttttccccggaatgctctgccgctccgtccgggcggaagaggagcactaggcggcggctcggatggggcgcccggggtacatcacggtgcccatactctcggtgctcgccgcgatcggctatgtctactacaccacggtgttcctggcgatccccgcgtggctggggctctcctcggcgaccgggctcgccaacgccgcggtcttcagcgcgctcgccgccgcctgcgtcgctacctacgccgtcgccgtatcgcgcgacccgggccgcgtgccagcgtccttcgtgcccgatgtcgaggacgccgggagccccatccacgagatcaagcgcaagggtggtgatttgagatactgccagaaatgttcgcattataaacctcctcgagcgcaccattgtcgtgcctgcaaaagatgtgttctaagaatggaccaccactgtatatggattaataactgtgttgggcatgagaactacaagatattcctagtttttgttatgtatgctgtaattgcaagcttctattctatggttctcattatagggggtgctgtgcatttacctaaagatgaacaaccaagcagtgattcttctagaacatctatagttgtttgtggggttcttctgtgccctttagcattggcactaatggtcctattgggttggcatgtttacctcatcttacataataagactactatcgagtatcatgaaggagttagggctacatggttggctgaaaaggctggaaacgtttatcatcatccttataacctgggaatctatgagaacctagtttcggtgctaggtcctaacatgttgtgctggctgtgcccaatatcaaggaacatcggaaatggtgttcgtttccgcacatcatatgacactccactatcaacttcagcaatgtgatgcacaccatatatatctgctaaatcgcaaaagaaactcaggtgcccacacaaagtgctaggtttgctattcttcacagttctgatttttagcatttaaccaaagcgtttgtgtatccttaaaaggagagtgttttccaatgcttgaacttttgtagtaagggtgtgctacatcaaatccagcgtgtttaggatactgctacatacatcaaatcctaaagcctcctagaatctgtcattaggaatttttagagatgctgacatacttagatttttctctctttttggggacattcttgatcaaataagtaattattgcttgtgtagtagactagagtgggctgtattaacacacactaaaaaaaacggaaagaaaaggaaagatgtactcgtggttgttctgttgtaaaattatgtccaaactggtttttttttgtcgtgaaagctcgtcagctcgtgtattgttttgtcagatagtacataggagtaatgagtgttaaggaccaatcaaccaaatactattttatgtatacacttgttgagaaatacacgtggatatagctgtttgcacatatgggtgtatcctatttgttttgtgagctgtaccagcacgcgttactcgttatctctgccgcctcgcctggaatctggattcctgcatgttcctgattacacagctgatcaagaggtcgtctggctacgaaccttgggaatgaccctgcagagtagtaatcgtctggcacagcattatagacagtcaatgcaaggctgggctagcgaatcacttcctgcattggctgaaaccctgagcgagaggcagaatagtctgcacgcatactcggaggcccggcgcagaccgtaaagcagtacctctgttgaccagcagcgtatgcctctttactgtgaaggc

SEQ ID NO: 31450 - DNA, 1538 bp, Zea Mays
caagaaacgagtatattggtagcgaccctcgacccagaaacggcgtccccgacttggataagcaggggtggtgatttgagatactgccagaaatgttcgcattataaacctcctcgagcgcaccattgtcgtgcctgcaaaagatgtgttctaagaatggaccaccactgtatatggattaataactgtgttgggcatgagaactacaagatattcctagtttttgttatgtatgctgtaattgcaagcttctattctatgggggtgctgtgcatttacctaaagatgaacaaccaagcagtgattcttctagaacatctatagttgtttgtggggttcttctgtgccctttagcattggcactaatggtcctattgggttggcatgtttacctcatcttacataataagactactatcgagtatcatgaaggagttagggctacatggttggctgaaaaggctggaaacgtttatcatcatccttataacctgggaatctatgagaacctagtttcggtgctaggtcctaacatgttgtgctggctgtgcccaatatcaaggaacatcggaaatggtgttcgtttccgcacatcatatgacactccactatcaacttcagcaatgtgatgcacaccatatatatctgctaaatcgcaaaagaaactcaggtgcccacacaaagtgctaggtttgctattcttcacagttctgatttttagcatttaaccaaagcgtttgtgtatccttaaaaggagagtgttttccaatgcttgaacttttgtagtaagggtgtgctacatcaaatccagcgtgtttaggatactgctacatacatcaaatcctaaagcctcctagaatctgtcattaggaatttttagagatgctgacatacttagatttttctctctttttggggacattcttgatcaaataagtaattattgcttgtgtagtagactagagtgggctgtattaacacacactaaaaaaaacggaaagaaaaggaaagatgtactcgtggttgttctgttgtaaaattatgtccaaactggtttttttttgtcgtgaaagctcgtcagctcgtgtattgttttgtcagatagtacataggagtaatgagtgttaaggaccaatcaaccaaatactattttatgtatacacttgttgagaaatacacgtggatatagctgtttgcacatatgggtgtatcctatttgttttgtgagctgtaccagcacgcgttactcgttatctctgccgcctcgcctggaatctggattcctgcatgttcctgattacacagctgatcaagaggtcgtctggctacgaaccttgggaatgaccctgcagagtagtaatcgtctggcacagcattatagacagtcaatgcaaggctgggctagcgaatcacttcctgcattggctgaaaccctgagcgagaggcagaatagtctgcacgcatactcggaggcccggcgcagaccgtaaagcagtacctctgttgaccagcagcgtatgcctctttactgtgaaggc

SEQ ID NO: 31451 - DNA, 1529 bp, Zea Mays
cccgcactgcattccacagtccccatcagcacaatgccaaattgaagtttgggacgcacctcgtatcagaattcagacggaagaatctcgtcattgcaagtctatataaaaaaaatgggctttcgtcgtcccattactccgctacccatgggttgctagcttccaaccgccactttgatgggagatggggactatgcgctgcaccctgagcccggcgccgacgacgtgggcgtctgctggcccggcgagctcgacgagcagctcgtaacggagctcctcagcgacgacagcctcctcctcggcgccctgcagcaggaccccgccgccgtcgactcggagcactactgctcgcgtgacacaggcgcgtcgtcatctgctcccgcggcgtgcaccggcggcggcggcaccgtggccgagcaccaggagcttcttccgcagccggaggcggtgagcagggctctgtgctcggtgtacaccggcccaacgatccgggacatcgagaaagcgctgtcgacgtccaggccgccgtacccctggagcagccgccgctacagtccaatgcatctgttcggagcggcgggtcgggcaccggagaggcacacgacgaaggtgaggagctgtggcggcaagacgccgagcgacgggtacaggtggaggaagtacgggcagaagtccatcaagaacaacccccatcccaggagctattacaagtgcacgagctcccggtgcggcgcgaagaagcacgtggagaaatctatggacgactcagagatgctgatcgtcacgtacgagggttcgcacctgcacggcccacagccgctcttcccgcgtcgacagtggctgtcggttgacctgtccggcgcgggggtagcggcctcgaagacgaagcagcagcagaccaggtcctcctccccggccgcgtcagccacgctcgcaagcgacgacgggggcggcggctggccaccgagcctgcaaataatgacgcgcaacgccgagacgcgaggaggagggctcacggctgatgcaggcgagagcgagacgacgccggggcttcagagcggacgcacgggtgtgaccgcggactcgtgcgacgatggctccaccgcctccgtgccgccgccgccgcagactgctccctcgtttcactgtgactcgccgcctacgacctggtcctggtcgtgccttgactacaccctcgcctggtcccctgaagctcctctgcttcagtagaagccggtaaactagcttgtttaggaacaggatatgcatacatagatctcaaagagatcgaaagataagagaccccagctgtttattatattccatgcaaaaaaaaaactcaagtgactaaagccagaacgctgacgtgaagctacctaagttggtgcagcgacagtgataaaaaggctaagcacttttctagttaaccagctatactattattgtacagtgatatatatagatgccaatgtgtgcccttagcactagtaattattcatgtaacaattggttgggcgtgggccgtcgcc

SEQ ID NO: 31452 - DNA, 1500 bp, Zea Mays
gccaaattgaagtttgggacgcacctcgtatcagaattcagacggaagaatctcgtcattgcaagtctatataaaaaaaatgggctttcgtcgtcccattactccgctacccatgggttgctagcttccaaccgccactttgatgggagatggggactatgcgctgcaccctgagcccggcgccgacgacgtgggcgtctgctggcccggcgagctcgacgagcagctcgtaacggagctcctcagcgacgacagcctcctcctcggcgccctgcagcaggaccccgccgccgtcgactcggagcactactgctcgcgtgacacaggcgcgtcgtcatctgctcccgcggcgtgcaccggcggcggcggcaccgtggccgagcaccaggagcttcttccgcagccggaggcggtgagcagggctctgtgctcggtgtacaccggcccaacgatccgggacatcgagaaagcgctgtcgacgtccaggccgccgtacccctggagcagccgccgctacagtccaatgcatcttggcaggttcggagcggcgggtcgggcaccggagaggcacacgacgaaggtgaggagctgtggcggcaagacgccgagcgacgggtacaggtggaggaagtacgggcagaagtccatcaagaacaacccccatcccaggagctattacaagtgcacgagctcccggtgcggcgcgaagaagcacgtggagaaatctatggacgactcagagatgctgatcgtcacgtacgagggttcgcacctgcacggcccacagccgctcttcccgcgtcgacagtggctgtcggttgacctgtccggcgcgggggtagcggcctcgaagacgaagcagcagcagaccaggtcctcctccccggccgcgtcagccacgctcgcaagcgacgacgggggcggcggctggccaccgagcctgcaaataatgacgcgcaacgccgagacgcgaggaggagggctcacggctgatgcaggcgagagcgagacgacgccggggcttcagagcggacgcacgggtgtgaccgcggactcgtgcgacgatggctccaccgcctccgtgccgccgccgccgcagactgctccctcgtttcactgtgactcgccgcctacgacctggtcctggtcgtgccttgactacaccctcgcctggtcccctgaagctcctctgcttcagtagaagccggtaaactagcttgtttaggaacaggatatgcatacatagatctcaaagagatcgaaagataagagaccccagctgtttattatattccatgcaaaaaaaaaactcaagtgactaaagccagaacgctgacgtgaagctacctaagttggtgcagcgacagtgataaaaaggctaagcacttttctagttaaccagctatactattattgtacagtgatatatatagatgccaatgtgtgcccttagcactagtaattattcatgtaacaattggttgggcgtgggccgtcgcc

SEQ ID NO: 31453 - DNA, 3356 bp, Zea Mays
cggaaattagcgtcaagctgcaagcctgcaagtgactcatgcgccggccgcttcaatcgtcggcgccttccactcgcggtcgcaggagctcagctcgtcgtatcttatctatcgccattcgccagccaaaaccccacccgagaggcggagactgcgttgcgtggacggcggactaaaccctaccgcccttcgtctctggtccatgatggggccctcgaccatggcggcgcgggcagcgggctgctgctcctcggcggcgctcgccttcttccgtctccaccccctccgatgcgccgtccgcccggccgccgctctcgttggagggtgctcctctggcctccgcggcggctgccggagccgcctggcgcatagcatcgtggacttggttatggaggagctccgctcccgccggcgcgtccgggtctcggcgaagataggattgcagggcacgaaggaattgcctgacaataagatagtcaagagaacattacagaaaggattgctgcttgaatttcagaaagatcctgagagatctttgcttgctgtagttgaaaggcctgatggaaagaaaaactggatggtgactgatcaggtcgtttttgaacggatagctattgcttgtccagttgactatccagtttagttaatttatacctgaacatacatatattgttgttatgggttctctggtgacatgacttttacttttgtatagaatggtgtcatgtcttcgataaagccccagcaggttacatatgttgtacctggtatcatgaattttgactattcaaaaatagacgaatttcttgagaaaacgcaaaatcttttggacccaactattttagaatgtgcttggatggagctgtctgagaaggataaatcaataacagttgaggaatttgcagagatagtgtatggtaccaaggagtctttggaaagctactgtgcacatctcttgttgtcaagggatgtagtgtattttgtcaaggtagagagcagagattattccatgtaccaacctcgttcacctgctcagtaggtagaggaactcctacgacggaagcttgctaaagaggccgctgataaggaactggaagaatttgtccatttactcaagtctgccaaagcattgcctatggagtccaagcctcctaaagcgtcatggttggtggaagaaaaagtcaggcaaaaaatcgagtctcttcaagcatatgcagttgatgcatgtgatgatgaacaaagaagactagcaggaaatattctcaaagctatgggattcacgaggacatcatcagctgctctaaagcttcttataaatgttggatacttccctgtgcatgtcaatctcgaccttttcaggtacgatgtccgtataaggtacacagatgaagttttgtcagctgcagaggagcttctggtggacagccctgacacagacatgcatatcaggaaggatctttcaactttgaaagtgtacgccattgatgtagatgaggctgatgaacttgatgacgcattgagcgcaaccaggcttcctgatggtagaataaagggaggcaatgcacagaggaacatcaatctttctaccaaccactacttttccgatgttcccagagaggcttgccatgaattctatgagcttgcagcagggtaaagaatgcaaatctgtaactgtatctgttattttaaacctagacgggaggtaattttctacttacaccccattttttgctgctttctgagtgggttcttttcttgtttcctttgagattgacttttctttttcttttttttaaaaggaatttcttaaaaatgtagtgcattcattgacattcctcattctgtttgtgctgtgaatagtattgcagaatatactttagaaaattcagtcatcaaacctacttatatgttgacatatgagagtgcaactgaattgctttacatgaacctggaagaagaggaagaactaaggattcttcaagaagctgctaggattcgtgaacagtggcgtcgtagccagggttcaatagacactgcgatgatagagccacgtataaaggtgtcaaatcctgatgatcctgaaccaaatatcaatctatatgttgaagatcaagccaatccagcaatgcagcttgtatctgaaatgatgatactttgcggtgaggcagtggctgctttcggttttgacaacaacctccctttgccatatagaggtcacccccagtccaacacagcagtgtcagtgttctctcatctacctgaggggcctgcaaggagctttgccaatatcagcgtgctccgtgctgcagaaatggattttcaaaaacctgtaccacatggtgtacttggtattcctggttacgtgcagttcacctctcctatccgaagatatgttgacctgctagctcattatcaggttaaagcttttcttagaggtgactctccaccatattcagctggcgatctagaaggaatgacatttattgcgagcatgcatgttaaagtagctaggaggcttcatagcaatagcttacggtactggctgttggaatacttgaggcgacaaccaaaggggagaaagtacagagcactgattctgaagtttgtcaaggatcgtatgggagctctgcttttggtggaggttgggatgcaagttacaacgacaatttcacgtgggaaagtgggagatcaagtcagtgttactgtggaaacagctcatccacgtgatgatatattatcagtcagagaggttgtagaggacaccaaggattctgagtaaatgcatgtgacgatagcttatcagacaaagaggttatagaggacaccgaggattctgagtaaatgcttgcaaagctcactcgcactttgcagtcttgtgttcctctgccgtttactgctgttcatttttgtggcagtgatataggcgatttattaccttggaaaatatctgctgattcttcaagttagcgacttgcgtagcatggctacaatacaaatggtaaaaggactagggtattggtcttggtgccaaagctcattccaattcgaggacgaaatgatgaaatcataggtggttttcattggtatacagaatacagtccgacagttcgtttcttccgaggtaggttctctttgtgccgaacaaggttccaagtgctgataactgggaattttgtatagctgaacacgcatgcaacatttttgtacctgaatttggtacctctgacgttgtcggcacattctgctatatttgaacactgaggtggatgatcgatgtacagaataataataattccaatatcatttccttatatgccctcaattatttaattgtaatatactccttcggttctttt

SEQ ID NO: 31454 - DNA, 3123 bp, Zea Mays
cggaaattagcgtcaagctgcaagcctgcaagtgactcatgcgccggccgcttcaatcgtcggcgccttccactcgcggtcgcaggagctcagctcgtcgtatcttatctatcgccattcgccagccaaaaccccacccgagaggcggagactgcgttgcgtggacggcggactaaaccctaccgcccttcgtctctggtccatgatggggccctcgaccatggcggcgcgggcagcgggctgctgctcctcggcggcgctcgccttcttccgtctccaccccctccgatgcgccgtccgcccggccgccgctctcgttggagggtgctcctctggcctccgcggcggctgccggagccgcctggcgcatagcatcgtggacttggttatggaggagctccgctcccgccggcgcgtccgggtctcggcgaagataggattgcagggcacgaaggaattgcctgacaataagatagtcaagagaacattacagaaaggattgctgcttgaatttcagaaagatcctgagagatctttgcttgctgtagttgaaaggcctgatggaaagaaaaactggatggtgactgatcagaatggtgtcatgtcttcgataaagccccagcaggttacatatgttgtacctggtatcatgaattttgactattcaaaaatagacgaatttcttgagaaaacgcaaaatcttttggacccaactattttagaatgtgcttggatggagctgtctgagaaggataaatcaataacagttgaggaatttgcagagatagtgtatggtaccaaggagtctttggaaagctactgtgcacatctcttgttgtcaagggatgtagtgtattttgtcaaggtagagagcagagattattccatgtaccaacctcgttcacctgctcaggtagaggaactcctacgacggaagcttgctaaagaggccgctgataaggaactggaagaatttgtccatttactcaagtctgccaaagcattgcctatggagtccaagcctcctaaagcgtcatggttggtggaagaaaaagtcaggcaaaaaatcgagtctcttcaagcatatgcagttgatgcatgtgatgatgaacaaagaagactagcaggaaatattctcaaagctatgggattcacgaggacatcatcagctgctctaaagcttcttataaatgttggatacttccctgtgcatgtcaatctcgaccttttcaggtacgatgtccgtataaggtacacagatgaagttttgtcagctgcagaggagcttctggtggacagccctgacacagacatgcatatcaggaaggatctttcaactttgaaagtgtacgccattgatgtagatgaggctgatgaacttgatgacgcattgagcgcaaccaggcttcctgatggtagaataaaggtctggatacatgttgctgacccaacatgcttggtcaaacctcatagcatcattgatagggaggcaatgcacagaggaacatcaatctttctaccaaccactacttttccgatgttcccagagaggcttgccatgaattctatgagcttgcagcagggtaaagaatgcaaatctgtaactgtatctgttattttaaacctagacgggagaatatactttagaaaattcagtcatcaaacctacttatatgttgacatatgagagtgcaactgaattgctttacatgaacctggaagaagaggaagaactaaggattcttcaagaagctgctaggattcgtgaacagtggcgtcgtagccagggttcaatagacactgcgatgatagagccacgtataaaggtgtcaaatcctgatgatcctgaaccaaatatcaatctatatgttgaagatcaagccaatccagcaatgcagcttgtatctgaaatgatgatactttgcggtgaggcagtggctgctttcggttttgacaacaacctccctttgccatatagaggtcacccccagtccaacacagcagtgtcagtgttctctcatctacctgaggggcctgcaaggagctttgccaatatcagcgtgctccgtgctgcagaaatggattttcaaaaacctgtaccacatggtgtacttggtattcctggttacgtgcagttcacctctcctatccgaagatatgttgacctgctagctcattatcaggttaaagcttttcttagaggtgactctccaccatattcagctggcgatctagaaggaatgacatttattgcgagcatgcatgttaaagtagctaggaggcttcatagcaatagcttacggtactggctgttggaatacttgaggcgacaaccaaaggggagaaagtacagagcactgattctgaagtttgtcaaggatcgtatgggagctctgcttttggtggaggttgggatgcaagttacaacgacaatttcacgtgggaaagtgggagatcaagtcagtgttactgtggaaacagctcatccacgtgatgatatattatcagtcagagaggttgtagaggacaccaaggattctgagtaaatgcatgtgacgatagcttatcagacaaagaggttatagaggacaccgaggattctgagtaaatgcttgcaaagctcactcgcactttgcagtcttgtgttcctctgccgtttactgctgttcatttttgtggcagtgatataggcgatttattaccttggaaaatatctgctgattcttcaagttagcgacttgcgtagcatggctacaatacaaatggtaaaaggactagggtattggtcttggtgccaaagctcattccaattcgaggacgaaatgatgaaatcataggtggttttcattggtatacagaatacagtccgacagttcgtttcttccgaggtaggttctctttgtgccgaacaaggttccaagtgctgataactgggaattttgtatagctgaacacgcatgcaacatttttgtacctgaatttggtacctctgacgttgtcggcacattctgctatatttgaacactgaggtggatgatcgatgtacagaataataataattccaatatcatttccttatatgccctcaattatttaattgtaatatactccttcggttctttt

SEQ ID NO: 31455 - DNA, 3059 bp, Zea Mays
caagctgcaagcctgcaagtgactcatgcgccggccgcttcaatcgtcggcgccttccactcgcggtcgcaggagctcagctcgtcgtatcttatctatcgccattcgccagccaaaaccccacccgagaggcggagactgcgttgcgtggacggcggactaaaccctaccgcccttcgtctctggtccatgatggggccctcgaccatggcggcgcgggcagcgggctgctgctcctcggcggcgctcgccttcttccgtctccaccccctccgatgcgccgtccgcccggccgccgctctcgttggagggtgctcctctggcctccgcggcggctgccggagccgcctggcgcatagcatcgtggacttggttatggaggagctccgctcccgccggcgcgtccgggtctcggcgaagataggattgcagggcacgaaggaattgcctgacaataagatagtcaagagaacattacagaaaggattgctgcttgaatttcagaaagatcctgagagatctttgcttgctgtagttgaaaggcctgatggaaagaaaaactggatggtgactgatcagaatggtgtcatgtcttcgataaagccccagcaggttacatatgttgtacctggtatcatgaattttgactattcaaaaatagacgaatttcttgagaaaacgcaaaatcttttggacccaactattttagaatgtgcttggatggagctgtctgagaaggataaatcaataacagttgaggaatttgcagagatagtgtatggtaccaaggagtctttggaaagctactgtgcacatctcttgttgtcaagggatgtagtgtattttgtcaaggtagagagcagagattattccatgtaccaacctcgttcacctgctcaggtagaggaactcctacgacggaagcttgctaaagaggccgctgataaggaactggaagaatttgtccatttactcaagtctgccaaagcattgcctatggagtccaagcctcctaaagcgtcatggttggtggaagaaaaagtcaggcaaaaaatcgagtctcttcaagcatatgcagttgatgcatgtgatgatgaacaaagaagactagcaggaaatattctcaaagctatgggattcacgaggacatcatcagctgctctaaagcttcttataaatgttggatacttccctgtgcatgtcaatctcgaccttttcaggtacgatgtccgtataaggtacacagatgaagttttgtcagctgcagaggagcttctggtggacagccctgacacagacatgcatatcaggaaggatctttcaactttgaaagtgtacgccattgatgtagatgaggctgatgaacttgatgacgcattgagcgcaaccaggcttcctgatggtagaataaagggaggcaatgcacagaggaacatcaatctttctaccaaccactacttttccgatgttcccagagaggcttgccatgaattctatgagcttgcagcagggtaaagaatgcaaatctgtaactgtatctgttattttaaacctagacgggagtattgcagaatatactttagaaaattcagtcatcaaacctacttatatgttgacatatgagagtgcaactgaattgctttacatgaacctggaagaagaggaagaactaaggattcttcaagaagctgctaggattcgtgaacagtggcgtcgtagccagggttcaatagacactgcgatgatagagccacgtataaaggtgtcaaatcctgatgatcctgaaccaaatatcaatctatatgttgaagatcaagccaatccagcaatgcagcttgtatctgaaatgatgatactttgcggtgaggcagtggctgctttcggttttgacaacaacctccctttgccatatagaggtcacccccagtccaacacagcagtgtcagtgttctctcatctacctgaggggcctgcaaggagctttgccaatatcagcgtgctccgtgctgcagaaatggattttcaaaaacctgtaccacatggtgtacttggtattcctggttacgtgcagttcacctctcctatccgaagatatgttgacctgctagctcattatcaggttaaagcttttcttagaggtgactctccaccatattcagctggcgatctagaaggaatgacatttattgcgagcatgcatgttaaagtagctaggaggcttcatagcaatagcttacggtactggctgttggaatacttgaggcgacaaccaaaggggagaaagtacagagcactgattctgaagtttgtcaaggatcgtatgggagctctgcttttggtggaggttgggatgcaagttacaacgacaatttcacgtgggaaagtgggagatcaagtcagtgttactgtggaaacagctcatccacgtgatgatatattatcagtcagagaggttgtagaggacaccaaggattctgagtaaatgcatgtgacgatagcttatcagacaaagaggttatagaggacaccgaggattctgagtaaatgcttgcaaagctcactcgcactttgcagtcttgtgttcctctgccgtttactgctgttcatttttgtggcagtgatataggcgatttattaccttggaaaatatctgctgattcttcaagttagcgacttgcgtagcatggctacaatacaaatggtaaaaggactagggtattggtcttggtgccaaagctcattccaattcgaggacgaaatgatgaaatcataggtggttttcattggtatacagaatacagtccgacagttcgtttcttccgaggtaggttctctttgtgccgaacaaggttccaagtgctgataactgggaattttgtatagctgaacacgcatgcaacatttttgtacctgaatttggtacctctgacgttgtcggcacattctgctatatttgaacactgaggtggatgatcgatgtacagaataataataattccaatatcatttccttatatgccctcaattatttaattgtaatatactccttcggttctttt

SEQ ID NO: 31456 - DNA, 3052 bp, Zea Mays
aagtgactcatgcgccggccgcttcaatcgtcggcgccttccactcgcggtcgcaggagctcagctcgtcgtatcttatctatcgccattcgccagccaaaaccccacccgagaggcggagactgcgttgcgtggacggcggactaaaccctaccgcccttcgtctctggtccatgatggggccctcgaccatggcggcgcgggcagcgggctgctgctcctcggcggcgctcgccttcttccgtctccaccccctccgatgcgccgtccgcccggccgccgctctcgttggagggtgctcctctggcctccgcggcggctgccggagccgcctggcgcatagcatcgtggacttggttatggaggagctccgctcccgccggcgcgtccgggtctcggcgaagataggattgcagggcacgaaggaattgcctgacaataagatagtcaagagaacattacagaaaggattgctgcttgaatttcagaaagatcctgagagatctttgcttgctgtagttgaaaggcctgatggaaagaaaaactggatggtgactgatcaggtcgtttttgaacggatagctattgcttgtccagttgactatccagtttagttaatttatacctgaacatacatatattgttgttatgggttctctggtgacatgacttttacttttgtatagaatggtgtcatgtcttcgataaagccccagcaggttacatatgttgtacctggtatcatgaattttgactattcaaaaatagacgaatttcttgagaaaacgcaaaatcttttggacccaactattttagaatgtgcttggatggagctgtctgagaaggataaatcaataacagttgaggaatttgcagagatagtgtatggtaccaaggagtctttggaaagctactgtgcacatctcttgttgtcaagggatgtagtgtattttgtcaaggtagagagcagagattattccatgtaccaacctcgttcacctgctcaggtagaggaactcctacgacggaagcttgctaaagaggccgctgataaggaactggaagaatttgtccatttactcaagtctgccaaagcattgcctatggagtccaagcctcctaaagcgtcatggttggtggaagaaaaagtcaggcaaaaaatcgagtctcttcaagcatatgcagttgatgcatgtgatgatgaacaaagaagactagcaggaaatattctcaaagctatgggattcacgaggacatcatcagctgctctaaagcttcttataaatgttggatacttccctgtgcatgtcaatctcgaccttttcaggtacgatgtccgtataaggtacacagatgaagttttgtcagctgcagaggagcttctggtggacagccctgacacagacatgcatatcaggaaggatctttcaactttgaaagtgtacgccattgatgtagatgaggctgatgaacttgatgacgcattgagcgcaaccaggcttcctgatggtagaataaaggtctggatacatgttgctgacccaacatgcttggtcaaacctcatagcatcattgatagggaggcaatgcacagaggaacatcaatctttctaccaaccactacttttccgatgttcccagagaggcttgccatgaattctatgagcttgcagcagggtaaagaatgcaaatctgtaactgtatctgttattttaaacctagacgggagaagaggaagaactaaggattcttcaagaagctgctaggattcgtgaacagtggcgtcgtagccagggttcaatagacactgcgatgatagagccacgtataaaggtgtcaaatcctgatgatcctgaaccaaatatcaatctatatgttgaagatcaagccaatccagcaatgcagcttgtatctgaaatgatgatactttgcggtgaggcagtggctgctttcggttttgacaacaacctccctttgccatatagaggtcacccccagtccaacacagcagtgtcagtgttctctcatctacctgaggggcctgcaaggagctttgccaatatcagcgtgctccgtgctgcagaaatggattttcaaaaacctgtaccacatggtgtacttggtattcctggttacgtgcagttcacctctcctatccgaagatatgttgacctgctagctcattatcaggttaaagcttttcttagaggtgactctccaccatattcagctggcgatctagaaggaatgacatttattgcgagcatgcatgttaaagtagctaggaggcttcatagcaatagcttacggtactggctgttggaatacttgaggcgacaaccaaaggggagaaagtacagagcactgattctgaagtttgtcaaggatcgtatgggagctctgcttttggtggaggttgggatgcaagttacaacgacaatttcacgtgggaaagtgggagatcaagtcagtgttactgtggaaacagctcatccacgtgatgatatattatcagtcagagaggttgtagaggacaccaaggattctgagtaaatgcatgtgacgatagcttatcagacaaagaggttatagaggacaccgaggattctgatgatataggcgatttattaccttggaaaatatctgctgattcttcaagttagcgacttgcgtagcatggctacaatacaaatggtaaaaggactagggtattggtcttggtgccaaagctcattccaattcgaggacgaaatgatgaaatcataggtggttttcattggtatacagaatacagtccgacagttcgtttcttccgaggtaggttctctttgtgccgaacaaggttccaagtgctgataactgggaattttgtatagctgaacacgcatgcaacatttttgtacctgaatttggtacctctgacgttgtcggcacattctgctatatttgaacactgaggtggatgatcgatgtacagaataataataattccaatatcatttccttatatgccctcaattatttaattgtaatatactccttcggttctttt

SEQ ID NO: 31457 - DNA, 3215 bp, Zea Mays
aagtgactcatgcgccggccgcttcaatcgtcggcgccttccactcgcggtcgcaggagctcagctcgtcgtatcttatctatcgccattcgccagccaaaaccccacccgagaggcggagactgcgttgcgtggacggcggactaaaccctaccgcccttcgtctctggtccatgatggggccctcgaccatggcggcgcgggcagcgggctgctgctcctcggcggcgctcgccttcttccgtctccaccccctccgatgcgccgtccgcccggccgccgctctcgttggagggtgctcctctggcctccgcggcggctgccggagccgcctggcgcatagcatcgtggacttggttatggaggagctccgctcccgccggcgcgtccgggtctcggcgaagataggattgcagggcacgaaggaattgcctgacaataagatagtcaagagaacattacagaaaggattgctgcttgaatttcagaaagatcctgagagatctttgcttgctgtagttgaaaggcctgatggaaagaaaaactggatggtgactgatcaggtcgtttttgaacggatagctattgcttgtccagttgactatccagtttagttaatttatacctgaacatacatatattgttgttatgggttctctggtgacatgacttttacttttgtatagaatggtgtcatgtcttcgataaagccccagcaggttacatatgttgtacctggtatcatgaattttgactattcaaaaatagacgaatttcttgagaaaacgcaaaatcttttggacccaactattttagaatgtgcttggatggagctgtctgagaaggataaatcaataacagttgaggaatttgcagagatagtgtatggtaccaaggagtctttggaaagctactgtgcacatctcttgttgtcaagggatgtagtgtattttgtcaaggtagagagcagagattattccatgtaccaacctcgttcacctgctcaggtagaggaactcctacgacggaagcttgctaaagaggccgctgataaggaactggaagaatttgtccatttactcaagtctgccaaagcattgcctatggagtccaagcctcctaaagcgtcatggttggtggaagaaaaagtcaggcaaaaaatcgagtctcttcaagcatatgcagttgatgcatgtgatgatgaacaaagaagactagcaggaaatattctcaaagctatgggattcacgaggacatcatcagctgctctaaagcttcttataaatgttggatacttccctgtgcatgtcaatctcgaccttttcaggtacgatgtccgtataaggtacacagatgaagttttgtcagctgcagaggagcttctggtggacagccctgacacagacatgcatatcaggaaggatctttcaactttgaaagtgtacgccattgatgtagatgaggctgatgaacttgatgacgcattgagcgcaaccaggcttcctgatggtagaataaaggtctggatacatgttgctgacccaacatgcttggtcaaacctcatagcatcattgataggtcatttctgctcttctgttctttactttctatcactgcacttggtatttgttacaaaaccgtgtctcttgttggcagggaggcaatgcacagaggaacatcaatctttctaccaaccactacttttccgatgttcccagagaggcttgccatgaattctatgagcttgcagcagggtaaagaatgcaaatctgtaactgtatctgttattttaaacctagacgggagtattgcagaatatactttagaaaattcagtcatcaaacctacttatatgttgacatatgagagtgcaactgaattgctttacatgaacctggaagaagaggaagaactaaggattcttcaagaagctgctaggattcgtgaacagtggcgtcgtagccagacactgcgatgatagagccacgtataaaggtgtcaaatcctgatgatcctgaaccaaatatcaatctatatgttgaagatcaagccaatccagcaatgcagcttgtatctgaaatgatgatactttgcggtgaggcagtggctgctttcggttttgacaacaacctccctttgccatatagaggtcacccccagtccaacacagcagtgtcagtgttctctcatctacctgaggggcctgcaaggagctttgccaatatcagcgtgctccgtgctgcagaaatggattttcaaaaacctgtaccacatggtgtacttggtattcctggttacgtgcagttcacctctcctatccgaagatatgttgacctgctagctcattatcaggttaaagcttttcttagaggtgactctccaccatattcagctggcgatctagaaggaatgacatttattgcgagcatgcatgttaaagtagctaggaggcttcatagcaatagcttacggtactggctgttggaatacttgaggcgacaaccaaaggggagaaagtacagagcactgattctgaagtttgtcaaggatcgtatgggagctctgcttttggtggaggttgggatgcaagttacaacgacaatttcacgtgggaaagtgggagatcaagtcagtgttactgtggaaacagctcatccacgtgatgatatattatcagtcagagaggttgtagaggacaccaaggattctgagtaaatgcatgtgacgatagcttatcagacaaagaggttatagaggacaccgaggattctgatgatataggcgatttattaccttggaaaatatctgctgattcttcaagttagcgacttgcgtagcatggctacaatacaaatggtaaaaggactagggtattggtcttggtgccaaagctcattccaattcgaggacgaaatgatgaaatcataggtggttttcattggtatacagaatacagtccgacagttcgtttcttccgaggtaggttctctttgtgccgaacaaggttccaagtgctgataactgggaattttgtatagctgaacacgcatgcaacatttttgtacctgaatttggtacctctgacgttgtcggcacattctgctatatttgaacactgaggtggatgatcgatgtacagaataataataattccaatatcatttccttatatgccctcaattatttaattgtaatatactccttcggttctttt

SEQ ID NO: 31458 - DNA, 3125 bp, Zea Mays
ctcatgcgccggccgcttcaatcgtcggcgccttccactcgcggtcgcaggagctcagctcgtcgtatcttatctatcgccattcgccagccaaaaccccacccgagaggcggagactgcgttgcgtggacggcggactaaaccctaccgcccttcgtctctggtccatgatggggccctcgaccatggcggcgcgggcagcgggctgctgctcctcggcggcgctcgccttcttccgtctccaccccctccgatgcgccgtccgcccggccgccgctctcgttggagggtgctcctctggcctccgcggcggctgccggagccgcctggcgcatagcatcgtggacttggttatggaggagctccgctcccgccggcgcgtccgggtctcggcgaagataggattgcagggcacgaaggaattgcctgacaataagatagtcaagagaacattacagaaaggattgctgcttgaatttcagaaagatcctgagagatctttgcttgctgtagttgaaaggcctgatggaaagaaaaactggatggtgactgatcaggtcgtttttgaacggatagctattgcttgtccagttgactatccagtttagttaatttatacctgaacatacatatattgttgttatgggttctctggtgacatgacttttacttttgtatagaatggtgtcatgtcttcgataaagccccagcaggttacatatgttgtacctggtatcatgaattttgactattcaaaaatagacgaatttcttgagaaaacgcaaaatcttttgaatgtgcttggatggagctgtctgagaaggataaatcaataacagttgaggaatttgcagagatagtgtatggtaccaaggagtctttggaaagctactgtgcacatctcttgttgtcaagggatgtagtgtattttgtcaaggtagagagcagagattattccatgtaccaacctcgttcacctgctcaggtagaggaactcctacgacggaagcttgctaaagaggccgctgataaggaactggaagaatttgtccatttactcaagtctgccaaagcattgcctatggagtccaagcctcctaaagcgtcatggttggtggaagaaaaagtcaggcaaaaaatcgagtctcttcaagcatatgcagttgatgcatgtgatgatgaacaaagaagactagcaggaaatattctcaaagctatgggattcacgaggacatcatcagctgctctaaagcttcttataaatgttggatacttccctgtgcatgtcaatctcgaccttttcaggtacgatgtccgtataaggtacacagatgaagttttgtcagctgcagaggagcttctggtggacagccctgacacagacatgcatatcaggaaggatctttcaactttgaaagtgtacgccattgatgtagatgaggctgatgaacttgatgacgcattgagcgcaaccaggcttcctgatggtagaataaaggtctggatacatgttgctgacccaacatgcttggtcaaacctcatagcatcattgatagggaggcaatgcacagaggaacatcaatctttctaccaaccactacttttccgatgttcccagagaggcttgccatgaattctatgagcttgcagcagggtaaagaatgcaaatctgtaactgtatctgttattttaaacctagacgggagtattgcagaatatactttagaaaattcagtcatcaaacctacttatatgttgacatatgagagtgcaactgaattgctttacatgaacctggaagaagaggaagaactaaggattcttcaagaagctgctaggattcgtgaacagtggcgtcgtagccagggttcaatagacactgcgatgatagagccacgtataaaggtgtcaaatcctgatgatcctgaaccaaatatcaatctatatgttgaagatcaagccaatccagcaatgcagcttgtatctgaaatgatgatactttgcggtgaggcagtggctgctttcggttttgacaacaacctccctttgccatatagaggtcacccccagtccaacacagcagtgtcagtgttctctcatctacctgaggggcctgcaaggagctttgccaatatcagcgtgctccgtgctgcagaaatggattttcaaaaacctgtaccacatggtgtacttggtattcctggttacgtgcagttcacctctcctatccgaagatatgttgacctgctagctcattatcaggttaaagcttttcttagaggtgactctccaccatattcagctggcgatctagaaggaatgacatttattgcgagcatgcatgttaaagtagctaggaggcttcatagcaatagcttacggtactggctgttggaatacttgaggcgacaaccaaaggggagaaagtacagagcactgattctgaagtttgtcaaggatcgtatgggagctctgcttttggtggaggttgggatgcaagttacaacgacaatttcacgtgggaaagtgggagatcaagtcagtgttactgtggaaacagctcatccacgtgatgatatattatcagtcagagaggttgtagaggacaccaaggattctgagtaaatgcatgtgacgatagcttatcagacaaagaggttatagaggacaccgaggattctgatgatataggcgatttattaccttggaaaatatctgctgattcttcaagttagcgacttgcgtagcatggctacaatacaaatggtaaaaggactagggtattggtcttggtgccaaagctcattccaattcgaggacgaaatgatgaaatcataggtggttttcattggtatacagaatacagtccgacagttcgtttcttccgaggtaggttctctttgtgccgaacaaggttccaagtgctgataactgggaattttgtatagctgaacacgcatgcaacatttttgtacctgaatttggtacctctgacgttgtcggcacattctgctatatttgaacactgaggtggatgatcgatgtacagaataataataattccaatatcatttccttatatgccctcaattatttaattgtaatatactccttcggttctttt

SEQ ID NO: 31459 - DNA, 3409 bp, Zea Mays
cttcaatcgtcggcgccttccactcgcggtcgcaggagctcagctcgtcgtatcttatctatcgccattcgccagccaaaaccccacccgagaggcggagactgcgttgcgtggacggcggactaaaccctaccgcccttcgtctctggtccatgatggggccctcgaccatggcggcgcgggcagcgggctgctgctcctcggcggcgctcgccttcttccgtctccaccccctccgatgcgccgtccgcccggccgccgctctcgttggagggtgctcctctggcctccgcggcggctgccggagccgcctggcgcatagcatcgtggacttggttatggaggagctccgctcccgccggcgcgtccgggtctcggcgaagataggattgcagggcacgaaggaattgcctgacaataagatagtcaagagaacattacagaaaggattgctgcttgaatttcagaaagatcctgagagatctttgcttgctgtagttgaaaggcctgatggaaagaaaaactggatggtgactgatcaggtcgtttttgaacggatagctattgcttgtccagttgactatccagtttagttaatttatacctgaacatacatatattgttgttatgggttctctggtgacatgacttttacttttgtatagaatggtgtcatgtcttcgataaagccccagcaggttacatatgttgtacctggtatcatgaattttgactattcaaaaatagacgaatttcttgagaaaacgcaaaatcttttggacccaactattttagaatgtgcttggatggagctgtctgagaaggataaatcaataacagttgaggaatttgcagagatagtgtatggtaccaaggagtctttggaaagctactgtgcacatctcttgttgtcaagggatgtagtgtattttgtcaaggtagagagcagagattattccatgtaccaacctcgttcacctgctcaggtagaggaactcctacgacggaagcttgctaaagaggccgctgataaggaactggaagaatttgtccatttactcaagtctgccaaagcattgcctatggagtccaagcctcctaaagcgtcatggttggtggaagaaaaagtcaggcaaaaaatcgagtctcttcaagcatatgcagttgatgcatgtgatgatgaacaaagaagactagcaggaaatgtaatacatcagatcgtactatctttttgccatacacaacatcgtagttgggtcttcaattttcttacaataccgtggtctgctgaatgtccagaaacgagaaacctaatttataataaaattagcttaatgaatattagtgttgttcatgaaagtctgtagtccaaacacattttaatttataccattctttattgaatgaggtgcagttttccatcttttgatgtctgtgaagttggtttttatttttaaatttaatggcagattctcaaagctatgggattcacgaggacatcatcagctgctctaaagcttcttataaatgttggatacttccctgtgcatgtcaatctcgaccttttcaggtacgatgtccgtataaggtacacagatgaagttttgtcagctgcagaggagcttctggtggacagccctgacacagacatgcatatcaggaaggatctttcaactttgaaagtgtacgccattgatgtagatgaggctgatgaacttgatgacgcattgagcgcaaccaggcttcctgatggtagaataaagggaggcaatgcacagaggaacatcaatctttctaccaaccactacttttccgatgttcccagagaggcttgccatgaattctatgagcttgcagcagggtaaagaatgcaaatctgtaactgtatctgttattttaaacctagacgggagtattgcagaatatactttagaaaattcagtcatcaaacctacttatatgttgacatatgagagtgcaactgaattgctttacatgaacctggaagaagaggaagaactaaggattcttcaagaagctgctaggattcgtgaacagtggcgtcgtagccagggttcaatagacactgcgatgatagagccacgtataaaggtgtcaaatcctgatgatcctgaaccaaatatcaatctatatgttgaagatcaagccaatccagcaatgcagcttgtatctgaaatgatgatactttgcggtgaggcagtggctgctttcggttttgacaacaacctccctttgccatatagaggtcacccccagtccaacacagcagtgtcagtgttctctcatctacctgaggggcctgcaaggagctttgccaatatcagcgtgctccgtgctgcagaaatggattttcaaaaacctgtaccacatggtgtacttggtattcctggttacgtgcagttcacctctcctatccgaagatatgttgacctgctagctcattatcaggttaaagcttttcttagaggtgactctccaccatattcagctggcgatctagaaggaatgacatttattgcgagcatgcatgttaaagtagctaggaggcttcatagcaatagcttacggtactggctgttggaatacttgaggcgacaaccaaaggggagaaagtacagagcactgattctgaagtttgtcaaggatcgtatgggagctctgcttttggtggaggttgggatgcaagttacaacgacaatttcacgtgggaaagtgggagatcaagtcagtgttactgtggaaacagctcatccacgtgatgatatattatcagtcagagaggttgtagaggacaccaaggattctgagtaaatgcatgtgacgatagcttatcagacaaagaggttatagaggacaccgaggattctgagtaaatgcttgcaaagctcactcgcactttgcagtcttgtgttcctctgccgtttactgctgttcatttttgtggcagtgatataggcgatttattaccttggaaaatatctgctgattcttcaagttagcgacttgcgtagcatggctacaatacaaatggtaaaaggactagggtattggtcttggtgccaaagctcattccaattcgaggacgaaatgatgaaatcataggtggttttcattggtatacagaatacagtccgacagttcgtttcttccgaggtaggttctctttgtgccgaacaaggttccaagtgctgataactgggaattttgtatagctgaacacgcatgcaacatttttgtacctgaatttggtacctctgacgttgtcggcacattctgctatatttgaacactgaggtggatgatcgatgtacagaataataataattccaatatcatttccttatatgccctcaattatttaattgtaatatactccttcggttctttt

SEQ ID NO: 31460 - DNA, 3021 bp, Zea Mays
gtcggcgccttccactcgcggtcgcaggagctcagctcgtcgtatcttatctatcgccattcgccagccaaaaccccacccgagaggcggagactgcgttgcgtggacggcggactaaaccctaccgcccttcgtctctggtccatgatggggccctcgaccatggcggcgcgggcagcgggctgctgctcctcggcggcgctcgccttcttccgtctccaccccctccgatgcgccgtccgcccggccgccgctctcgttggagggtgctcctctggcctccgcggcggctgccggagccgcctggcgcatagcatcgtggacttggttatggaggagctccgctcccgccggcgcgtccgggtctcggcgaagataggattgcagggcacgaaggaattgcctgacaataagatagtcaagagaacattacagaaaggattgctgcttgaatttcagaaagatcctgagagatctttgcttgctgtagttgaaaggcctgatggaaagaaaaactggatggtgactgatcagaatggtgtcatgtcttcgataaagccccagcaggttacatatgttgtacctggtatcatgaattttgactattcaaaaatagacgaatttcttgagaaaacgcaaaatcttttggacccaactattttagaatgtgcttggatggagctgtctgagaaggataaatcaataacagttgaggaatttgcagagatagtgtatggtaccaaggagtctttggaaagctactgtgcacatctcttgttgtcaagggatgtagtgtattttgtcaaggtagagagcagagattattccatgtaccaacctcgttcacctgctcaggtagaggaactcctacgacggaagcttgctaaagaggccgctgataaggaactggaagaatttgtccatttactcaagtctgccaaagcattgcctatggagtccaagcctcctaaagcgtcatggttggtggaagaaaaagtcaggcaaaaaatcgagtctcttcaagcatatgcagttgatgcatgtgatgatgaacaaagaagactagcaggaaatattctcaaagctatgggattcacgaggacatcatcagctgctctaaagcttcttataaatgttggatacttccctgtgcatgtcaatctcgaccttttcaggtacgatgtccgtataaggtacacagatgaagttttgtcagctgcagaggagcttctggtggacagccctgacacagacatgcatatcaggaaggatctttcaactttgaaagtgtacgccattgatgtagatgaggctgatgaacttgatgacgcattgagcgcaaccaggcttcctgatggtagaataaaggtctggatacatgttgctgacccaacatgcttggtcaaacctcatagcatcattgatagggaggcaatgcacagaggaacatcaatctttctaccaaccactacttttccgatgttcccagagaggcttgccatgaattctatgagcttgcagcaggtattgcagaatatactttagaaaattcagtcatcaaacctacttatatgttgacatatgagagtgcaactgaattgctttacatgaacctggaagaagaggaagaactaaggattcttcaagaagctgctaggattcgtgaacagtggcgtcgtagccagggttcaatagacactgcgatgatagagccacgtataaaggtgtcaaatcctgatgatcctgaaccaaatatcaatctatatgttgaagatcaagccaatccagcaatgcagcttgtatctgaaatgatgatactttgcggtgaggcagtggctgctttcggttttgacaacaacctccctttgccatatagaggtcacccccagtccaacacagcagtgtcagtgttctctcatctacctgaggggcctgcaaggagctttgccaatatcagcgtgctccgtgctgcagaaatggattttcaaaaacctgtaccacatggtgtacttggtattcctggttacgtgcagttcacctctcctatccgaagatatgttgacctgctagctcattatcaggttaaagcttttcttagaggtgactctccaccatattcagctggcgatctagaaggaatgacatttattgcgagcatgcatgttaaagtagctaggaggcttcatagcaatagcttacggtactggctgttggaatacttgaggcgacaaccaaaggggagaaagtacagagcactgattctgaagtttgtcaaggatcgtatgggagctctgcttttggtggaggttgggatgcaagttacaacgacaatttcacgtgggaaagtgggagatcaagtcagtgttactgtggaaacagctcatccacgtgatgatatattatcagtcagagaggttgtagaggacaccaaggattctgagtaaatgcatgtgacgatagcttatcagacaaagaggttatagaggacaccgaggattctgagtaaatgcttgcaaagctcactcgcactttgcagtcttgtgttcctctgccgtttactgctgttcatttttgtggcagtgatataggcgatttattaccttggaaaatatctgctgattcttcaagttagcgacttgcgtagcatggctacaatacaaatggtaaaaggactagggtattggtcttggtgccaaagctcattccaattcgaggacgaaatgatgaaatcataggtggttttcattggtatacagaatacagtccgacagttcgtttcttccgaggtaggttctctttgtgccgaacaaggttccaagtgctgataactgggaattttgtatagctgaacacgcatgcaacatttttgtacctgaatttggtacctctgacgttgtcggcacattctgctatatttgaacactgaggtggatgatcgatgtacagaataataataattccaatatcatttccttatatgccctcaattatttaattgtaatatactccttcggttctttt

SEQ ID NO: 31461 - DNA, 219 bp, Zea Mays
atggcggcctcgtcgaagatcgtctcggcgacgatggcatccccggtggagactccatccatgaagacggcgggctccattgtctacttcctccatggtcactcgtgccctgtcctcatcctccatgggcgatactgctactacaagtcagcgcctctggccgccgccgacggctcgtgcgatgagaagttgagaactaacgagggagttgagtcctag

SEQ ID NO: 31462 - DNA, 478 bp, Zea Mays
caatgtctggcaagaaattgtctccgcacgtggggtcttcatctttcacctctatgcaaataggatccaatcatccaaccactctagcctattgcaaagaactacagtaatccactgaaatgtttctacaaggcatgttgcagtagaccttccatacgtagcagtgttttgcatatcattttcccactgtcatgaatccatgatagatatagcaacatatgacttatcagataacaaaagcaatgggccagactacttcaagcaaaaggttcattgagagaaatagagaatcatccagtctgcctcattcaatgatattctgcagatgaattcacttgtttgcagaccactttcgcctttgcatccatacgctttgcagatggatacacaggaaaatgactcagcacatggagtttcatctttcatagcgtgcaaatagggaccaaccaaccatgctcattgtgcggggaagttcaat

SEQ ID NO: 31463 - DNA, 2305 bp, Zea Mays
cgagagcggtcgagtcgagccccgaaacccgcccggcacggcgcacgcgaacgcggtcacgcgccgcgcacatgtgcccccgccgtctccccgcaaaagcgcagcgccaccgtcccgccgccgccgccgcccgttggtttccttcgtttttttcccgctccacgccgccgcggaggcgcgatcgcgtgcgagaagccctaactcgagctctggactccagcccagagcccgggcgacgcgtggtcgcccatactcggaggtcccgggtccctggaggcttcgatgcagaaccacgcgtacagccggctgggcatctcggggaccggggcggtcgtgccgtcgcctccgtcgtcgccgcggcgcgcgtgggggaggagggcctcggcgaagggaggatggtctgcgagggccagcgcggacgcgggctggggcgggggcgcggtgcggagggttgcgcgagcggtgcttgcggcgctgctgcggcggcaggctgtgttcctctttgcgccactgctgtacgtggcggcgatgctgctctacatgggctctatctcgctcgacagtgtgccccgcatcatcccgcgcccggcgcccgggtcaatgtaccgcagcccgcagctctacgcccgtctccgcgccgacatggacgccgataatgccaccgacgcgctagcagctgtatggcggcatgcttacagaggtggtgtttggagaccttgcataagcaataataccaatggcttgcctgaatcaaatggctacatatacattgaggctaatggtggtttgaatcaacaacgaacatcgatttgcaatgcagttgctgttgctggctttctgaatgcgactcttgtaatcccaaacttccattatcacagcatttggagggatcctagcaaatttagtgatatctatgacgaggattactttatcgaacgcttaaaaaatgatgtccgggtgattgacaaggtgcctgagttcataatggagcgatttggtcacaatctgagcaatgcatttaatttcaagataaaagcttggtctcctattcaattctatgaagatattgttctccctaagttgatcgaagaaagactcataaggatatcaccttttgcaaaccggctgtcatttgatgctcctccagctgttcaacgtctacgatgtctagcaaattttgaagccctaaaattttctaaaccaatcactactatatctaacactttaatttctcggatgagagaaaaaagtgctgaaaataatgggaaatatgtagcagtgcatctccgctttgaagaggatatggtagccttctcttgttgtgtctttgatggtggtgacaatgagaagaaggaactggatgcagctagggaaaaaggttggagagggaaatttacaaggccaggacgtgtaataaggcctggagcaataaggatgaatgggaaatgtccactgactcctttggagaacttctcctcaaggatggcagctattgactacagtgtctgtgttcatagtgaggtttttgtgaccacacaaggtggaaattttcctcattttcttattgggcatagaagatacttgtatggtggccatgcgaagacaattaagcccgataaaagaagattggctatactctttgatagtccacgtattggatggaagtcactgaaacgtcaattgttcaatatgagagcacatagtgacgtgaagggtattgaaataaaaagagcaaatgaatctgtatacacctttccatgccctgattgcatgtgccgttcaaacaaatgagaaactccaaatccatcatggccagatagcatctaaaagttgtatcttgactcactgaccccatttctttctcagtgtcacggcatacccacccactccttaatcttcatatgcagtgtggtggtgagatgttccatgtcctctaagcatcccgactgagatatattgaatctttacatttaaccctggcactaacaatacactgatccatgtctagaatgtatgtaaccatatctagggctattccttaacagccagtgttaatctgtttgtgtagtactaagatcccttgtcctccttgtacattgatgaaccatgaagaaattgtcatacacaattttgtagcaagacgaatattgtttattttgccttttttttactaatttctcaagtatactatctcaatgatttgtccttttgtttgttacttatttaatgtattacatgtttttacttgccttttgttgttacttggttggatactaagcaatcactatcagttcaaagatggaag

SEQ ID NO: 31464 - DNA, 2285 bp, Zea Mays
gtcgagccccgaaacccgcccggcacggcgcacgcgaacgcggtcacgcgccgcgcacatgtgcccccgccgtctccccgcaaaagcgcagcgccaccgtcccgccgccgccgccgcccgttggtttccttcgtttttttcccgctccacgccgccgcggaggcgcgatcgcgtgcgagaagccctaactcgagctctggactccagcccagagcccgggcgacgcgtggtcgcccatactcggaggtcccgggtccctggaggcttcgatgcagaaccacgcgtacagccggctgggcatctcggggaccggggcggtcgtgccgtcgcctccgtcgtcgccgcggcgcgcgtgggggaggagggcctcggcgaagggaggatggtctgcgagggccagcgcggacgcgggctggggcgggggcgcggtgcggagggttgcgcgagcggtgcttgcggcgctgctgcggcggcaggctgtgttcctctttgcgccactgctgtacgtggcggcgatgctgctctacatgggctctatctcgctcgacagtgtgccccgcatcatcccgcgcccggcgcccgggtcaatgtaccgcagcccgcagctctacgcccgtctccgcgccgacatggacgccgataatgccaccgacgcgctgtatggcggcatgcttacagaggtggtgtttggagaccttgcataagcaataataccaatggcttgcctgaatcaaatggctacatatacattgaggctaatggtggtttgaatcaacaacgaacatcgatttgcaatgcagttgctgttgctggctttctgaatgcgactcttgtaatcccaaacttccattatcacagcatttggagggatcctagcaaatttagtgatatctatgacgaggattactttatcgaacgcttaaaaaatgatgtccgggtgattgacaaggtgcctgagttcataatggagcgatttggtcacaatctgagcaatgcatttaatttcaagataaaagcttggtctcctattcaattctatgaagatattgttctccctaagttgatcgaagaaagactcataaggatatcaccttttgcaaaccggctgtcatttgatgctcctccagctgttcaacgtctacgatgtctagcaaattttgaagccctaaaattttctaaaccaatcactactatatctaacactttaatttctcggatgagagaaaaaagtgctgaaaataatgggaaatatgtagcagtgcatctccgctttgaagaggatatggtagccttctcttgttgtgtctttgatggtggtgacaatgagaagaaggaactggatgcagctagggaaaaaggttggagagggaaatttacaaggccaggacgtgtaataaggcctggagcaataaggatgaatgggaaatgtccactgactcctttggagaacttctcctcaaggatggcagctattgactacagtgtctgtgttcatagtgaggtttttgtgaccacacaaggtggaaattttcctcattttcttattgggcatagaagatacttgtatggtggccatgcgaagacaattaagcccgataaaagaagattggctatactctttgatagtccacgtattggatggaagtcactgaaacgtcaattgttcaatatgagagcacatagtgacgtgaagggtattgaaataaaaagagcaaatgaatctgtatacacctttccatgccctgattgcatgtgccgttcaaacaaatgagaaactccaaatccatcatggccagatagcatctaaaagttgtatcttgactcactgaccccatttctttctcagtgtcacggcatacccacccactccttaatcttcatatgcagtgtggtggtgagatgttccatgtcctctaagcatcccgactgagatatattgaatctttacatttaaccctggcactaacaatacactgatccatgtctagaatgtatgtaaccatatctagggctattccttaacagccagtgttaatctgtttgtgtagtactaagatcccttgtcctccttgtacattgatgaaccatgaagaaattgtcatacacaattttgtagcaagacgaatattgtttattttgccttttttttactaatttctcaagtatactatctcaatgatttgtccttttgtttgttacttatttaatgtattacatgtttttacttgccttttgttgttacttggttggatactaagcaatcactatcagttcaaagatggaag

SEQ ID NO: 31465 - DNA, 1889 bp, Zea Mays
gtcgagccccgaaacccgcccggcacggcgcacgcgaacgcggtcacgcgccgcgcacatgtgcccccgccgtctccccgcaaaagcgcagcgccaccgtcccgccgccgccgccgcccgttggtttccttcgtttttttcccgctccacgccgccgcggaggcgcgatcgcgtgcgagaagccctaactcgagctctggactccagcccagagcccgggcgacgcgtggtcgcccatactcggaggtcccgggtccctggaggcttcgatgcagaaccacgcgtacagccggctgggcatctcggggaccggggcggtcgtgccgtcgcctccgtcgtcgccgcggcgcgcgtgggggaggagggcctcggcgaagggaggatggtctgcgagggccagcgcggacgcgggctggggcgggggcgcggtgcggagggttgcgcgagcggtgcttgcggcgctgctgcggcggcaggctgtgttcctctttgcgccactgctgtacgtggcggcgatgctgctctacatgggctctatctcgctcgacagtgtgccccgcatcatcccgcgcccggcgcccgggtcaatgtaccgcagcccgcagctctacgcccgtctccgcgccgacatggacgccgataatgccaccgacgcgctagcagctgtatggcggcatgcttacagaggtggtgtttggagaccttgcataagcaataataccaatggcttgcctgaatcaaatggctacatatacattgaggctaatggtggtttgaatcaacaacgaacatcgatttgcaatgcagttgctgttgctggctttctgaatgcgactcttgtaatcccaaacttccattatcacagcatttggagggatcctaggatatggtagccttctcttgttgtgtctttgatggtggtgacaatgagaagaaggaactggatgcagctagggaaaaaggttggagagggaaatttacaaggccaggacgtgtaataaggcctggagcaataaggatgaatgggaaatgtccactgactcctttggagaacttctcctcaaggatggcagctattgactacagtgtctgtgttcatagtgaggtttttgtgaccacacaaggtggaaattttcctcattttcttattgggcatagaagatacttgtatggtggccatgcgaagacaattaagcccgataaaagaagattggctatactctttgatagtccacgtattggatggaagtcactgaaacgtcaattgttcaatatgagagcacatagtgacgtgaagggtattgaaataaaaagagcaaatgaatctgtatacacctttccatgccctgattgcatgtgccgttcaaacaaatgagaaactccaaatccatcatggccagatagcatctaaaagttgtatcttgactcactgaccccatttctttctcagtgtcacggcatacccacccactccttaatcttcatatgcagtgtggtggtgagatgttccatgtcctctaagcatcccgactgagatatattgaatctttacatttaaccctggcactaacaatacactgatccatgtctagaatgtatgtaaccatatctagggctattccttaacagccagtgttaatctgtttgtgtagtactaagatcccttgtcctccttgtacattgatgaaccatgaagaaattgtcatacacaattttgtagcaagacgaatattgtttattttgccttttttttactaatttctcaagtatactatctcaatgatttgtccttttgtttgttacttatttaatgtattacatgtttttacttgccttttgttgttacttggttggatactaagcaatcactatcagttcaaagatggaag

SEQ ID NO: 31466 - DNA, 2816 bp, Zea Mays
gtcgagccccgaaacccgcccggcacggcgcacgcgaacgcggtcacgcgccgcgcacatgtgcccccgccgtctccccgcaaaagcgcagcgccaccgtcccgccgccgccgccgcccgttggtttccttcgtttttttcccgctccacgccgccgcggaggcgcgatcgcgtgcgagaagccctaactcgagctctggactccagcccagagcccgggcgacgcgtggtcgcccatactcggaggtcccgggtccctggaggcttcgatgcagaaccacgcgtacagccggctgggcatctcggggaccggggcggtcgtgccgtcgcctccgtcgtcgccgcggcgcgcgtgggggaggagggcctcggcgaagggaggatggtctgcgagggccagcgcggacgcgggctggggcgggggcgcggtgcggagggttgcgcgagcggtgcttgcggcgctgctgcggcggcaggctgtgttcctctttgcgccactgctgtacgtggcggcgatgctgctctacatgggctctatctcgctcgacagtgtgccccgcatcatcccgcgcccggcgcccgggtcaatgtaccgcagcccgcagctctacgcccgtctccgcgccgacatggacgccgataatgccaccgacgcgctagcagctgtatggcggcatgcttacagaggtggtgtttggagaccttgcataagcaataataccaatggcttgcctgaatcaaatggctacatatacattgaggctaatggtggtttgaatcaacaacgaacatcgatttgcaatgcagttgctgttgctggctttctgaatgcgactcttgtaatcccaaacttccattatcacagcatttggagggatcctagcaaatttagtgatatctatgacgaggattactttatcgaacgcttaaaaaatgatgtccgggtgattgacaaggtgcctgagttcataatggagcgatttggtcacaatctgagcaatgcatttaatttcaagataaaagcttggtctcctattcaattctatgaagatattgttctccctaagttgatcgaagaaagactcataaggatatcaccttttgcaaaccggctgtcatttgatgctcctccagctgttcaacgtctacgatgtctagcaaattttgaagccctaaaattttctaaaccaatcactactatatctaacactttaatttctcggatgagagaaaaaagtgctgaaaataatgggaaatatgtagcagtgcatctccgctttgaagaggatatggtagccttctcttgttgtgtctttgatggtggtgacaatgagaagaaggaactggatgcagctagggaaaaaggttggagagggaaatttacaaggccaggacgtgtaataaggcctggagcaataaggatgaatgggaaatgtccactgactcctttggaggttggattaatgctgcgtggaatgggttttaacaataatactgcaatatatttagcttctggaaggatatataaagcagaaaagaacatgtctcctctccttgaaatgttccccctcttgcagacaaaagaaacattggcactggatgaagaacttgctccattcaagaacttctcctcaaggatggcagctattgactacagtgtctgtgttcatagtgaggtttttgtgaccacacaaggtggaaattttcctcattttcttattgggcatagaagatacttgtatggtggccatgcgaagacaattaagcccgataaaagaagattggctatactctttgatagtccacgtattggatggaagtcactgaaacgtcaattgttcaatatgagagcacatagtgacgtgaagggtattgaaataaaaagagcaaatgaatctgtatacacctttccatgccctgattgcatgtgccgttcaaacaaatgagaaactccaaatccatcatggccagatagcatctaaaagttgtatcttgactcactgaccccatttctttctcagtgtcacggcatacccacccactccttaatcttcatatgcagtgtggtggtgagatgttccatgtcctctaagcatcccgactgagatatattgaatctttacatttaaccctggcactaacaatacactgatccatgtctagaatgtatgtaaccatatctagggctattccttaacagccagtgttaatctgtttgtgtagtactaagatcccttgtcctccttgtacattgatgaaccatgaagaaattgtcatacacaattttgtagcaagacgaatattgtttattttgccttttttttactaatttctcaagtatactatctcaatgatttgtccttttgtttgttacttatttaatgtattacatgtttttacttgccttttgttgttacttggttggatactaagcaatcactatcagttcaaagatggaagccgcctaaaagtaagtggcatactattagattcttgctctcttgatgttactggaaaaacaagcggggtatgttagtgcattgcgtttctagtgatatattgtcagaatgatcaagtacatcatgggaaaggttttacgatcaggggggatggtctttcatcttcatacacgccatcatccttcatccagcatttggaaaagaaagctggtgtgctgagaacaaaatttcctcgtgaaatcacttgtgcatggagctgagttcctcgcttgcttgtttgttcttgattgcgatggtacatcttttgccacggtgcttttacgattggatcaaggtttcccccctaactaaagtaat

SEQ ID NO: 31467 - DNA, 1846 bp, Zea Mays
gttaaaaaacctggagtaaaatacacaaaagtttgtgtacagctagcagctgtatggcggcatgcttacagaggtggtgtttggagaccttgcataagcaataataccaatggcttgcctgaatcaaatggctacatatacattgaggctaatggtggtttgaatcaacaacgaacatcgatttgcaatgcagttgctgttgctggctttctgaatgcgactcttgtaatcccaaacttccattatcacagcatttggagggatcctagcaaatttagtgatatctatgacgaggattactttatcgaacgcttaaaaaatgatgtccgggtgattgacaaggtgcctgagttcataatggagcgatttggtcacaatctgagcaatgcatttaatttcaagataaaagcttggtctcctattcaattctatgaagatattgttctccctaagttgatcgaagaaagactcataaggatatcaccttttgcaaaccggctgtcatttgatgctcctccagctgttcaacgtctacgatgtctagcaaattttgaagccctaaaattttctaaaccaatcactactatatctaacactttaatttctcggatgagagaaaaaagtgctgaaaataatgggaaatatgtagcagtgcatctccgctttgaagaggatatggtagccttctcttgttgtgtctttgatggtggtgacaatgagaagaaggaactggatgcagctagggaaaaaggttggagagggaaatttacaaggccaggacgtgtaataaggcctggagcaataaggatgaatgggaaatgtccactgactcctttggaggttggattaatgctgcgtggaatgggttttaacaataatactgcaatatatttagcttctggaaggatatataaagcagaaaagaacatgtctcctctccttgaaatgttccccctcttgcagacaaaagaaacattggcactggatgaagaacttgctccattcaagaacttctcctcaaggatggcagctattgactacagtgtctgtgttcatagtgaggtttttgtgaccacacaaggtggaaattttcctcattttcttattgggcatagaagatacttgtatggtggccatgcgaagacaattaagcccgataaaagaagattggctatactctttgatagtccacgtattggatggaagtcactgaaacgtcaattgttcaatatgagagcacatagtgacgtgaagggtattgaaataaaaagagcaaatgaatctgtatacacctttccatgccctgattgcatgtgccgttcaaacaaatgagaaactccaaatccatcatggccagatagcatctaaaagttgtatcttgactcactgaccccatttctttctcagtgtcacggcatacccacccactccttaatcttcatatgcagtgtggtggtgagatgttccatgtcctctaagcatcccgactgagatatattgaatctttacatttaaccctggcactaacaatacactgatccatgtctagaatgtatgtaaccatatctagggctattccttaacagccagtgttaatctgtttgtgtagtactaagatcccttgtcctccttgtacattgatgaaccatgaagaaattgtcatacacaattttgtagcaagacgaatattgtttattttgccttttttttactaatttctcaagtatactatctcaatgatttgtccttttgtttgttacttatttaatgtattacatgtttttacttgccttttgttgttacttggttggatactaagcaatcactatcagttcaaagatggaag

SEQ ID NO: 31468 - DNA, 884 bp, Zea Mays
ttttcctttaacttcatgttacaagaggcgttcggaccaaacaaaaaacttctcctcaaggatggcagctattgactacagtgtctgtgttcatagtgaggtttttgtgaccacacaaggtggaaattttcctcattttcttattgggcatagaagatacttgtatggtggccatgcgaagacaattaagcccgataaaagaagattggctatactctttgatagtccacgtattggatggaagtcactgaaacgtcaattgttcaatatgagagcacatagtgacgtgaagggtattgaaataaaaagagcaaatgaatctgtatacacctttccatgccctgattgcatgtgccgttcaaacaaatgagaaactccaaatccatcatggccagatagcatctaaaagttgtatcttgactcactgaccccatttctttctcagtgtcacggcatacccacccactccttaatcttcatatgcagtgtggtggtgagatgttccatgtcctctaagcatcccgactgagatatattgaatctttacatttaaccctggcactaacaatacactgatccatgtctagaatgtatgtaaccatatctagggctattccttaacagccagtgttaatctgtttgtgtagtactaagatcccttgtcctccttgtacattgatgaaccatgaagaaattgtcatacacaattttgtagcaagacgaatattgtttattttgccttttttttactaatttctcaagtatactatctcaatgatttgtccttttgtttgttacttatttaatgtattacatgtttttacttgccttttgttgttacttggttggatactaagcaatcactatcagttcaaagatggaag

SEQ ID NO: 31469 - DNA, 720 bp, Zea Mays
cttatattcagtgccatactcattattagacatttgtttatctttatcttcagtgccatactcattattagagatggaagtcactgaaacgtcaattgttcaatatgagagcacatagtgacgtgaagggtattgaaataaaaagagcaaatgaatctgtatacacctttccatgccctgattgcatgtgccgttcaaacaaatgagaaactccaaatccatcatggccagatagcatctaaaagttgtatcttgactcactgaccccatttctttctcagtgtcacggcatacccacccactccttaatcttcatatgcagtgtggtggtgagatgttccatgtcctctaagcatcccgactgagatatattgaatctttacatttaaccctggcactaacaatacactgatccatgtctagaatgtatgtaaccatatctagggctattccttaacagccagtgttaatctgtttgtgtagtactaagatcccttgtcctccttgtacattgatgaaccatgaagaaattgtcatacacaattttgtagcaagacgaatattgtttattttgccttttttttactaatttctcaagtatactatctcaatgatttgtccttttgtttgttacttatttaatgtattacatgtttttacttgccttttgttgttacttggttggatactaagcaatcactatcagttcaaagatggaag

SEQ ID NO: 31470 - DNA, 5194 bp, Zea Mays
tcttctcttcccctcgtggcctcgtcgtcgtcatctgtctgctcctcgctcctcactcgtcactcccctcactccccgttccactgctcctccactggcggcgagatggcgagaggcttgggggccgctcccgtctcgtcgtgcctcgcgctcggggcagcggcggcggtgctgctcgtggcggcggcgctgccttccccggcatctggagtcgacgtgacggccgtgctctcggcgtttcccaacttcgcggactttgcgcgtctgctggcatccacccccgtggccagcgagctgtccgggaggtcgtccctgacgctcctggccgtgccgaatgccaacctgccgcagtcaccctcggctttcgtagctagcgctggcgccgacattgccgacgtgctgaggtatcacgttctgctggagtacctcttcccgttcgacctcgcccgcctctctccctccgggaagctcgtgacgacgctgtttcaaaccacgggccgcgcgccctccgacttcggcgccgtcaacctcaccgtggggggcaactccactgtcgtggtccgctctccggcgccgtccccgggatcgaatgccacagtcctcggcgccgtgaccgcggttccatacaatctcagcgtgctcgcggtgggtggccttatcataccttccggattcgacctcgccgcctctgagagccgcccgccaccgccggtgaacatcacccgggttctcaccgacgcgcgggggttcaacgttgcggcctccatgttgcaggcctccggtgtagcgagtgagtttgaggccgacgagcacagtgctggcatcaccgtcttcgtccccaccgacgacgcctttgccggcctccccgccaccgaccgcctccagtccctacccgctgagcgcaaggccgtcgtgctccgcttccatgtgctgcactcttactacccgctgggctccctcgagagctctacggcgtccgccacgtcctccacgctcatcgacgcctggggggagcgcttcgtggcgctggaccggggcagcctccgccacccgcagtggcaggaggtcgccgaggtcgtctcctctcgcgacagctactccaaggcgcccaaatccgacgtccagtgcaagaaccgcatcgacacgctcaagaagaagtacaaggtcgagaaggccaagcacgactccgactggcgctacttcgaccgcctcgacgacctgctcgctcccgtgctgctcaagcccaattcttcttcttcctcggctgctgctgctacggcggcggcggcagcccggagcgccgggcccatggtccctccgcgcatcaacttcccgcagcgcacccgcacgcccctccactcctccgcgggggcaaagtggaggatgccgtcgccgttgccccagccgtcggcgtcgtccgactcctccgacgggttcccgccgtccgcggtggcgaacggcaagaggcagcgcgtggaggagcccgccgccgccgccgcggacaacggcgcggagagcagcgtcagccgcgcgcagggtctgcgcgagctggcgcaagcgatccggcggctaggggaggtgtacgagcgcgtggagagcgccaagagggatcaggagctccggatggagcgggagcgcctggactccgcccggcagctggaggagcagcgcgtgcagttctccactagcatgccccgcagcagtcgcattaccagaacagcacaagccccaccgggggcgatgacaacggcagcgactcggacaaggaagctcaggaggatgcggaagacgaagaggaagagagccagtgattgctctcctcttcagcaatggaatggtaactcaacacaaaaaagtggagaacgcgagggcaaaacaaggtcgaagaaggcgtggcggagggagacacacccagggaagaaacggcgcgagggcaaaacgagaaaagaaatatgctaatgaccatttagagagaccgatgctaaattttcaaaccgtgtaagattataatgctacgaattcaattgccacgatggtggtgccaagtttctgaagcccgccgtagccggtgccatgtttgcaaaattctcaaacataacccgtgtcaatggctccatcgccattgacacaggcatcgtgcaggcatccatcacccgtacagtgttcgaccaaaatcctgtggcagtctttgccgtctccaaggttctactgcccaaggaaatgttcggtcgcggcgattctggcaacactgccatggcaccaccttcagttgcgatggcaccccgcgacgccgggagcgagaagacaccacagacaaggctctcatccccgcctgacctccacagcgaagatagcgagtcatcagcttccttgctgacagcaaaggggacttggtggtgtataggactcatgtatctacagctgcatctattactatctctggtatgagattctggtcgtgcttgttgcttgcttccttgtgctcagtttttgtactttttactctctagaatgtctacaccaggaaaaggacggattggggagagaattccttagatgcaaagtagcaaaatagttgcttcacctgattattctatcttttcattttgccatgtggcaaatggaaataatatcatgcatacaaatctgtgcagtccttttgctccaaaatgaatagtattttctattttgagcatccttctctttttatttgtgcttgaactcaactttagcggttaaagtgggggcattttgcatcaggttagatttgaaggagtgaattcgatagagcccctggattactagggtgaggggatatatcaccatgaaatgtacaggttgttcgcttcggattaaagccggccagctgcaatccataaagacaaaaacattgtaaaagtagtagaaataggtacagattaaagccaagcgaacacttctgcccgggctgtgttttccatggtcttgtaatgctgttatggtctgaatactcatgatagaatgaagttactctaccatgttagaattaggtcatttcactattttgactctagtggcagaactcagatctcatgaatgtcaatctgcttgttagctgaggtcccaactgtaaaagtttttttatgtgagcttattggcagcagacacctctgcctaccaaagatatttgttggtgtaaatttacatacacccgttgagcactctaggtggaatggtggattcactgaatctcatctcaagatccagcactttgttagtgtcttggttattagtggtttgagttatataatagaatgttgtatgactagcaacacattgtgaaagttgggaataaaagctttttttctttgtttggagattataaacgtttaggggttggtcataaaataccattagggaaatatattgtatcactgtagtaccgactaccaatcaaattattcaaatagatgtagtaccacatacagagggagagaatatcagggtgagaaatatttgttgatatgtcatttgctacatgttacaactgatatgcctggcattctgtggtgcttcattgttcagcacgagcagttgtttctttgcaggaccactgacaatacataataattcgtttgtagttttcaacttttcatggggaggtggcccatgttttagttgattaggtactgagcctgttctgtcatgtgcagctcatgtgtactttgcaggagtcatgacctcatgggacccaaccctgagatgagatgttggggatgactatgaatctatgatgggctgatgactgaccacatttgaccaattctttgcaaacatgagttctctgttagaactatatattacttatgatcaggtataaaaatagaatcctagagatatagttggtttagacctactacaacttaagtaacaaagtcctacaaggacatgtaacaattgtgttgactatatataatgaacatgggcagcaacctaagggcttaagatcttaagccgttccaactatttccacactatcaatcaagcattgctgcatgatgagatttgttgcacagttcggaatagttgaagtggctaaaacttgatataattaaaactgatttagagtcctagtactattcaatgtggcaccatctctttgccactcaaaaaggcgagcatattagcggtctttatattgggataccatttgctatataagacttataagtgttccagtggacagtagagtttgggtgttttttaccaaagaaatggaatggagtgccatttgtgacatgcagaaaaggtagcattagggaacatttggaccatgtaaggtgtattcagggggtttgaggcttagtgatgttagtagtaggtatgatgaatatatgacagatgactggtttatgttagtcttgtgtggctgctcactcagagtctacgccggaactgtttgttgcatttgcatctatgtcctgcacactcctgcacactcataggtcttgtcaccaagggctgtcttactatagcttgctcttaaggccatcattgtgaactaccgcatgcactgcacttgtcaactattggtacatccaactgttctgatataactatcttcattaatactgaatatgaaactggaatttaccacttgtttcttagtgtttgtagcatatgaatctgatcatttcctccatgtcacttttacaaggcctgctctctatttatagaatctatttgtggcaagatcagcacatgattctccattttctttatgatatatttatattcacaattttgtgtttgcttccatatatcaagattacggcagtaacacaataagctcagttagtggaagctacttttttctttaccattgctgtaaaagttgtattatcaaaggatttgaaagatgcgaaaggagacatgtcacatgctaaaattattgggtaaagcaaaaaatctggagcaactccagatgatccaaagttgtaggacagttttgatgtcagcggagtcttttgatcaatgcagctgtggaagttagtgtgtgactttgtgatcacatgttggcttcatgtatattattgtactttctgttttctgatattattagctatatatatatacgaaggtgaaatgtaaaaaggcaccggtaaaatacatagccatatgctgcaatgacatcagtaaagcattggtttttgct

SEQ ID NO: 31471 - DNA, 4900 bp, Zea Mays
tcttctcttcccctcgtggcctcgtcgtcgtcatctgtctgctcctcgctcctcactcgtcactcccctcactccccgttccactgctcctccactggcggcgagatggcgagaggcttgggggccgctcccgtctcgtcgtgcctcgcgctcggggcagcggcggcggtgctgctcgtggcggcggcgctgccttccccggcatctggagtcgacgtgacggccgtgctctcggcgtttcccaacttcgcggactttgcgcgtctgctggcatccacccccgtggccagcgagctgtccgggaggtcgtccctgacgctcctggccgtgccgaatgccaacctgccgcagtcaccctcggctttcgtagctagcgctggcgccgacattgccgacgtgctgaggtatcacgttctgctggagtacctcttcccgttcgacctcgcccgcctctctccctccgggaagctcgtgacgacgctgtttcaaaccacgggccgcgcgccctccgacttcggcgccgtcaacctcaccgtggggggcaactccactgtcgtggtccgctctccggcgccgtccccgggatcgaatgccacagtcctcggcgccgtgaccgcggttccatacaatctcagcgtgctcgcggtgggtggccttatcataccttccggattcgacctcgccgcctctgagagccgcccgccaccgccggtgaacatcacccgggttctcaccgacgcgcgggggttcaacgttgcggcctccatgttgcaggcctccggtgtagcgagtgagtttgaggccgacgagcacagtgctggcatcaccgtcttcgtccccaccgacgacgcctttgccggcctccccgccaccgaccgcctccagtccctacccgctgagcgcaaggccgtcgtgctccgcttccatgtgctgcactcttactacccgctgggctccctcgagagctctacggcgtccgccacgtcctccacgctcatcgacgcctggggggagcgcttcgtggcgctggaccggggcagcctccgccacccgcagtggcaggaggtcgccgaggtcgtctcctctcgcgacagctactccaaggcgcccaaatccgacgtccagtgcaagaaccgcatcgacacgctcaagaagaagtacaaggtcgagaaggccaagcacgactccgactggcgctacttcgaccgcctcgacgacctgctcgctcccgtgctgctcaagcccaattcttcttcttcctcggctgctgctgctacggcggcggcggcagcccggagcgccgggcccatggtccctccgcgcatcaacttcccgcagcgcacccgcacgcccctccactcctccgcgggggcaaagtggaggatgccgtcgccgttgccccagccgtcggcgtcgtccgactcctccgacgggttcccgccgtccgcggtggcgaacggcaagaggcagcgcgtggaggagcccgccgccgccgccgcggacaacggcgcggagagcagcgtcagccgcgcgcagggtctgcgcgagctggcgcaagcgatccggcggctaggggaggtgtacgagcgcgtggagagcgccaagagggatcaggagctccggatggagcgggagcgcctggactccgcccggcagctggaggagcagcgcgtgcagttctccactagcatgccccgcagcagtcgcattaccagaacagcacaagccccaccgggggcgatgacaacggcagcgactcggacaaggaagctcaggaggatgcggaagacgaagaggaagagagccagtgattgctctcctcttcagcaatggaatggcatcgtgcaggcatccatcacccgtacagtgttcgaccaaaatcctgtggcagtctttgccgtctccaaggttctactgcccaaggaaatgttcggtcgcggcgattctggcaacactgccatggcaccaccttcagttgcgatggcaccccgcgacgccgggagcgagaagacaccacagacaaggctctcatccccgcctgacctccacagcgaagatagcgagtcatcagcttccttgctgacagcaaaggggacttggtggtgtataggactcatgtatctacagctgcatctattactatctctggtatgagattctggtcgtgcttgttgcttgcttccttgtgctcagtttttgtactttttactctctagaatgtctacaccaggaaaaggacggattggggagagaattccttagatgcaaagtagcaaaatagttgcttcacctgattattctatcttttcattttgccatgtggcaaatggaaataatatcatgcatacaaatctgtgcagtccttttgctccaaaatgaatagtattttctattttgagcatccttctctttttatttgtgcttgaactcaactttagcggttaaagtgggggcattttgcatcaggttagatttgaaggagtgaattcgatagagcccctggattactagggtgaggggatatatcaccatgaaatgtacaggttgttcgcttcggattaaagccggccagctgcaatccataaagacaaaaacattgtaaaagtagtagaaataggtacagattaaagccaagcgaacacttctgcccgggctgtgttttccatggtcttgtaatgctgttatggtctgaatactcatgatagaatgaagttactctaccatgttagaattaggtcatttcactattttgactctagtggcagaactcagatctcatgaatgtcaatctgcttgttagctgaggtcccaactgtaaaagtttttttatgtgagcttattggcagcagacacctctgcctaccaaagatatttgttggtgtaaatttacatacacccgttgagcactctaggtggaatggtggattcactgaatctcatctcaagatccagcactttgttagtgtcttggttattagtggtttgagttatataatagaatgttgtatgactagcaacacattgtgaaagttgggaataaaagctttttttctttgtttggagattataaacgtttaggggttggtcataaaataccattagggaaatatattgtatcactgtagtaccgactaccaatcaaattattcaaatagatgtagtaccacatacagagggagagaatatcagggtgagaaatatttgttgatatgtcatttgctacatgttacaactgatatgcctggcattctgtggtgcttcattgttcagcacgagcagttgtttctttgcaggaccactgacaatacataataattcgtttgtagttttcaacttttcatggggaggtggcccatgttttagttgattaggtactgagcctgttctgtcatgtgcagctcatgtgtactttgcaggagtcatgacctcatgggacccaaccctgagatgagatgttggggatgactatgaatctatgatgggctgatgactgaccacatttgaccaattctttgcaaacatgagttctctgttagaactatatattacttatgatcaggtataaaaatagaatcctagagatatagttggtttagacctactacaacttaagtaacaaagtcctacaaggacatgtaacaattgtgttgactatatataatgaacatgggcagcaacctaagggcttaagatcttaagccgttccaactatttccacactatcaatcaagcattgctgcatgatgagatttgttgcacagttcggaatagttgaagtggctaaaacttgatataattaaaactgatttagagtcctagtactattcaatgtggcaccatctctttgccactcaaaaaggcgagcatattagcggtctttatattgggataccatttgctatataagacttataagtgttccagtggacagtagagtttgggtgttttttaccaaagaaatggaatggagtgccatttgtgacatgcagaaaaggtagcattagggaacatttggaccatgtaaggtgtattcagggggtttgaggcttagtgatgttagtagtaggtatgatgaatatatgacagatgactggtttatgttagtcttgtgtggctgctcactcagagtctacgccggaactgtttgttgcatttgcatctatgtcctgcacactcctgcacactcataggtcttgtcaccaagggctgtcttactatagcttgctcttaaggccatcattgtgaactaccgcatgcactgcacttgtcaactattggtacatccaactgttctgatataactatcttcattaatactgaatatgaaactggaatttaccacttgtttcttagtgtttgtagcatatgaatctgatcatttcctccatgtcacttttacaaggcctgctctctatttatagaatctatttgtggcaagatcagcacatgattctccattttctttatgatatatttatattcacaattttgtgtttgcttccatatatcaagattacggcagtaacacaataagctcagttagtggaagctacttttttctttaccattgctgtaaaagttgtattatcaaaggatttgaaagatgcgaaaggagacatgtcacatgctaaaattattgggtaaagcaaaaaatctggagcaactccagatgatccaaagttgtaggacagttttgatgtcagcggagtcttttgatcaatgcagctgtggaagttagtgtgtgactttgtgatcacatgttggcttcatgtatattattgtactttctgttttctgatattattagctatatatatatacgaaggtgaaatgtaaaaaggcaccggtaaaatacatagccatatgctgcaatgacatcagtaaagcattggtttttgct

SEQ ID NO: 31472 - DNA, 802 bp, Zea Mays
atccggtggagggctcttccgcgtcccagagaggccattaaaatcggccgcccccggcaaccatctcttcccctttcccaacctcccatcccataccaccccccttcatgtcgtcgccttcctccccgcgcacttgcccctgcatctctccgctgcccaccactccctcgcattaacgacgaaggctcatcatctctgatggaggggggtaaacagtccaagaaatttcatctggcggattgggtgtcagtgtgttctccccaaaattcaaggtggtcttggagtgttgaatcttgagaaaaagaaggtgcaaagaatggtggtgctaggaagcaggttaatccgaaagacggcaagtgaagctttcgggagggccttggggtggtgtcctcttgacaggcggatttctggttgacataaaagatgctgaagccgtgaaaacttgttgggatagttgtttgtcttttgttggcctttctggtcaggtcttttgtggcttctgcctgtcttgatgggttgtatataagaaagtcttatgtagctcttcgtaggccaaaacttcctctgttatcgtagtctcttcactgatcttgcgttagtgtttagagtctagataactctctggccgtggctgttctgtttggaagtcctaccgcgtaggtgcagttgtttcatacattcctatttcttaatgaaatagggggcttcgccccttcgtcaaaaaaaaaaaaaactacacttccgtaccgaaatatagaccgttatttctattaatatagaccattatttctatatatccaaa

SEQ ID NO: 31473 - DNA, 708 bp, Zea Mays
atccggtggagggctcttccgcgtcccagagaggccattaaaatcggccgcccccggcaaccatctcttcccctttcccaacctcccatcccataccaccccccttcatgtcgtcgccttcctccccgcgcacttgcccctgcatctctccgctgcccaccactccctcgcattaacgacgaaggctcatcatctctgatggagaaaaagaaggtgcaaagaatggtggtgctaggaagcaggttaatccgaaagacggcaagtgaagctttcgggagggccttggggtggtgtcctcttgacaggcggatttctggttgacataaaagatgctgaagccgtgaaaacttgttgggatagttgtttgtcttttgttggcctttctggtcaggtcttttgtggcttctgcctgtcttgatgggttgtatataagaaagtcttatgtagctcttcgtaggccaaaacttcctctgttatcgtagtctcttcactgatcttgcgttagtgtttagagtctagataactctctggccgtggctgttctgtttggaagtcctaccgcgtaggtgcagttgtttcatacattcctatttcttaatgaaatagggggcttcgccccttcgtcaaaaaaaaaaaaaactacacttccgtaccgaaatatagaccgttatttctattaatatagaccattatttctatatatccaaa

SEQ ID NO: 31474 - DNA, 3647 bp, Zea Mays
ttcccctttcccaacctcccatcccataccaccccccttcatgtcgtcgccttcctccccgcgcacttgcccctgcatctctccgctgcccaccactccctcgcattaacgacgaaggctcatcatctctgatggaggtaacagtcggctaacacaccgccccgccccgcccctgttgtctgtcccttcattttctagcttagaagagtattcttgttccggtttcttcgttccgtcgagcgcggcattctgtgggtcgtgtggattttggcccgggggacgaggaggaggctggtcaaagatctgtggtcaaaaattgatggtggggttcatggaatgggtgcatgactggttgctgtgggacgccttcctggagtgcggagggatcatgaggccaccgattagatagcggctggggagcgagggaccacaggaggcggaggccgccgttagcaccccccaccaccccgcgccgcgagcaagcagccatgggggaagacctcgtcaccaccctgtccatggagaacggcggcggcggcggcggcggccaccacggcccctgcacgctcctctccatggacccgtccggccacctctccgcgccggacgaccgcgccgtcggcgtcatggtgcagaccctcatcggagggggcgtcggcgccggcgcccgcgcccacgccgtgtcgccctccggcgcgcctccgcccgacatcaaccagccgtggcagaccgacctctgcgacatgctggacgtcggcctcggcccgcaggtctacagcgccgaggccgtgctcagctgcgcccccaaggccgggagccggaaggccgccaagcgcggggacagcatctggggcgcctggttcttcttcaccttctatttcaagcccctgctgtccgacaagtgcaaggacaaggtcgtccgggacaacagcggcggggtctcgggcttcgacaagtccgacctccgccttgatatgttcctggtgcagcacgacatggagaacatgtacatgtgggtgttcaaggagcggccggagaatgctctggggaagatgcagctgaggagctacatgaacggccactcccggcccggggagccgcagttccccttcagcgtcgacagggggtttgtgcggtcgcaccggatgcagcggctcaccgaggcagaccttaggaggtgggcggacctgactgggagggagctcaatttcatcatcccacaggaagccagtgatttcgggacatggaggaccattccaaattcagagcttgagcttgagaagccacaccctgtcatgaagagcaacggcacccaaaacccaaagaaaacaggcttgaatctgtcgtcaccgtccaatcattcaggcgaagatggtatggatctctctccagttagcagcaagcgtaggaaggaattgtccccacaggccatggatgaggaagtattcttcccactgaattcttgccctcagaagacacaacaagatgtggagatgcactcaccaacgcagcctgctgcgtggctccatgagtttactggggtgatgagaaacgcctgtgggccagtgactgctgccaagtctatctatgaggatgaccagggctacttaataatggtcagcttgccgtttgttgatcagcagagggtgaaggtttcgtggaggaacactctgactcatggcattgtgaagatcgtttgtgttagtactgctaggatgcaacatataaggagacatggcaggatgttcgcgcttgccgatccttccccagagcattgccctcctggtgatttcattcgtgaaatacctctagctactcgtatccctgaagatgctaagctggaggcttgttttgatgaggctgcctcagtgctggagatcatggtcccaaaacgagggaatgaacctgaagaacatgaagttagggtctctctgcgaccccctcactacggagctaatgatctacttttgacctaagctatctctgcaccatgctacatcttctttgtaaccccagattaatgccaaatttagctgagaatcaaggtttcagtatgcttgttctttgcctaatgtttccagtacttgtgccatactatgtctcttcagcgacgaagacttgctgaagactagtttattctagcttctgtgttatgggtgtctttttaaccctcatgtttagattttgtactaagttcagttaaaagaaataatattctgagttgccactggtttgttttgttggattgtgattatctgtgcgtaccagtttcttatctctaacgtccaaatttacactgtattgcttgattcacttcaattatgaaggaaaaaaaatgggaccttagacataggcgttcctttgattaaacaagtagtagcggagaagggagattgtagtgctgagtgagcaagaacatacttctatgtatagattgcagaaaatgtatgaagctagccagtagccagctaatgctgagcctgcaactataaagtcaatgcttgtgcagatgtgtgtcctgtaatcagctgtaacgttttcaatgtggacatggcccttcgcaaatgatattgctcttgaagtatttctcaggtgcaacttttgtttgagatagctccaagtttcagctcaactgtagtttataatagcgatttaaatagttttaaaaatattttgaatttaaataataaacaaaatgacttagataaatattttatataggttttacaacttcaagcagcttttttctggtcacataatgacctgttctatcaactccattaaattttctagagctgtcgcaggtaaatgtgaaatgctggttataaaaaaaaaatctgaaacgtgattgtagccgtgttttaacaatctaggtgttaagtttaactctcttgttctacagttgtgggtggcggtctgattttattacttcattcttgtatcttggattctaattatccattttatagtgctatttgtcgtaaagaaactactctttactacacttccgtaccgccttcacgaagatatagatgacgtagtcttttagagtgtcagcgtcgacgtaagcctagctctgccatgttctttcttctttctgtatgtatgtatgtatgaatgaggatgaagaaaaagaaaaaagggcgacgccatgctcccgccttccttcttccgctgacggcccgtactgaggatggtgtggctgctgggccgtcttctccgcgccctgggcgcgcggtcgcgttggagggaggcccattgctacaggtgcgcgtcgaggcttgcaagggacggcgtccttcaggttcgcaggtaggttttcctcttgacttccttgggtcgcactcctttccccatctcgcttcgcgtctttctcgcctctggtcgcttccgtgttcgtcgcgagaaagtttctgtggagggtgggtatcctctccgcttcgcccgccttcgcttggtgaggagtggcctcttccgggtcgctctggtgtgtcggttctgatggattcgaaaaatcgtaaccctaactgggatcgttggggtccgaaggagatgccacagggatctcagtcgtggggaaagaatcggaaccttagctggcgtttgaagactggatctggtaaatctgaggtcaaagatgatattcc

SEQ ID NO: 31475 - DNA, 1720 bp, Zea Mays
atcctgagcacttgagttcactagacgtctcctcatgcatgtgttcatctctatctcatgccacctcctctatttcagaaaacatcgactcctagaatctttttcaccaccgcctagccctattccaaatcgttatccagtacgtgcttttcttttgttccagctaattccagctccttggaattcttcccagcaccaaaatttccattgtttacacagggtccgttactttttctatccccatctccattattttttctcctccaaaccgtacccacacgcctggctgctgcacttcgctcgacgcgcaggcgctggattcctgacaccatttctttcatcctcatctccgtgagattttttttttgaagtcggatgcaggttcttatctccccgcgccgtcgtcgatggagcaaaaaaaatctccagccgcccttagcctgtcttcctcgccggctgatttttgccctcgcgcgatccaatcctctcagccgccgctcaacttcgagaataaaaatcctcgcgcgcgcccaggatcttcttcctccctgcttccagcgccgaggctccctcccccagctctctcacggtcgcccctgctcctccggtcctcccctatggcgccctgcttgctccctgtgccgcagtccctcctctctcctccctccatttctccttcacgcgcccaggctcgccgtggagtttttcgcgcgcagctccctcagctccgtactcagcgctcgtttctgctcggattcctgctctcatggacgcgtccagcggtgctcctctgatgcgcgcgctccagtcgtctccccgagctcggctctgccgctcctatggtgtccggccagctctcctgctcttctcggttgcctgcgtgtccatggcgcgtcttctcccctgcgcacagccacacctggttctctgctcgccacgtgcgcagttccctgcgtgcctagtgtcgcacgcatgctcccaggtccgcagcaccagctgcctgttctgcttgctcgtgtctgcgcgccgctgttgcccagctcggatccccctcgctgcgcgctgagctcttcgttgttgtccgtgcgcgcgccgctcgtcgacctctctgcgcacgtatagctcgctcttttcttatttgcggcgcgcacgaattttatctgctcgccgcagcgtgtcgagttcctgcaccatcatcgcttctgtcgcaagctcgttggccacagttatcttgatcgcgtcagcacgcgactgtggttgttggggaccttcggcttccgaaggtcctcaaaaacatgatttaacaatgtttctggagtataatatgtgaacaggtatcttcggacttgtatcagaaagggagaagctcaaaagatacgaaggttgacacagtgccgaagctgtgaagcaggaaagcttcggcatgttcgcagaaaagggaaccgacttaaagatgaaaagaccatttagacctcgatagattgctatggaattatcaccaaatgtaaagggcatatatgtaattttgtatgggttgtaccccgtgcctataaataggtgccgtactgttcacgctgacttggcatttgcttttgcgtcacacttgtattttcatctccttccaagccgaaggtacatttataattcgatattgtttctatttctctatgatgatataaaaaagttaaatgaataatgttatatgattattcatgctatc

SEQ ID NO: 31476 - DNA, 1149 bp, Zea Mays
atgaaaacaatgtatgtagataaactttggttaatatgctcaaatcgatcttatcattcgggagcggtgcattagcaggcaaaggcaccctaccagagtaccagtcaacagccaccgtttcgatcttcgccacaccgctcggcgctcgcctccgcctgattcccatctttcccgagctccacacctcacgtctataaataaggcgcccgcggtgcccatcaattcgcgtcaccgcgtcccgagagcgcgattcattccgcgcgacgcaaaaccctagcccatccaccgatccttgtcatggcggccaccaccagccaggcgagcctcctcctgcagaagcagctcagagatctcgccaagcacccggtggatgggttctcggctgggctggtcgacgatagtaacgtattcgagtggcaggtcaccatcatcggcccgcccgataccctatatgatggagggtacttcaatgcaataatgagcttcccagaaaattacccaaacagcccgccatcagtcagatttacctctgaaatgtggcatccaaatgtttattcagatgggctggtgtgtatctctattcttcatccacctggtgaagatccaagtggttatgagctcgcaagtgagcgttggacacctgtgcatacagttgaaagcatagttctgagcattatatcaatgctctctagtccaaatgacgagtctgcagcaaacattgaggcagctaaggaatggagggataagagggaggatttcaagaaaagggtcaggcgcatcgtgcggaaatcacaggaaatgttatgaagaaaatggaatactggggaagtcaaccgtgccataaatgcattgggacgtggtgtatcgtgtggcctgggctctactaatgtttgacaatcctgaagtgccaccagtggtgaacctggtataagcaggcgccattcatgtcagctaatcgttgagaaaacatatcagtgaaatcgtgcaactgttagtgtaatgaggcagttcctgcttacatattattactcgtgctacctgtctacagtgtcttgaatgcatggaatgtcttgaattttacctgttttccttggtgtaagcatggtatgcaataatgggaaacgcaaatttctcagttaactgtatcct

SEQ ID NO: 31477 - DNA, 406 bp, Zea Mays
ttgtggaccgaaagcagcgtttgaaaatcttactatacgggattgatttctagtggaggctagtgcggggcggaattttctttgcttgttgattcttgattgttgtagcggtgatggagggtacttcaatgcaataatgagcttcccagaaaattacccaaacagcccgccatcagtcagatttacctctgaaatgtggcatccaaatgtttattcagatgggctggtgtgtatctctattcttcatccacctggtgaagatccaagtggttatgagctcgcaagtgagcgttggacacctgtgcatacagttgaaagcatagttctgagcattatatcaatgctctctagtccaaatgacgagtctgcagcaaacattgaggcagctatatccttcgattgttaa

SEQ ID NO: 31478 - DNA, 805 bp, Zea Mays
atagcacacagccaaagccaccagcgctcgtcacctccaatcaacaaattcccaatccgccgcttcccatcccgcgttcgccgctccatttgatcgaattcccgatggcgcccaaggccgaggccgagaagaagcccagggcggagaagcgcgtgccgggcaaggagggcggcgagaagaaggggaagaagaaggccaagaagagcgtcgagacgtacaagatctacatcttcaaggtgctcaagcaggtgcacccggacattggtatctcgtccaaggccatgtccatcatgaactccttcatcaacgacatcttcgagaagctggctgccgaggccgccaagctcgcccgctacaacaagaagcccaccataacctcccgggagatccagacttcggtgcgcctcgtccttcctggcgagctcgccaagcacgccgtctccgagggcaccaaggccgttaccaagtttacttcctcttagatcgccgccgcacggagcgacggctctgtttcgtttcctcgtacttttaggccagtgctaataggttgctcgaggaacaatgtagtgtggaaatttctaatatattccaaattgtgctgatataatttgcttcaaaccttgaggaggcgctgttttaatttggggttgctacagccgtacaatttttggcgccaatatcttgcttcgtattcactggggttcaatcacctgaatcatgtaatttgttcagggggataaataacatttatcaaaggattgtgagatagtacagataacaaatcagctggcagtgctatgcaaaa

SEQ ID NO: 31479 - DNA, 2826 bp, Zea Mays
gttgacctcaagagccagagaggaaaccaaggagaaaacaacaaagatcaggcagggttttttccctctcggctgcctttcacaggctccacagtacaccaagccacgcacatcgccgcggttgcagtgcggctggtcctagtagcacgatttcaatgcctgcaactgcagtgtgcgctgcgcctctgagagctgagccctttcttttgcaccttcccttgtgtcgcagtcgcactcgcgccatttgaaacgccactacgactctacgacctcgctcgctagtgctccagcgcgcgcccggccggtttggtataagcatggcggttgcggcggcgggcagcagggcgagagcggagcaggccaggctgcagtggcgggagcaggagccccggagccccgagatggccgcgccgccaaggccgcccaggccgcgcccggcgagggcggcggtcgtgtactacctggcgaggaacggccacctcgagcacccgcacttcatggaggtcgcgctctcctgccccgacggcctctacctccgagatgtgatcgaccggctcgacgcgctgagaggcaaagggatggcgcgcgtgtactcatgggcgtccaagaggagctaccggaacggcttcgtgtggcacgacctggcggacgacgactacatccacccggtggtcggccgggagtacgtgctcaagggcaccgagcgcctgcacccggtgccgccgccggcgctgctggacgcggcggccgcgtcctcctcgtcgtccggctcgcaggagacgcccacctcgtcgtcctctgccgggtgggaggcgcgcggcaggacggctcaccggatgaagagcgccagcgcgtgtggcgcggccgacgccgagctcggggagtacgtggcgtacaagggcgaggagcgcgccgcggacgccgcgacgcagaccgaggacggcggccgcggccacggccacagccacagccagaggcgcgtcctggctcccgccgcgcaggaggagctgagcagggcggagacgacgtcgccgccgacggcgtccacgagccccgagacgctggaggcgctcatcagggcggacgggcgcgttgtggcggccgtcagcggcagcggccgggccagggcgtcctccgtgctcatgcagctcatctcgtgcgggtccgtgtccgtgcgggacgcctcggtggtgccgcgcgcgcaggcgcaggcacaggcgcaccaccaccaccaccaccaccaccgcgcccgccgcccgccccgcccgccggcgtccgcggccgtcgacctgccgtcgtaccgcgccaagatcgtggaggacaaggagtacttcagcgggagcatcatcgagaccgcgaagcgctcgccggccgacgacgtcacgtccctggacctggccgttctccggcgctcgtcgtcgtacaacgcggagaggtaaggatcaccgagccccgtccctctcgcaatcattggcgcgacggcgcgagcatcagcctccggaaaccgatccgtcgcttacgcgaaacgcctctcgttcgtagtagtaagctcattgtcatatgccagcaggcagcaggagtgagtgaggatgagatgccactgttacattgaaccaaccatcctgtcctagtagagagttaaggctctctggcccgcccatggccgcagctgcgtctgaagaacccaccacgtcattgccgtacgagcaagatacgcccgagtaaatggttacctcatccgtaaatagaagtaggtctcgcggagctgtcgcgcaccatacatcacaacaccgatcacatgtccagcatgttcattttagtctcaatccacgcgactaataaataggtttgaatcaaaatctctcttaactcctttcaatttcgtccaatccacgtgagagatgaaaataaccgagcaaagtcttaatcgggtaatccaggtggattggaatggtttgatataaaatttaaactaaaactctatagcaaatagctttaatccatatggattgtatcctgcaacgggcgggacctgctcctgctgtcgttccgtgcgagctgggcaggctcgggagcaccaaatccctgagccgcttttggcgcgcgcatgtacgctctacttttcagaaggattaagtctgaagctactcataatctgcttatactgcccagttcgttctttgagaagagaataacttgatgactgatgtgagcctgtaacagcaggctttgtcaggcatgcatttcaaacctttgcttaatttgaagcaatggtccccagacgagccctaaacatcctgcatctacgagtgcctagaaatgagaaattgtacatacccctacactacactgccatgtgcgacgtacgagaagagtgatgatgaggacggcgatacgatgatccgagccgtgctgatgggctctgaatatgcgttggctggcagggtgataaagctggaggtggcgaaggaggccggggacctgcacgaccgctgcatcccgcggaagcccaagggcaagaaagacggctggctacctggtcatctcctgcagctgcagcgcgcaggcgcagcaggggaatagcaagggatgacgtcgtgtgggcgtcatcgttggtatcctacagtatgcgttgcgttgggaacggtcgtagatgagtgtccgtccactagtccagtttggtgtcttctggttgttagatgctgattgctgaatgcttgcctgtgatttccgtgtgggctagcgacttcacgttatacgtgtcctgtctgcctcgatgtctggactgtttaattactactccctagtgatctgattctctttctg

SEQ ID NO: 31480 - DNA, 730 bp, Zea Mays
ctcattttggcccgtgaaaactgaaaattaaaggcagtcgtccaccacctaagcctccactcgccggaacaagcctgcctcaaactctctcgatctatatatgcgtcctcatccaacaccttccatggaagacccatcgtcaccagcagggtgtcccggccctctctagtttgtaccccccaacattggcctgatgctgctgccatgtagcccatatatgcagcgctcccccctcggcttcaccggcggcggcaacgacggtgaaaactacatcgggtgctagctccgacggtggtgcgtgccctgttgacgatagggcgcgcggggcgcgggcagcttgtaggcgttcgatcggccatgtagggcaactatacatctttggcaggtctccatcatcctccgtgggagagaagatgcatgccactgttccatgtccgtagcgacaggtcacggcccgttgcctttcggagcttcccggtcccggcatgcgctccaaccgtaagggcaaggcgtcaggagcgacaggtgcaaggcggcggatcggaagaactcggcagtcggcactgggtgcggccgtggagggaaggggatggtcgccgattttatgccaatttactcgcgccccacgccgcgagtctttgatcgatgtgtttgtacagtcgaaagagcattgctttacataggaccatcaatatatatatatggatacatacgcataagagtagctgaa

SEQ ID NO: 31481 - DNA, 2750 bp, Zea Mays
gcatggctggaagttcaaaccgtttcccaccaaccgtggagtccgaaatttgacgggaaatctgacgagcccatttttttcataaaggtccggaacctacacaaaaaagttctgcgtcgtcccggtcctctcagaaaacgcgttgcatgagataaccaaaaccacatacagccggaaccgagggggtgatatggaataacagcgctaaaattgaactaaccatagttagctggggacgcctctcccgcggggctgacaccaaaccgtggttcctcggacgcaacgcgagcacaaccagaccacaacacctcgaggctcgagcatccctgcatccctcccccccttccccatcccacctcctgctacaaccgcttcgtttcctcccctcccaaatcccccaaccccaaatcgagctccgagtcgacggcccttgccgaaccgctctccagttcccaaatccccctcccccgaaattcaccgccggactggcccggccgatggagtgacccagctagggttccgaagccggcaatggaggcgcagtggctcgcggagtatccgcaccagggggccgacaagcggccgcgcaaacgggcccggctcgcctgggatgtcgcgcccacgctgttccagccccccaaggcaattccgatgctatattgtgggcaggaactaattaatggtaatttcacgactgcatttcttccaccaccatcaatttattacaccgggccgccacggaatatttcgcctccttggagaccagatgacaaggatggacactatgtttttgcggttggagagaatctcacaccaagatataggatacttaacaagatgggtgaagggacatttggtcaagttttggagtgctgggacttggaaaaccaagaagcagtggctatcaagattgtacgctcccttcagaaataccgagaggctgctatgatagaaattgatgtgctccagagacttgggaagcatgactttactggcagccggtatttgagaagcttgggccaagcctatatgactttctgcgaaagaatagctaccgttcatttcctattgaccttgtccgagaatttgccagacaaatattagagtctgttgcatttatgcatgacttgcgacttattcacacggatctgaagccagaaaacattctccttgtttcatcagagtctatcagggtgcctgattataaggtttctatacgaccaccaaaggatggttctttctttaagaaccttccaaaatctagtgctatcaagctgattgattttgggagtacaactttcgagagccaagaccacaattatgtggtgtcgacaagacattatcgtgcaccagaagttatccttggtcttgggtggaactatccatgcgacttgtggagtgtgggttgcattttagttgagctttgttcgggggaagctctctttcaaacacatgaaaacttggagcatttggctatgatggagaaggtcttagggcctctcccaaagcatatgattgtcagagctgatcggcgtgctgaaaagtacttcaagcgcggagtaaggttggactggccagagggagcggcctcacgagagagcatgaaggcagtctggaaattgcctcgtctgcagaaccttgtgatgcaacatgttgatcattctgctggagatctaattgatcttcttcaaggacttcttcggtatgatcctaatgagcgcctgaaagcacatgaagctctacaacaccctttctttaccagatgcatcagaagatgtggtttctgaggctacactgagattgaaaatgtcaatgctgtatttcttcattttgatgtgtaagaactacaaaaaagtggagatgttctacgaaaaatgaaatatgctaacttgcattctgttcaatgatttgaaagtactagcaggtagcatgcagaaatccctaaccaggtggtgtcaattgaggataaatgggattaagtggtttcatggaagattggaacactatttaatggtggcatacagtgatctcgggtcaacaggtaatcattttgcatgcatttagaatttgagtatttctcgtgcaagttggcaatgatattttttgccatggcacttttggtttggtggtgtttttcttttcctcttgaatttctgattctttcaagaaataaaacaagtacgtcaacttgttttgtatggcaaatattgcttgagatttgtctttatatcttataataagtctcacggtcaagcttggttttcactgagcttgagtttaccacttgactagacaaattgttgatataaaagctatccccactctcacaaaggtatcattatcacttcttgaggaatcaatattttttattggaccaaatatataaagggattgttatttttaagtataattagattagtcattgactgtattttaaaaatgagcttatttggagatacaaatgttgctaatatgttctaaaacctagtcaaacttcagaaagttttacatggacaaaacttaggtgacttttggataccatatttatgttttttttctaaagtttcttttttcgcaaaaaagatgatgtgctgctttcaaaaaatatttcctccatcctgaattgtaagttgttttgacctttttttaagtgcatagcaaagctatgtatttagatatgtacaccacgtctacacgcacagatgcgcaagcatgcagatgtatgcgtgtgtagatagatagatagattg

SEQ ID NO: 31482 - DNA, 2799 bp, Zea Mays
gcatggctggaagttcaaaccgtttcccaccaaccgtggagtccgaaatttgacgggaaatctgacgagcccatttttttcataaaggtccggaacctacacaaaaaagttctgcgtcgtcccggtcctctcagaaaacgcgttgcatgagataaccaaaaccacatacagccggaaccgagggggtgatatggaataacagcgctaaaattgaactaaccatagttagctggggacgcctctcccgcggggctgacaccaaaccgtggttcctcggacgcaacgcgagcacaaccagaccacaacacctcgaggctcgagcatccctgcatccctcccccccttccccatcccacctcctgctacaaccgcttcgtttcctcccctcccaaatcccccaaccccaaatcgagctccgagtcgacggcccttgccgaaccgctctccagttcccaaatccccctcccccgaaattcaccgccggactggcccggccgatggagtgacccagctagggttccgaagccggcaatggaggcgcagtggctcgcggagtatccgcaccagggggccgacaagcggccgcgcaaacgggcccggctcgcctgggatgtcgcgcccacgctgttccagccccccaaggcaattccgatgctatattgtgggcaggaactaattaatggtaatttcacgactgcatttcttccaccaccatcaatttattacaccgggccgccacggaatatttcgcctccttggagaccagatgacaaggatggacactatgtttttgcggttggagagaatctcacaccaagatataggatacttaacaagatgggtgaagggacatttggtcaagttttggagtgctgggacttggaaaaccaagaagcagtggctatcaagattgtacgctcccttcagaaataccgagaggctgctatgatagaaattgatgtgctccagagacttgggaagcatgactttactggcagccgttgtgtgcaaatacggaactggtttgactatcgtaatcatatttgtatagtatttgagaagcttgggccaagcctatatgactttctgcgaaagaatagctaccgttcatttcctattgaccttgtccgagaatttgccagacaaatattagagtctgttgcatttatgcatgacttgcgacttattcacacggatctgaagccagaaaacattctccttgtttcatcagagtctatcagggtgcctgattataaggtttctatacgaccaccaaaggatggttctttctttaagaaccttccaaaatctagtgctatcaagctgattgattttgggagtacaactttcgagagccaagaccacaattatgtggtgtcgacaagacattatcgtgcaccagaagttatccttggtcttgggtggaactatccatgcgacttgtggagtgtgggttgcattttagttgagctttgttcgggggaagctctctttcaaacacatgaaaacttggagcatttggctatgatggagaaggtcttagggcctctcccaaagcatatgattgtcagagctgatcggcgtgctgaaaagtacttcaagcgcggagtaaggttggactggccagagggagcggcctcacgagagagcatgaaggcagtctggaaattgcctcgtctgcagaaccttgtgatgcaacatgttgatcattctgctggagatctaattgatcttcttcaaggacttcttcggtatgatcctaatgagcgcctgaaagcacatgaagctctacaacaccctttctttaccagatgcatcagaagatgtggtttctgaggctacactgagattgaaaatgtcaatgctgtatttcttcattttgatgtgtaagaactacaaaaaagtggagatgttctacgaaaaatgaaatatgctaacttgcattctgttcaatgatttgaaagtactagcaggtagcatgcagaaatccctaaccaggtggtgtcaattgaggataaatgggattaagtggtttcatggaagattggaacactatttaatggtggcatacagtgatctcgggtcaacaggtaatcattttgcatgcatttagaatttgagtatttctcgtgcaagttggcaatgatattttttgccatggcacttttggtttggtggtgtttttcttttcctcttgaatttctgattctttcaagaaataaaacaagtacgtcaacttgttttgtatggcaaatattgcttgagatttgtctttatatcttataataagtctcacggtcaagcttggttttcactgagcttgagtttaccacttgactagacaaattgttgatataaaagctatccccactctcacaaaggtatcattatcacttcttgaggaatcaatattttttattggaccaaatatataaagggattgttatttttaagtataattagattagtcattgactgtattttaaaaatgagcttatttggagatacaaatgttgctaatatgttctaaaacctagtcaaacttcagaaagttttacatggacaaaacttaggtgacttttggataccatatttatgttttttttctaaagtttcttttttcgcaaaaaagatgatgtgctgctttcaaaaaatatttcctccatcctgaattgtaagttgttttgacctttttttaagtgcatagcaaagctatgtatttagatatgtacaccacgtctacacgcacagatgcgcaagcatgcagatgtatgcgtgtgtagatagatagatagattg

SEQ ID NO: 31483 - DNA, 2633 bp, Zea Mays
gcatggctggaagttcaaaccgtttcccaccaaccgtggagtccgaaatttgacgggaaatctgacgagcccatttttttcataaaggtccggaacctacacaaaaaagttctgcgtcgtcccggtcctctcagaaaacgcgttgcatgagataaccaaaaccacatacagccggaaccgagggggtgatatggaataacagcgctaaaattgaactaaccatagttagctggggacgcctctcccgcggggctgacaccaaaccgtggttcctcggacgcaacgcgagcacaaccagaccacaacacctcgaggctcgagcatccctgcatccctcccccccttccccatcccacctcctgctacaaccgcttcgtttcctcccctcccaaatcccccaaccccaaatcgagctccgagtcgacggcccttgccgaaccgctctccagttcccaaatccccctcccccgaaattcaccgccggactggcccggccgatggagtgacccagctagggttccgaagccggcaatggaggcgcagtggctcgcggagtatccgcaccagggggccgacaagcggccgcgcaaacgggcccggctcgcctgggatgtcgcgcccacgctgttccagccccccaaggcaattccgatgctatattgtgggcaggaactaattaatggtaatttcacgactgcatttcttccaccaccatcaatttattacaccgggccgccacggaatatttcgcctccttggagaccagatgacaaggatggacactatgtttttgcggttggagagaatctcacaccaagatataggatacttaacaagatgggtgaagggacatttggtcaagttttggagtgctgggacttggaaaaccaagaagcagtggctatcaagattgtacgctcccttcagaaataccgagaggctgctatgatagaaattgatgtgctccagagacttgggaagcatgactttactggcagccgttgtgtgcaaatacggaactggtttgactatcgtaatcatatttgtatagtatttgagaagcttgggccaagcctatatgactttctgcgaaagaatagctaccgttcatttcctattgaccttgtccgagaatttgccagacaaatattagagtctgttgcatttatgcatgacttgcgacttattcacacggatctgaagccagaaaacattctccttgtttcatcagagtctatcagggtgcctgattataaggtcttgggtggaactatccatgcgacttgtggagtgtgggttgcattttagttgagctttgttcgggggaagctctctttcaaacacatgaaaacttggagcatttggctatgatggagaaggtcttagggcctctcccaaagcatatgattgtcagagctgatcggcgtgctgaaaagtacttcaagcgcggagtaaggttggactggccagagggagcggcctcacgagagagcatgaaggcagtctggaaattgcctcgtctgcagaaccttgtgatgcaacatgttgatcattctgctggagatctaattgatcttcttcaaggacttcttcggtatgatcctaatgagcgcctgaaagcacatgaagctctacaacaccctttctttaccagatgcatcagaagatgtggtttctgaggctacactgagattgaaaatgtcaatgctgtatttcttcattttgatgtgtaagaactacaaaaaagtggagatgttctacgaaaaatgaaatatgctaacttgcattctgttcaatgatttgaaaggtagcatgcagaaatccctaaccaggtggtgtcaattgaggataaatgggattaagtggtttcatggaagattggaacactatttaatggtggcatacagtgatctcgggtcaacaggtaatcattttgcatgcatttagaatttgagtatttctcgtgcaagttggcaatgatattttttgccatggcacttttggtttggtggtgtttttcttttcctcttgaatttctgattctttcaagaaataaaacaagtacgtcaacttgttttgtatggcaaatattgcttgagatttgtctttatatcttataataagtctcacggtcaagcttggttttcactgagcttgagtttaccacttgactagacaaattgttgatataaaagctatccccactctcacaaaggtatcattatcacttcttgaggaatcaatattttttattggaccaaatatataaagggattgttatttttaagtataattagattagtcattgactgtattttaaaaatgagcttatttggagatacaaatgttgctaatatgttctaaaacctagtcaaacttcagaaagttttacatggacaaaacttaggtgacttttggataccatatttatgttttttttctaaagtttcttttttcgcaaaaaagatgatgtgctgctttcaaaaaatatttcctccatcctgaattgtaagttgttttgacctttttttaagtgcatagcaaagctatgtatttagatatgtacaccacgtctacacgcacagatgcgcaagcatgcagatgtatgcgtgtgtagatagatagatagattg

SEQ ID NO: 31484 - DNA, 2790 bp, Zea Mays
gcatggctggaagttcaaaccgtttcccaccaaccgtggagtccgaaatttgacgggaaatctgacgagcccatttttttcataaaggtccggaacctacacaaaaaagttctgcgtcgtcccggtcctctcagaaaacgcgttgcatgagataaccaaaaccacatacagccggaaccgagggggtgatatggaataacagcgctaaaattgaactaaccatagttagctggggacgcctctcccgcggggctgacaccaaaccgtggttcctcggacgcaacgcgagcacaaccagaccacaacacctcgaggctcgagcatccctgcatccctcccccccttccccatcccacctcctgctacaaccgcttcgtttcctcccctcccaaatcccccaaccccaaatcgagctccgagtcgacggcccttgccgaaccgctctccagttcccaaatccccctcccccgaaattcaccgccggactggcccggccgatggagtgacccagctagggttccgaagccggcaatggaggcgcagtggctcgcggagtatccgcaccagggggccgacaagcggccgcgcaaacgggcccggctcgcctgggatgtcgcgcccacgctgttccagccccccaaggcaattccgatgctatattgtgggcaggaactaattaatggtaatttcacgactgcatttcttccaccaccatcaatttattacaccgggccgccacggaatatttcgcctccttggagaccagatgacaaggatggacactatgtttttgcggttggagagaatctcacaccaagatataggatacttaacaagatgggtgaagggacatttggtcaagttttggagtgctgggacttggaaaaccaagaagcagtggctatcaagattgtacgctcccttcagaaataccgagaggctgctatgatagaaattgatgtgctccagagacttgggaagcatgactttactggcagccgttgtgtgcaaatacggaactggtttgactatcgtaatcatatttgtatagtatttgagaagcttgggccaagcctatatgactttctgcgaaagaatagctaccgttcatttcctattgaccttgtccgagaatttgccagacaaatattagagtctgttgcatttatgcatgacttgcgacttattcacacggatctgaagccagaaaacattctccttgtttcatcagagtctatcagggtgcctgattataaggtttctatacgaccaccaaaggatggttctttctttaagaaccttccaaaatctagtgctatcaagctgattgattttgggagtacaactttcgagagccaagaccacaattatgtggtgtcgacaagacattatcgtgcaccagaagttatccttggtcttgggtggaactatccatgcgacttgtggagtgtgggttgcattttagttgagctttgttcgggggaagctctctttcaaacacatgaaaacttggagcatttggctatgatggagaaggtcttagggcctctcccaaagcatatgattgtcagagctgatcggcgtgctgaaaagtacttcaagcgcggagtaaggttggactggccagagggagcggcctcacgagagagcatgaaggcagtctggaaattgcctcgtctgcagaaccttgtgatgcaacatgttgatcattctgctggagatctaattgatcttcttcaaggacttcttcggtatgatcctaatgagcgcctgaaagcacatgaagctctacaacaccctttctttaccagatgcatcagaagatgtggtttctgaggctacactgagattgaaaatgtcaatgctgtatttcttcattttgatgtgtaagaactacaaaaaagtggagatgttctacgaaaaatgaaatatgctaacttgcattctgttcaatgatttgaaaggtagcatgcagaaatccctaaccaggtggtgtcaattgaggataaatgggattaagtggtttcatggaagattggaacactatttaatggtggcatacagtgatctcgggtcaacaggtaatcattttgcatgcatttagaatttgagtatttctcgtgcaagttggcaatgatattttttgccatggcacttttggtttggtggtgtttttcttttcctcttgaatttctgattctttcaagaaataaaacaagtacgtcaacttgttttgtatggcaaatattgcttgagatttgtctttatatcttataataagtctcacggtcaagcttggttttcactgagcttgagtttaccacttgactagacaaattgttgatataaaagctatccccactctcacaaaggtatcattatcacttcttgaggaatcaatattttttattggaccaaatatataaagggattgttatttttaagtataattagattagtcattgactgtattttaaaaatgagcttatttggagatacaaatgttgctaatatgttctaaaacctagtcaaacttcagaaagttttacatggacaaaacttaggtgacttttggataccatatttatgttttttttctaaagtttcttttttcgcaaaaaagatgatgtgctgctttcaaaaaatatttcctccatcctgaattgtaagttgttttgacctttttttaagtgcatagcaaagctatgtatttagatatgtacaccacgtctacacgcacagatgcgcaagcatgcagatgtatgcgtgtgtagatagatagatagattg

SEQ ID NO: 31485 - DNA, 2160 bp, Zea Mays
gcatggctggaagttcaaaccgtttcccaccaaccgtggagtccgaaatttgacgggaaatctgacgagcccatttttttcataaaggtccggaacctacacaaaaaagttctgcgtcgtcccggtcctctcagaaaacgcgttgcatgagataaccaaaaccacatacagccggaaccgagggggtgatatggaataacagcgctaaaattgaactaaccatagttagctggggacgcctctcccgcggggctgacaccaaaccgtggttcctcggacgcaacgcgagcacaaccagaccacaacacctcgaggctcgagcatccctgcatccctcccccccttccccatcccacctcctgctacaaccgcttcgtttcctcccctcccaaatcccccaaccccaaatcgagctccgagtcgacggcccttgccgaaccgctctccagttcccaaatccccctcccccgaaattcaccgccggactggcccggccgatggagtgacccagctagggttccgaagccggcaatggaggcgcagtggctcgcggagtatccgcaccagggggccgacaagcggccgcgcaaacgggcccggctcgcctgggatgtcgcgcccacgctgttccagccccccaaggcaattccgatgctatattgtgggcaggaactaattaatggtaatttcacgactgcatttcttccaccaccatcaatttattacaccgggccgccacggaatatttcgcctccttggagaccagatgacaaggatggacactatgtttttgcggttggagagaatctcacaccaagatataggatacttaacaagatgggtgaagggacatttggtcaagttttggagtgctgggacttggaaaaccaagaagcagtggctatcaagattgtacgctcccttcagaaataccgagaggctgctatgatagaaattgatgtgctccagagacttgggaagcatgactttactggcagccgttgtgtgcaaatacggaactggtttgactatcgtaatcatatttgtatagtatttgagaagcttgggccaagcctatatgactttctgcgaaagaatagctaccgttcatttcctattgaccttgtccgagaatttgccagacaaatattagagtctgttgcatttatgcatgacttgcgacttattcacacggatctgaagccagaaaacattctccttgtttcatcagagtctatcagggtgcctgattataaggtttctatacgaccaccaaaggatggttctttctttaagaaccttccaaaatctagtgctatcaagctgattgattttgggagtacaactttcgagagccaagaccacaattatgtggtgtcgacaagacattatcgtgcaccagaagttatccttggtcttgggtggaactatccatgcgacttgtggagtgtgggttgcattttagttgagctttgttcgggggaagctctctttcaaacacatgaaaacttggagcatttggctatgatggagaaggtcttagggcctctcccaaagcatatgattgtcagagctgatcggcgtgctgaaaagtacttcaagcgcggagtaaggttggactggccagagggagcggcctcacgagagagcatgaaggcagtctggaaattgcctcgtctgcagaaccttgtgatgcaacatgttgatcattctgctggagatctaattgatcttcttcaaggacttcttcggtatgatcctaatgagcgcctgaaagcacatgaagctctacaacaccctttctttaccagatgcatcagaagatgtggtttctgaggctacactgagattgaaaatgtcaatgctgtatttcttcattttgatgtgtaagaactacaaaaaagtggagatgttctacgaaaaatgaaatatgctaacttgcattctgttcaatgatttgaaagtactagcaggtagcatgcagaaatccctaaccaggtggtgtcaattgaggataaatgggattaagtggtttcatggaagattggaacactatttaatggtggcatacagtgatctcgggtcaacagttgttcgcttcctttgtttctatatgagctttggtggttggcatgtctcggaatgaaattacgatattac

SEQ ID NO: 31486 - DNA, 2125 bp, Zea Mays
gcatggctggaagttcaaaccgtttcccaccaaccgtggagtccgaaatttgacgggaaatctgacgagcccatttttttcataaaggtccggaacctacacaaaaaagttctgcgtcgtcccggtcctctcagaaaacgcgttgcatgagataaccaaaaccacatacagccggaaccgagggggtgatatggaataacagcgctaaaattgaactaaccatagttagctggggacgcctctcccgcggggctgacaccaaaccgtggttcctcggacgcaacgcgagcacaaccagaccacaacacctcgaggctcgagcatccctgcatccctcccccccttccccatcccacctcctgctacaaccgcttcgtttcctcccctcccaaatcccccaaccccaaatcgagctccgagtcgacggcccttgccgaaccgctctccagttcccaaatccccctcccccgaaattcaccgccggactggcccggccgatggagtgacccagctagggttccgaagccggcaatggaggcgcagtggctcgcggagtatccgcaccagggggccgacaagcggccgcgcaaacgggcccggctcgcctgggatgtcgcgcccacgctgttccagccccccaaggcaattccgatgctatattgtgggcaggaactaattaatggtaatttcacgactgcatttcttccaccaccatcaatttattacaccgggccgccacggaatatttcgcctccttggagaccagatgacaaggatggacactatgtttttgcggttggagagaatctcacaccaagatataggatacttaacaagatgggtgaagggacatttggtcaagttttggagtgctgggacttggaaaaccaagaagcagtggctatcaagattgtacgctcccttcagaaataccgagaggctgctatgatagaaattgatgtgctccagagacttgggaagcatgactttactggcagccgttgtgtgcaaatacggaactggtttgactatcgtaatcatatttgtatagtatttgagaagcttgggccaagcctatatgactttctgcgaaagaatagctaccgttcatttcctattgaccttgtccgagaatttgccagacaaatattagagtctgttgcatttatgcatgacttgcgacttattcacacggatctgaagccagaaaacattctccttgtttcatcagagtctatcagggtgcctgattataaggtttctatacgaccaccaaaggatggttctttctttaagaaccttccaaaatctagtgctatcaagctgattgattttgggagtacaactttcgagagccaagaccacaattatgtggtgtcgacaagacattatcgtgcaccagaagttatccttggtcttgggtggaactatccatgcgacttgtggagtgtgggttgcattttagttgagctttgttcgggggaagctctctttcaaacacatgaaaacttggagcatttggctatgatggagaaggtcttagggcctctcccaaagcatatgattgtcagagctgatcggcgtgctgaaaagtacttcaagcgcggagtaaggttggactggccagagggagcggcctcacgagagagcatgaaggcagtctggaaattgcctcgtctgcaggacttcttcggtatgatcctaatgagcgcctgaaagcacatgaagctctacaacaccctttctttaccagatgcatcagaagatgtggtttctgaggctacactgagattgaaaatgtcaatgctgtatttcttcattttgatgtgtaagaactacaaaaaagtggagatgttctacgaaaaatgaaatatgctaacttgcattctgttcaatgatttgaaagtactagcaggtagcatgcagaaatccctaaccaggtggtgtcaattgaggataaatgggattaagtggtttcatggaagattggaacactatttaatggtggcatacagtgatctcgggtcaacagaaccgtgaacgatgtaatgctgactaaggctgacctggggaccctataccagttgggatttggtaccgtttgaccacgtgattctggattcca

SEQ ID NO: 31487 - DNA, 2020 bp, Zea Mays
gcatggctggaagttcaaaccgtttcccaccaaccgtggagtccgaaatttgacgggaaatctgacgagcccatttttttcataaaggtccggaacctacacaaaaaagttctgcgtcgtcccggtcctctcagaaaacgcgttgcatgagataaccaaaaccacatacagccggaaccgagggggtgatatggaataacagcgctaaaattgaactaaccatagttagctggggacgcctctcccgcggggctgacaccaaaccgtggttcctcggacgcaacgcgagcacaaccagaccacaacacctcgaggctcgagcatccctgcatccctcccccccttccccatcccacctcctgctacaaccgcttcgtttcctcccctcccaaatcccccaaccccaaatcgagctccgagtcgacggcccttgccgaaccgctctccagttcccaaatccccctcccccgaaattcaccgccggactggcccggccgatggagtgacccagctagggttccgaagccggcaatggaggcgcagtggctcgcggagtatccgcaccagggggccgacaagcggccgcgcaaacgggcccggctcgcctgggatgtcgcgcccacgctgttccagccccccaaggcaattccgatgctatattgtgggcaggaactaattaatggtaatttcacgactgcatttcttccaccaccatcaatttattacaccgggccgccacggaatatttcgcctccttggagaccagatgacaaggatggacactatgtttttgcggttggagagaatctcacaccaagatataggatacttaacaagatgggtgaagggacatttggtcaagttttggagtgctgggacttggaaaaccaagaagcagtggctatcaagattgtacgctcccttcagaaataccgagaggctgctatgatagaaattgatgtgctccagagacttgggaagcatgactttactggcagccgttgtgtgcaaatacggaactggtttgactatcgtaatcatatttgtatagtatttgagaagcttgggccaagcctatatgactttctgcgaaagaatagctaccgttcatttcctattgaccttgtccgagaatttgccagacaaatattagagtctgttgcatttatgcatgacttgcgacttattcacacggatctgaagccagaaaacattctccttgtttcatcagagtctatcagggtgcctgattataaggtttctatacgaccaccaaaggatggttctttctttaagaaccttccaaaatctagtgctatcaagctgattgattttgggagtacaactttcgagagccaagaccacaattatgtggtgtcgacaagacattatcgtgcaccagaagttatccttgtcggcgtgctgaaaagtacttcaagcgcggagtaaggttggactggccagagggagcggcctcacgagagagcatgaaggcagtctggaaattgcctcgtctgcagaaccttgtgatgcaacatgttgatcattctgctggagatctaattgatcttcttcaaggacttcttcggtatgatcctaatgagcgcctgaaagcacatgaagctctacaacaccctttctttaccagatgcatcagaagatgtggtttctgaggctacactgagattgaaaatgtcaatgctgtatttcttcattttgatgtgtaagaactacaaaaaagtggagatgttctacgaaaaatgaaatatgctaacttgcattctgttcaatgatttgaaagtactagcaggtagcatgcagaaatccctaaccaggtggtgtcaattgaggataaatgggattaagtggtttcatggaagattggaacactatttaatggtggcatacagtgatctcgggtcaacagaaccgtgaacgatgtaatgctgactaaggctgacctggggaccctataccagttgggatttggtaccgtttgaccacgtgattctggattcca

SEQ ID NO: 31488 - DNA, 3728 bp, Zea Mays
gcatggctggaagttcaaaccgtttcccaccaaccgtggagtccgaaatttgacgggaaatctgacgagcccatttttttcataaaggtccggaacctacacaaaaaagttctgcgtcgtcccggtcctctcagaaaacgcgttgcatgagataaccaaaaccacatacagccggaaccgagggggtgatatggaataacagcgctaaaattgaactaaccatagttagctggggacgcctctcccgcggggctgacaccaaaccgtggttcctcggacgcaacgcgagcacaaccagaccacaacacctcgaggctcgagcatccctgcatccctcccccccttccccatcccacctcctgctacaaccgcttcgtttcctcccctcccaaatcccccaaccccaaatcgagctccgagtcgacggcccttgccgaaccgctctccagttcccaaatccccctcccccgaaattcaccgccggactggcccggccgatggagtgacccagctagggttccgaagccggcaatggaggcgcagtggctcgcggagtatccgcaccagggggccgacaagcggccgcgcaaacgggcccggctcgcctgggatgtcgcgcccacgctgttccagccccccaaggcaattccgatgctatattgtgggcaggaactaattaatggtaatttcacgactgcatttcttccaccaccatcaatttattacaccgggccgccacggaatatttcgcctccttggagaccagatgacaaggatggacactatgtttttgcggttggagagaatctcacaccaagatataggatacttaacaagatgggtgaagggacatttggtcaagttttggagtgctgggacttggaaaaccaagaagcagtggctatcaagattgtacgctcccttcagaaataccgagaggctgctatgatagaaattgatgtgctccagagacttgggaagcatgactttactggcagccgttgtgtgcaaatacggaactggtttgactatcgtaatcatatttgtatagtatttgagaagcttgggccaagcctatatgactttctgcgaaagaatagctaccgttcatttcctattgaccttgtccgagaatttgccagacaaatattagagtctgttgcatttatgcatgacttgcgacttattcacacggatctgaagccagaaaacattctccttgtttcatcagagtctatcagggtgcctgattataaggtttctatacgaccaccaaaggatggttctttctttaagaaccttccaaaatctagtgctatcaagctgattgattttgggagtacaactttcgagagccaagaccacaattatgtggtgtcgacaagacattatcgtgcaccagaagttatccttggtcttgggtggaactatccatgcgacttgtggagtgtgggttgcattttagttgagctttgttcgggggaagctctctttcaaacacatgaaaacttggagcatttggctatgatggagaaggtcttagggcctctcccaaagcatatgattgtcagagctgatcggcgtgctgaaaagtacttcaagcgcggagtaaggttggactggccagagggagcggcctcacgagagagcatgaaggcagtctggaaattgcctcgtctgcagaaccttgtgatgcaacatgttgatcattctgctggagatctaattgatcttcttcaaggacttcttcggtatgatcctaatgagcgcctgaaagcacatgaagctctacaacaccctttctttaccagatgcatcagaagatgtggtttctgaggctacactgagattgaaaatgtcaatgctgtatttcttcattttgatgtgtaagaactacaaaaaagtggagatgttctacgaaaaatgaaatatgctaacttgcattctgttcaatgatttgaaagtactagcaggtagcatgcagaaatccctaaccaggtggtgtcaattgaggataaatgggattaagtggtttcatggaagattggaacactatttaatggtggcatacagtgatctcgggtcaacagaatggcggcggcggcgaacggcggagacggggaggagctcctcctgctctcggccgtggaggctggccgcggcggcggcgtacccaccgaggtggaggattcgtggcggctcaacttcgaggggttccgcccgccggaggcgcaccaggagaggccgccgaacggtccgcttcaccactgcctcggcgtgctagctcaaggtcctgaggatgttgttgctgaatactatcaacagcaagtggagatgcttgagggttttagtgagatggacacacttacagatcgtggtttccttcctggaatgtccaaggaagaacgagaaaaggttgccaggagtgaaacattagccatacggttgtctaactttgcaaatatggttctctttgctgcaaaagtgtatgcttcagtaaggagtggctcacttgctatcatcgcatcaactttggattctcttctagacttgttgtcaggatttatcttgtggtttactgccttttcaatgcaaacaccaaatccatacagatacccaattgggaaaaagcggatgcagccactgggaatacttgtttttgcttctgttatggcaacccttggccttcagataattctagaatcagtacgttcattggtgtctgatggagatgaattcagcttaacaagtgatcaagaaaagtggcttgtggacatcatgctctccgtgacattggtaaaacttgccctggttatatattgccgctccttcaccaacgaaattgtcaaagcatatgcacaagatcactttttcgatgtcatcacaaatgtaattggcctggttgctgcactacttgccaattacattgagggctggatcgatccgcttggtgcaatcgttctggcgatctacacgatcaggacatggtcgatgacggtgctggagaacgtgcactccctggtggggcagtcggcctcgccggagtacctccagaaactgacttacctgtgctggaaccaccacaaggccgtgcggcacatcgacacagtccgcgcctacacgttcggttcccactacttcgtggaggtggacatcgtgctgccgtcgaacatgcccctgcgggaggctcacgacatcggcgaggccctgcaggagaagctggagcgcctgccagagatcgagcgcgcgtttgtccacctcgactacgaattcacccaccgccccgagcacgccttgtcccacgagaaatagcatgctaggaccgaactgatgcagcaggcggaaggacacggcttcgtaatcgtaactgaaacaattttacttgtagccgcagaaagcttcttctgagacctgatgctcatctcgtcagtcgtcgcagcaaaccagttgggtacatgcgatgagactgaacgtaaaggagtgcttgctctctgcgatggtgtccttgtagcatcatggactacagaatctgattcctcctccaccaccaccacgacgacgacctattttatactggtcttcagctcattagtctaggtttgtttcgttatctttttgcatggagagaccgatgattgaggtatgtatttctgtaagataaattcatatcttgcttcaaaaagtcaaaactttttaaaatttgccagtacgtcgaaaatagttttgat

SEQ ID NO: 31489 - DNA, 2938 bp, Zea Mays
cacaactctggagttgataaaagcttttttttctcggctagaatatgcaattccgatgctatattgtgggcaggaactaattaatggtaatttcacgactgcatttcttccaccaccatcaatttattacaccgggccgccacggaatatttcgcctccttggagaccagatgacaaggatggacactatgtttttgcggttggagagaatctcacaccaagatataggatacttaacaagatgggtgaagggacatttggtcaagttttggagtgctgggacttggaaaaccaagaagcagtggctatcaagattgtacgctcccttcagaaataccgagaggctgctatgatagaaattgatgtgctccagagacttgggaagcatgactttactggcagccgttgtgtgcaaatacggaactggtttgactatcgtaatcatatttgtatagtatttgagaagcttgggccaagcctatatgactttctgcgaaagaatagctaccgttcatttcctattgaccttgtccgagaatttgccagacaaatattagagtctgttgcatttatgcatgacttgcgacttattcacacggatctgaagccagaaaacattctccttgtttcatcagagtctatcagggtgcctgattataaggtttctatacgaccaccaaaggatggttctttctttaagaaccttccaaaatctagtgctatcaagctgattgattttgggagtacaactttcgagagccaagaccacaattatgtggtgtcgacaagacattatcgtgcaccagaagttatccttggtcttgggtggaactatccatgcgacttgtggagtgtgggttgcattttagttgagctttgttcgggggaagctctctttcaaacacatgaaaacttggagcatttggctatgatggagaaggtcttagggcctctcccaaagcatatgattgtcagagctgatcggcgtgctgaaaagtacttcaagcgcggagtaaggttggactggccagagggagcggcctcacgagagagcatgaaggcagtctggaaattgcctcgtctgcagaaccttgtgatgcaacatgttgatcattctgctggagatctaattgatcttcttcaaggacttcttcggtatgatcctaatgagcgcctgaaagcacatgaagctctacaacaccctttctttaccagatgcatcagaagatgtggtttctgaggctacactgagattgaaaatgtcaatgctgtatttcttcattttgatgtgtaagaactacaaaaaagtggagatgttctacgaaaaatgaaatatgctaacttgcattctgttcaatgatttgaaagtactagcaggtagcatgcagaaatccctaaccaggtggtgtcaattgaggataaatgggattaagtggtttcatggaagattggaacactatttaatggtggcatacagtgatctcgggtcaacagctcaaggtcctgaggatgttgttgctgaatactatcaacagcaagtggagatgcttgagggttttagtgagatggacacacttacagatcgtggtttccttcctggaatgtccaaggaagaacgagaaaaggttgccaggagtgaaacattagccatacggttgtctaactttgcaaatatggttctctttgctgcaaaagtgtatgcttcagtaaggagtggctcacttgctatcatcgcatcaactttggattctcttctagacttgttgtcaggatttatcttgtggtttactgccttttcaatgcaaacaccaaatccatacagatacccaattgggaaaaagcggatgcagccactgggaatacttgtttttgcttctgttatggcaacccttggccttcagataattctagaatcagtacgttcattggtgtctgatggagatgaattcagcttaacaagtgatcaagaaaagtggcttgtggacatcatgctctccgtgacattggtaaaacttgccctggttatatattgccgctccttcaccaacgaaattgtcaaagcatatgcacaagatcactttttcgatgtcatcacaaatgtaattggcctggttgctgcactacttgccaattacattgagggctggatcgatccgcttggtgcaatcgttctggcgatctacacgatcaggacatggtcgatgacggtgctggagaacgtgcactccctggtggggcagtcggcctcgccggagtacctccagaaactgacttacctgtgctggaaccaccacaaggccgtgcggcacatcgacacagtccgcgcctacacgttcggttcccactacttcgtggaggtggacatcgtgctgccgtcgaacatgcccctgcgggaggctcacgacatcggcgaggccctgcaggagaagctggagcgcctgccagagatcgagcgcgcgtttgtccacctcgactacgaattcacccaccgccccgagcacgccttgtcccacgagaaatagcatgctaggaccgaactgatgcagcaggcggaaggacacggcttcgtaatcgtaactgaaacaattttacttgtagccgcagaaagcttcttctgagacctgatgctcatctcgtcagtcgtcgcagcaaaccagttgggtacatgcgatgagactgaacgtaaaggagtgcttgctctctgcgatggtgtccttgtagcatcatggactacagaatctgattcctcctccaccaccaccacgacgacgacctattttatactggtcttcagctcattagtctaggtttgtttcgttatctttttgcatggagagaccgatgattgaggtatgtatttctgtaagataaattcatatcttgcttcaaaaagtcaaaactttttaaaatttgccagtacgtcgaaaatagttttgat

SEQ ID NO: 31490 - DNA, 1560 bp, Zea Mays
aaaagcttttttttctcggctagaatatgcaattccgatgctatattgtgggcaggaactaattaatggtaatttcacgactgcatttcttccaccaccatcaatttattacaccgggccgccacggaatatttcgcctccttggagaccagatgacaaggatggacactatgtttttgcggttggagagaatctcacaccaagatataggatacttaacaagatgggtgaagggacatttggtcaagttttggagtgctgggacttggaaaaccaagaagcagtggctatcaagattgtacgctcccttcagaaataccgagaggctgctatgatagaaattgatgtgctccagagacttgggaagcatgactttactggcagccgttgtgtgcaaatacggaactggtttgactatcgtaatcatatttgtatagtatttgagaagcttgggccaagcctatatgactttctgcgaaagaatagctaccgttcatttcctattgaccttgtccgagaatttgccagacaaatattagagtctgttgcatttatgcatgacttgcgacttattcacacggatctgaagccagaaaacattctccttgtttcatcagagtctatcagggtgcctgattataaggtttctatacgaccaccaaaggatggttctttctttaagaaccttccaaaatctagtgctatcaagctgattgattttgggagtacaactttcgagagccaagaccacaattatgtggtgtcgacaagacattatcgtgcaccagaagttatccttggtcttgggtggaactatccatgcgacttgtggagtgtgggttgcattttagttgagctttgttcgggggaagctctctttcaaacacatgaaaacttggagcatttggctatgatggagaaggtcttagggcctctcccaaagcatatgattgtcagagctgatcggcgtgctgaaaagtacttcaagcgcggagtaaggttggactggccagagggagcggcctcacgagagagcatgaaggcagtctggaaattgcctcgtctgcagaaccttgtgatgcaacatgttgatcattctgctggagatctaattgatcttcttcaaggacttcttcggtatgatcctaatgagcgcctgaaagcacatgaagctctacaacaccctttctttaccagatgcatcagaagatgtggtttctgaggctacactgagattgaaaatgtcaatgctgtatttcttcattttgatgtgtaagaactacaaaaaagtggagatgttctacgaaaaatgaaatatgctaacttgcattctgttcaatgatttgaaaggtagcatgcagaaatccctaaccaggtggtgtcaattgaggataaatgggattaagtggtttcatggaagattggaacactatttaatggtggcatacagtgatctcgggtcaacagaaccgtgaacgatgtaatgctgactaaggctgacctggggaccctataccagttgggatttggtaccgtttgaccacgtgattctggattcca

SEQ ID NO: 31491 - DNA, 1463 bp, Zea Mays
cttttttttctcggctagaatatgcaattccgatgctatattgtgggcaggaactaattaatggtaatttcacgactgcatttcttccaccaccatcaatttattacaccgggccgccacggaatatttcgcctccttggagaccagatgacaaggatggacactatgtttttgcggttggagagaatctcacaccaagatataggatacttaacaagatgggtgaagggacatttggtcaagttttggagtgctgggacttggaaaaccaagaagcagtggctatcaagattgtacgctcccttcagaaataccgagaggctgctatgatagaaattgatgtgctccagagacttgggaagcatgactttactggcagccgttgtgtgcaaatacggaactggtttgactatcgtaatcatatttgtatagtatttgagaagcttgggccaagcctatatgactttctgcgaaagaatagctaccgttcatttcctattgaccttgtccgagaatttgccagacaaatattagagtctgttgcatttatgcatgacttgcgacttattcacacggatctgaagccagaaaacattctccttgtttcatcagagtctatcagggtgcctgattataagggggaagctctctttcaaacacatgaaaacttggagcatttggctatgatggagaaggtcttagggcctctcccaaagcatatgattgtcagagctgatcggcgtgctgaaaagtacttcaagcgcggagtaaggttggactggccagagggagcggcctcacgagagagcatgaaggcagtctggaaattgcctcgtctgcagaaccttgtgatgcaacatgttgatcattctgctggagatctaattgatcttcttcaaggacttcttcggtatgatcctaatgagcgcctgaaagcacatgaagctctacaacaccctttctttaccagatgcatcagaagatgtggtttctgaggctacactgagattgaaaatgtcaatgctgtatttcttcattttgatgtgtaagaactacaaaaaagtggagatgttctacgaaaaatgaaatatgctaacttgcattctgttcaatgatttgaaaggtaattggtgtatataagcagagttctctgacactcgatccattttaactggatgtcattttccaattgatacaaattcctgtcttccccattcgtatactaattttgccagactcttcagtactagcaggtagcatgcagaaatccctaaccaggtggtgtcaattgaggataaatgggattaagtggtttcatggaagattggaacactatttaatggtggcatacagtgatctcgggtcaacagaaccgtgaacgatgtaatgctgactaaggctgacctggggaccctataccagttgggatttggtaccgtttgaccacgtgattctggattcca

SEQ ID NO: 31492 - DNA, 1551 bp, Zea Mays
cccagcatgaatgtctatgccatctttccgttagtacaattttagctttggggttctgcaaattccactcctgcctatttgaggaaaggcagtctccatcacgtgagctcaaggtcctgaggatgttgttgctgaatactatcaacagcaagtggagatgcttgagggttttagtgagatggacacacttacagatcgtggtttccttcctggaatgtccaaggaagaacgagaaaaggttgccaggagtgaaacattagccatacggttgtctaactttgcaaatatggttctctttgctgcaaaagtgtatgcttcagtaaggagtggctcacttgctatcatcgcatcaactttggattctcttctagacttgttgtcaggatttatcttgtggtttactgccttttcaatgcaaacaccaaatccatacagatacccaattgggaaaaagcggatgcagccactgggaatacttgtttttgcttctgttatggcaacccttggccttcagataattctagaatcagtacgttcattggtgtctgatggagatgaattcagcttaacaagtgatcaagaaaagtggcttgtggacatcatgctctccgtgacattggtaaaacttgccctggttatatattgccgctccttcaccaacgaaattgtcaaagcatatgcacaagatcactttttcgatgtcatcacaaatgtaattggcctggttgctgcactacttgccaattacattgagggctggatcgatccgcttggtgcaatcgttctggcgatctacacgatcaggacatggtcgatgacggtgctggagaacgtgcactccctggtggggcagtcggcctcgccggagtacctccagaaactgacttacctgtgctggaaccaccacaaggccgtgcggcacatcgacacagtccgcgcctacacgttcggttcccactacttcgtggaggtggacatcgtgctgccgtcgaacatgcccctgcgggaggctcacgacatcggcgaggccctgcaggagaagctggagcgcctgccagagatcgagcgcgcgtttgtccacctcgactacgaattcacccaccgccccgagcacgccttgtcccacgagaaatagcatgctaggaccgaactgatgcagcaggcggaaggacacggcttcgtaatcgtaactgaaacaattttacttgtagccgcagaaagcttcttctgagacctgatgctcatctcgtcagtcgtcgcagcaaaccagttgggtacatgcgatgagactgaacgtaaaggagtgcttgctctctgcgatggtgtccttgtagcatcatggactacagaatctgattcctcctccaccaccaccacgacgacgacctattttatactggtcttcagctcattagtctaggtttgtttcgttatctttttgcatggagagaccgatgattgaggtatgtatttctgtaagataaattcatatcttgcttcaaaaagtcaaaactttttaaaatttgccagtacgtcgaaaatagttttgat

SEQ ID NO: 31493 - DNA, 1356 bp, Zea Mays
atattatgtatgaacgacattagtgaaggaagaacgagaaaaggttgccaggagtgaaacattagccatacggttgtctaactttgcaaatatggttctctttgctgcaaaagtgtatgcttcagtaaggagtggctcacttgctatcatcgcatcaactttggattctcttctagacttgttgtcaggatttatcttgtggtttactgccttttcaatgcaaacaccaaatccatacagatacccaattgggaaaaagcggatgcagccactgggaatacttgtttttgcttctgttatggcaacccttggccttcagataattctagaatcagtacgttcattggtgtctgatggagatgaattcagcttaacaagtgatcaagaaaagtggcttgtggacatcatgctctccgtgacattggtaaaacttgccctggttatatattgccgctccttcaccaacgaaattgtcaaagcatatgcacaagatcactttttcgatgtcatcacaaatgtaattggcctggttgctgcactacttgccaattacattgagggctggatcgatccgcttggtgcaatcgttctggcgatctacacgatcaggacatggtcgatgacggtgctggagaacgtgcactccctggtggggcagtcggcctcgccggagtacctccagaaactgacttacctgtgctggaaccaccacaaggccgtgcggcacatcgacacagtccgcgcctacacgttcggttcccactacttcgtggaggtggacatcgtgctgccgtcgaacatgcccctgcgggaggctcacgacatcggcgaggccctgcaggagaagctggagcgcctgccagagatcgagcgcgcgtttgtccacctcgactacgaattcacccaccgccccgagcacgccttgtcccacgagaaatagcatgctaggaccgaactgatgcagcaggcggaaggacacggcttcgtaatcgtaactgaaacaattttacttgtagccgcagaaagcttcttctgagacctgatgctcatctcgtcagtcgtcgcagcaaaccagttgggtacatgcgatgagactgaacgtaaaggagtgcttgctctctgcgatggtgtccttgtagcatcatggactacagaatctgattcctcctccaccaccaccacgacgacgacctattttatactggtcttcagctcattagtctaggtttgtttcgttatctttttgcatggagagaccgatgattgaggtatgtatttctgtaagataaattcatatcttgcttcaaaaagtcaaaactttttaaaatttgccagtacgtcgaaaatagttttgat

SEQ ID NO: 31494 - DNA, 1322 bp, Zea Mays
gggaaggggagttattacctgatccaagttcttctcgatatcaaggctgaccatcaggagctcatggcaagttttcagggggagctttcctctgtatatatacggattggaacgaacctgtgcataaaatcaggaagaaaaaactcgtagtatagtattacatatcaactcaagtatgtaattatgtaacctatgcaaactgctaatcaatggaccagttcatgactttgtcaatgatatcaggtgtgggtatgaccttccaaccaggcgcaacagcacaaaccatcgtcagagcgctgaccacgatcgggtgaggcctcatgtcatcagagatctgatgatatcaatcatatgatcacgaaacaggaactgtcagatcaaccacagcaataaaaggctcgactcgagaaggaagctgaaaggaagcatgccatctcgatcttgctctgtccccagaccttgcacatcggagcgagcaagatggcgccgtcccagtagcccggtgccttccggtggaggagaagggccacgcttccgcccatggagatgccatgcttgtgaaatgactggagcaatccgcgacgatgttgccgaagtttggcacgtagcacctgctcccagatgatctgccgtgtccctcgtgatctatcccgtaaacgccatatcctgcccgcaccaatcgagccgccgtgtctggatatttgtgcagcttctcagtgtttagtatactatgtttcattcatctttctcatccaaccatagtaatcaaatcagcagttttttagaggatggcggcgttctttcttacccctcatcgatatgctgcactccgctgcaattcctgcagaagataaatcgagagcgatagtagtgaccggtatgcttgttgtttttttttctgctggcaaacacactggttgaagtgagatgagggagagagtgtgcatcatcgatcggtaccgtgacagatgaagatcagagcttttggctggcgatcctgctgtggtgtccagctgcaaacgaacagcttgttgccccggggattcacgacaaactcctgcgtgtgggaaagtgtgaagatctcagcagagcaaagcgaccacgactacaactagagtgctatggcaaaaagagccgacctcttcgtagttaacatcctcgctttggcgatcctacaaacaacaggtaacagaatcaagacttgaagacgaaccataagatgtagaggtcatgtgataccaagttgttcgagtaggatatgatgctcctgaacataccatggctatgcccttcggaatggctttacaaccagtgaactcaac

SEQ ID NO: 31495 - DNA, 2221 bp, Zea Mays
cgaaaatgccaaaggagacgttaccgtctcggtcttctcctcctcccccacccggccacccgctctttcctcgcgccttcctccttgacgccgccgccgcggccgctcactcacattaaagcgcgccttcgcccaaaccctacctcggaaaccctttcacgccacggggccccaactgcgcctgtcgcaatgtcgctcgagatccacgaggaggatggtggggcgtctggtgcacgttcggcgacgaaggtgatgtctgtttccgggagcgggaagcgggggcggtacgtgcggcaggtgacggggcggcacaacgacaccgacctccacgtggccgcgcggggcggggacgccgcggcgctgcggcgcgcgctgttggacgccgcggcggccgtggctgccacgggggaggcgccagaggacctcgaggcggcgcggcgtgcggtggccgcggagcccaacgaggccggggagaccccgctcgtcgccgcggcggagaggggccacctcggggtggttgtggagctgctccggcacctcgacgcggagggactggccgccaagaacaggtcgggctacgacgcactgcacgtcgccgccagagaagggcgtcatgctgttgtgcaggaaatgttaaatcatgataggatgcttgccaaaacatctggccctgcaaatactactccacttatatcagcagctatgagaggccatattgaagttgttgaacttttgctggaacaagatgactttggattggtggaaatggccagagataatggaaagaatgccttacattttgctgctcgacagggacatactggaatcgtcaaagcgctacttgagaaggatcctcagttagcaagaagaaatgacaagaaaggtcaaacagctcttcatatggccgtaaagggaacaagctgtgatgttcttagagccctagtggatgctgatccagcaattgtaatgctgccagataaaaatggcaacacggctttgcatgttgcaacaagaaaaaagagagcagagttagtgttcttttgcggctaccagatactcatgtcaatgcactaaccagagaccacaagactgcctttgatatagctgaagggttaccagtatgtgaggagtcttgcgaaattaaggatattttatctcaacatggtgcgctcagatccagggagctcaatcagccacgagatgagctacggaagacagtgacagagataaagaaagatgtccacacacagctggaacaaacaagaaaaaccaacaaaaatgttcatggcattgctaaagaactcaggaagttgcacagagaaggcatcaacaacgctacaaactctgtaactgttgttgctgtgctgttcgcaacagttgcttttgcagctatattcaccgtacctggtggaaatgacaataatggacttgcagttgttgtccagactacgtcctttaagatattcttcatcttcaatgctgtggctctatttacatcattggcagtggtcgtagttcaaataacagttgtcaggggagaaaccaagtctgagcgaagggttgttgaggtgatcaacaagcttatgtggatagcatcggtttgtactacaatatctttcattgcctcgtgctatattgtgctaggccgccatttccagtgggcagcaatattggtatctttgataggtggtgtcacaatggccggtgtacttggtactatgacatactatgtggtgaaatcaaagcgccaaaggaagattagaaaaaaggagaagatgtcaagaagaagtggctcaagttcttggtatgacaataccgagctctcagatactgaacttaatccagtatatgccttgtaaagagtgtttgtctcaggaatcgagtatgtactaacagatacaatagcttacattatttgttgattgttcaatttctccagttccagtaacaacaaaaccacacagaactttcccattgtgcaaggctcttgcagttgatgaatttgatggcagccaatgtgctcaatctgttgtacatgtgagttacaatttttttttctttctgagagtcacttctgtgctttatcttcaggattgctcgtattgtaaagctcaagccaagggctgattttagatacttaatccttaaagtacttcaagttatgtgcaactccttttttactgattgcgtgagaagcaatgccatggtcattcaatatgcg

SEQ ID NO: 31496 - DNA, 2203 bp, Zea Mays
aaggagacgttaccgtctcggtcttctcctcctcccccacccggccacccgctctttcctcgcgccttcctccttgacgccgccgccgcggccgctcactcacattaaagcgcgccttcgcccaaaccctacctcggaaaccctttcacgccacggggccccaactgcgcctgtcgcaatgtcgctcgagatccacgaggaggatggtggggcgtctggtgcacgttcggcgacgaaggtgatgtctgtttccgggagcgggaagcgggggcggtacgtgcggcaggtgacggggcggcacaacgacaccgacctccacgtggccgcgcggggcggggacgccgcggcgctgcggcgcgcgctgttggacgccgcggcggccgtggctgccacgggggaggcgccagaggacctcgaggcggcgcggcgtgcggtggccgcggagcccaacgaggccggggagaccccgctcgtcgccgcggcggagaggggccacctcggggtggttgtggagctgctccggcacctcgacgcggagggactggccgccaagaacaggtcgggctacgacgcactgcacgtcgccgccagagaagggcgtcatggaaatgttaaatcatgataggatgcttgccaaaacatctggccctgcaaatactactccacttatatcagcagctatgagaggccatattgaagttgttgaacttttgctggaacaagatgactttggattggtggaaatggccagagataatggaaagaatgccttacattttgctgctcgacagggacatactggaatcgtcaaagcgctacttgagaaggatcctcagttagcaagaagaaatgacaagaaaggtcaaacagctcttcatatggccgtaaagggaacaagctgtgatgttcttagagccctagtggatgctgatccagcaattgtaatgctgccagataaaaatggcaacacggctttgcatgttgcaacaagaaaaaagagagcagagatagttagtgttcttttgcggctaccagatactcatgtcaatgcactaaccagagaccacaagactgcctttgatatagctgaagggttaccagtatgtgaggagtcttgcgaaattaaggatattttatctcaacatggtgcgctcagatccagggagctcaatcagccacgagatgagctacggaagacagtgacagagataaagaaagatgtccacacacagctggaacaaacaagaaaaaccaacaaaaatgttcatggcattgctaaagaactcaggaagttgcacagagaaggcatcaacaacgctacaaactctgtaactgttgttgctgtgctgttcgcaacagttgcttttgcagctatattcaccgtacctggtggaaatgacaataatggacttgcagttgttgtccagactacgtcctttaagatattcttcatcttcaatgctgtggctctatttacatcattggcagtggtcgtagttcaaataacagttgtcaggggagaaaccaagtctgagcgaagggttgttgaggtgatcaacaagcttatgtggatagcatcggtttgtactacaatatctttcattgcctcgtgctatattgtgctaggccgccatttccagtgggcagcaatattggtatctttgataggtggtgtcacaatggccggtgtacttggtactatgacatactatgtggtgaaatcaaagcgccaaaggaagattagaaaaaaggagaagatgtcaagaagaagtggctcaagttcttggtatgacaataccgagctctcagatactgaacttaatccagtatatgccttgtaaagagtgtttgtctcaggaatcgagtatgtactaacagatacaatagcttacattatttgttgattgttcaatttctccagttccagtaacaacaaaaccacacagaactttcccattgtgcaaggctcttgcagttgatgaatttgatggcagccaatgtgctcaatctgttgtacatgtgagttacaatttttttttctttctgagagtcacttctgtgctttatcttcaggattgctcgtattgtaaagctcaagccaagggctgattttagatacttaatccttaaagtacttcaagttatgtgcaactccttttttactgattgcgtgagaagcaatgccatggtcattcaatatgcg

SEQ ID NO: 31497 - DNA, 1895 bp, Zea Mays
gggcccctcaccctaatcccaaagccgagaagaattcacccccgtcccgtccgtccggctaattcgctcacctctgctccgcctccccccatctccccacagatctcgccgcgatgggcctcgccgccgccgccgccgcccgcgcggtcctcctcctcctcgccgtatccggggtcctcctcagtcctgcggcggcggagatcaagcaggagtccttcaaggacgactcccgcggctccatcctcttcgagaagttcggcttcggcctccacggcatgccggcgcccacggatctgaaccccaacccggaatcctcccccacgtgcgtcctcgccagcccctacgtcaggcctctcttcaccttcgcagaggtcgacgacaacggctaccacaaccagactttccccatcacccaccccgacgagtacagcctcttcttcgccaactgcgcgccggagaccagcgtcagcatggaggtccgcaccgacatgtacaacaccaacccggacggcaccagggactacctctccgtcggcatggcctctgtcccaacgatctacgccttcttcgccgtctgctatgtcgtgttcctggccgggtggctctacgtcaccctccaccgcaaccgcctctccgcgcaccgcatccaccacctcatgtcgggtctgctcgtcgcgcggatgctctattgcatctcggcggccgaggaccagcactacatccgcacggccgggacaccgcatgggacaaggagaagaaagtgctcatggtggtgatccctctgcaggttgcagctaacatcgctgctgctgtggtcggcgagactggtcctttcttgcagggatgggtgacatggaaccagatcttcttgtttgttgatgtcgcttgctgctgtgctgtgctcttcccagtggtgtggtcgatgcgcgctctgcgggagtcatccaagacagacggcaaggcagccagaacccttgccaagctcatgctcttccgccagttctatgttgccgttattggatacctctacttcaccaggatcattgtgtatgccctcaagacaattactaactacaagtacagatgggtcagcgttgcagcggaggaggtggccaccatggcattctacatgttcatgttctacatgttcaggccagctgagaggaaccagtacttcgcacttgacgaggatgatgaggaagccgcagagatggcgctccgtgaggaggagtttgagctctagacgaccacgtggatgacatgggaatgcagccatctcccattcattttctcctcgatgtgatgttgattatactatacagattcagggtttagctaatatatgtctacgtattgtggtaaatcttctccaactccttttagttttggaagctgccaacgagacttgtgatgactagatttcttgtgttgcaaaagtaaaggggaattaaatcaatgttgccattttgtcaagtcttgggttcagttctttccttctcactgttatattttcactatgaatggatgattttatttgtgtggggactgggaatggcatcgataagcatcgtgttgccgtgtcctttctgaatttcagatggttgttgggatctagacgtgcaagcggacacctttccagaaatctggcgttcttgttcctgcgtcactctctggcagcttgagtggctggaagccaaacgagccacccagccacctacaggtcttaattcatctgggctcgaggaacaggtgtacgcacgcgtgtgtgtggttctgtacaaagctatttggtgatcatcaggttcagttattatagtgtgggctagtgattttcagttttatgtagtttatcctgtttcttgatacgagtaattgtctaattgataaccctggcg

SEQ ID NO: 31498 - DNA, 1921 bp, Zea Mays
gggcccctcaccctaatcccaaagccgagaagaattcacccccgtcccgtccgtccggctaattcgctcacctctgctccgcctccccccatctccccacagatctcgccgcgatgggcctcgccgccgccgccgccgcccgcgcggtcctcctcctcctcgccgtatccggggtcctcctcagtcctgcggcggcggagatcaagcaggagtccttcaaggacgactcccgcggctccatcctcttcgagaagttcggcttcggcctccacggcatggtgtctatctccgtcaccggcgccaaccggcgcccacggatctgaaccccaacccggaatcctcccccacgtgcgtcctcgccagcccctacgtcaggcctctcttcaccttcgcagaggtcgacgacaacggctaccacaaccagactttccccatcacccaccccgacgagtacagcctcttcttcgccaactgcgcgccggagaccagcgtcagcatggaggtccgcaccgacatgtacaacaccaacccggacggcaccagggactacctctccgtcggcatggcctctgtcccaacgatctacgccttcttcgccgtctgctatgtcgtgttcctggccgggtggctctacgtcaccctccaccgcaaccgcctctccgcgcaccgcatccaccacctcatgtcgggtctgctcgtcgcgcggatgctctattgcatctcggcggccgaggaccagcactacatccgcacggccgggacaccgcatgggacaaggagaagaaagtgctcatggtggtgatccctctgcaggttgcagctaacatcgctgctgctgtggtcggcgagactggtcctttcttgcagggatgggtgacatggaaccagatcttcttgtttgttgatgtcgcttgctgctgtgctgtgctcttcccagtggtgtggtcgatgcgcgctctgcgggagtcatccaagacagacggcaaggcagccagaacccttgccaagctcatgctcttccgccagttctatgttgccgttattggatacctctacttcaccaggatcattgtgtatgccctcaagacaattactaactacaagtacagatgggtcagcgttgcagcggaggaggtggccaccatggcattctacatgttcatgttctacatgttcaggccagctgagaggaaccagtacttcgcacttgacgaggatgatgaggaagccgcagagatggcgctccgtgaggaggagtttgagctctagacgaccacgtggatgacatgggaatgcagccatctcccattcattttctcctcgatgtgatgttgattatactatacagattcagggtttagctaatatatgtctacgtattgtggtaaatcttctccaactccttttagttttggaagctgccaacgagacttgtgatgactagatttcttgtgttgcaaaagtaaaggggaattaaatcaatgttgccattttgtcaagtcttgggttcagttctttccttctcactgttatattttcactatgaatggatgattttatttgtgtggggactgggaatggcatcgataagcatcgtgttgccgtgtcctttctgaatttcagatggttgttgggatctagacgtgcaagcggacacctttccagaaatctggcgttcttgttcctgcgtcactctctggcagcttgagtggctggaagccaaacgagccacccagccacctacaggtcttaattcatctgggctcgaggaacaggtgtacgcacgcgtgtgtgtggttctgtacaaagctatttggtgatcatcaggttcagttattatagtgtgggctagtgattttcagttttatgtagtttatcctgtttcttgatacgagtaattgtctaattgataaccctggcg

SEQ ID NO: 31499 - DNA, 1622 bp, Zea Mays
ccctaatcccaaagccgagaagaattcacccccgtcccgtccgtccggctaattcgctcacctctgctccgcctccccccatctccccacagatctcgccgcgatgggcctcgccgccgccgccgccgcccgcgcggtcctcctcctcctcgccgtatccggggtcctcctcagtcctgcggcggcggagatcaagcaggagtccttcaaggacgactcccgcggctccatcctcttcgagaagttcggcttcggcctccacggcatggtgtctatctccgtcaccggcgccaagtactcctccaagctcgctaagcccgaccccgcgcagctcggcttcttcctcctctctgacgagtcgctcttcgaggccatctacgatcagccggcgcccacggatctgaaccccaacccggaatcctcccccacgtgcgtcctcgccagcccctacgtcaggcctctcttcaccttcgcagaggtcgacgacaacggctaccacaaccagactttccccatcacccaccccgacgagtacagcctcttcttcgccaactgcgcgccggagaccagcgtcagcatggaggtccgcaccgacatgtacaacaccaacccggacggcaccagggactacctctccgtcggcatggcctctgtcccaacgatctacgccttcttcgccgtctgctatgtcgtgttcctggccgggtggctctacgtcaccctccaccgcaaccgcctctccgcgcaccgcatccaccacctcatgtcgggtctgctcgtcgcgcggatgctctattgcatctcggcggccgaggaccagcactacatccgcacggccgggacaccgcatgggtgggatgtcatgttctacctgttccagctcgtgaagggtgtcatcttgttcgctgtcattgcgctgattgggaccgggtggtcgttcctgaagccattcctgcaggacaaggagaagaaagtgctcatggtggtgatccctctgcaggttgcagctaacatcgctgctgctgtggtcggcgagactggtcctttcttgcagggatgggtgacatggaaccagatcttcttgtttgttgatgtcgcttgctgctgtgctgtgctcttcccagtggtgtggtcgatgcgcgctctgcgggagtcatccaagacagacggcaaggcagccagaacccttgccaagctcatgctcttccgccagttctatgttgccgttattggatacctctacttcaccaggatcattgtgtatgccctcaagacaattactaactacaagtacagatgggtcagcgttgcagcggaggaggtggccaccatggcattctacatgttcatgttctacatgttcaggccagctgagaggaaccagtacttcgcacttgacgaggatgatgaggaagccgcagagatggcgctccgtgaggaggagtttgagctctagacgaccacgtggatgacatgggaatgcagccatctcccattcattttctcctcgatgtgatgttgattatactatacagattcagggtttagctaatatatgtctacgtattgtgatggttgttgggatctagacgtgcaagcggacacctttccagaaatctggc

SEQ ID NO: 31500 - DNA, 1992 bp, Zea Mays
ccctaatcccaaagccgagaagaattcacccccgtcccgtccgtccggctaattcgctcacctctgctccgcctccccccatctccccacagatctcgccgcgatgggcctcgccgccgccgccgccgcccgcgcggtcctcctcctcctcgccgtatccggggtcctcctcagtcctgcggcggcggagatcaagcaggagtccttcaaggacgactcccgcggctccatcctcttcgagaagttcggcttcggcctccacggcatggtgtctatctccgtcaccggcgccaagtactcctccaagctcgctaagcccgaccccgcgcagctcggcttcttcctcctctctgacgagtcgctcttcgaggccatctacgatcagccggcgcccacggatctgaaccccaacccggaatcctcccccacgtgcgtcctcgccagcccctacgtcaggcctctcttcaccttcgcagaggtcgacgacaacggctaccacaaccagactttccccatcacccaccccgacgagtacagcctcttcttcgccaactgcgcgccggagaccagcgtcagcatggaggtccgcaccgacatgtacaacaccaacccggacggcaccagggactacctctccgtcggcatggcctctgtcccaacgatctacgccttcttcgccgtctgctatgtcgtgttcctggccgggtggctctacgtcaccctccaccgcaaccgcctctccgcgcaccgcatccaccacctcatgtcgggtctgctcgtcgcgcggatgctctattgcatctcggcggccgaggaccagcactacatccgcacggccgggacaccgcatgggtgggatgtcatgttctacctgttccagctcgtgaagggtgtcatcttgttcgctgtcattgcgctgattgggaccgggtggtcgttcctgaagccattcctgcaggacaaggagaagaaagtgctcatggtggtgatccctctgcaggttgcagctaacatcgctgctgctgtggtcggcgagactggtcctttcttgcagggatgggtgacatggaaccagatcttcttgtttgttgatgtcgcttgctgctgtgctgtgctcttcccagtggtgtggtcgatgcgcgctctgcgggagtcatccaagacagacggcaaggcagccagaacccttgccaagctcatgctcttccgccagttctatgttgccgttattggatacctctacttcaccaggatcattgtgtatgccctcaagacaattactaactacaagtacagatgggtcagcgttgcagcggaggaggtggccaccatggcattctacatgttcatgttctacatgttcaggccagctgagaggaaccagtacttcgcacttgacgaggatgatgaggaagccgcagagatggcgctccgtgaggaggagtttgagctctagacgaccacgtggatgacatgggaatgcagccatctcccattcattttctcctcgatgtgatgttgattatactatacagattcagggtttagctaatatatgtctacgtattgtggtaaatcttctccaactccttttagttttggaagctgccaacgagacttgtgatgactagatttcttgtgttgcaaaagtaaaggggaattaaatcaatgttgccattttgtcaagtcttgggttcagttctttccttctcactgttatattttcactatgaatggatgattttatttgtgtggggactgggaatggcatcgataagcatcgtgttgccgtgtcctttctgaatttcagatggttgttgggatctagacgtgcaagcggacacctttccagaaatctggcgttcttgttcctgcgtcactctctggcagcttgagtggctggaagccaaacgagccacccagccacctacagacgttgggcccctcttatttctgggcccccggcggcatggcattagggccggccttgag

SEQ ID NO: 31501 - DNA, 1538 bp, Zea Mays
attcacccccgtcccgtccgtccggctaattcgctcacctctgctccgcctccccccatctccccacagatctcgccgcgatgggcctcgccgccgccgccgccgcccgcgcggtcctcctcctcctcgccgtatccggggtcctcctcagtcctgcggcggcggagatcaagcaggagtccttcaaggacgactcccgcggctccatcctcttcgagaagttcggcttcggcctccacggcatggtgtctatctccgtcaccggcgccaagtactcctccaagctcgctaagcccgaccccgcgcagctcggcttcttcctcctctctgacgagtcgctcttcgaggccatctacgatcagccggcgcccacggatctgaaccccaacccggaatcctcccccacgtgcgtcctcgccagcccctacgtcaggcctctcttcaccttcgcagaggtcgacgacaacggctaccacaaccagactttccccatcacccaccccgacgagtacagcctcttcttcgccaactgcgcgccggagaccagcgtcagcatggaggtccgcaccgacatgtacaacaccaacccggacggcaccagggactacctctccgtcggcatggcctctgtcccaacgatctacgccttcttcgccgtctgctatgtcgtgttcctggccgggtggctctacgtcaccctccaccgcaaccgcctctccgcgcaccgcatccaccacctcatgtcgggtctgctcgtcgcgcggatgctctattgcatctcggcggccgaggaccagcactacatccgcacggccgggacaccgcatgggtgggatgtcatgttctacctgttccagctcgtgaagggtgtcatcttgttcgctgtcattgcgctgattgggaccgggtggtcgttcctgaagccattcctgcaggacaaggagaagaaagtgctcatggtggtgatccctctgcaggttgcagctaacatcgctgctgctgtggtcggcgagactggtcctttcttgcagggatgggtgacatggaaccagatcttcttgtttgttgatgtcgcttgctgctgtgctgtgctcttcccaatggcgctccgtgaggaggagtttgagctctagacgaccacgtggatgacatgggaatgcagccatctcccattcattttctcctcgatgtgatgttgattatactatacagattcagggtttagctaatatatgtctacgtattgtggtaaatcttctccaactccttttagttttggaagctgccaacgagacttgtgatgactagatttcttgtgttgcaaaagtaaaggggaattaaatcaatgttgccattttgtcaagtcttgggttcagttctttccttctcactgttatattttcactatgaatggatgattttatttgtgtggggactgggaatggcatcgataagcatcgtgttgccgtgtcctttctgaatttcagatggttgttgggatctagacgtgcaagcggacacctttccagaaatctggc

SEQ ID NO: 31502 - DNA, 1222 bp, Zea Mays
cgatggcggagaccgtgcttctccacgtcgcgcccacggatctcctcgcgcttgccgacccatgcgggcccaccgcaccggcgtcctcttccacgcgccgtcctggccagaggaggaaggggaggagcgcgtgtgggccacaaccacaaatcccatccctcttccttctcaaacaccatcgccgtcaccgtgtcatcgcgggccgaagtcctctctcctccatctcaagcgatggcatgaggtggatctgtagcacgtaccaggacgcggtcgacgacgagctagggtgcgcgtccccgcccgtctcccccaccgaggcgctggactgccacgcttctgttgccactggacgtttgcgccgccatcgcccgtgagcagctccgacgacctcatcgtcgcgttgcacctgctcttgtgccgcagctcgggttaccgtcggtgcccacgccgaggaaggcacgaaccacgccgagcagcccgaggcgtgatgccacctctgatgtcgcgcatgatgagctgcttcgcctctagcgccgccttgttccttcacggtctcaccttgttaatgttgacttgccccgccgtcaaaccaagacggtgtatgaacttgggcttccaggatctgtaatacaaggtaaatccggtaccttttgtgacctcttctgtatttctaggcctctgtataatagttgtggacaaaacctgtaaacatgctggacaaactggagcaactattgaaatgtagatgtatggtgaaagagttgacgcctaggatcaatggctaccttgtttcatttcaagaatgcatgtccaccaggattttatctgctcatttgaacaaaattcgtgtcaaagcacgataggtacttcatgatatttccttgatttgcacagtgattcagtgagcttttaaggatatgaatgcagcagcctacaagaattctatatttatttactactataaagagcgggagcaaaatatagctatacagttgatgtatatttagcatatgaaacaatgctgaagatacttaattaattgcatactatagttaggctgtaatgataatgttgcctcacaatgttatgacattagccaatctataaatttgataatttttgttgcttcaactgcaactactactatgttgaagtgtttttcattaactctgctttgaaagtgttttttgcttcattctttgacatatctatatgactatat

SEQ ID NO: 31503 - DNA, 1936 bp, Zea Mays
cgatggcggagaccgtgcttctccacgtcgcgcccacggatctcctcgcgcttgccgacccatgcgggcccaccgcaccggcgtcctcttccacgcgccgtcctggccagaggaggaaggggaggagcgcgtgtgggccacaaccacaaatcccatccctcttccttctcaaacaccatcgccgtcaccgtgtcatcgcgggccgaagtcctctctcctccatctcaagcgatggcatgaggtggatctgtagcacgtaccaggacgcggtcgacgacgagctagggtgcgcgtccccgcccgtctcccccaccgaggcgctggactgccacgcttctgttgccactggacgtttgcgccgccatcgcccgtgagcagctccgacgacctcatcgtcgcgttgcacctgctcttgtgccgcagctcgggttaccgtcggtgcccacgccgaggaaggcacgaaccacgccgagcagcccgaggcgtgatgccacctctgatgtcgcgcatgatgagctgcttcgcctctagcgccgccttgttccttcacggtctcaccttgttaatgttgacttgccccgccgtcaaaccaagacggtgtatgaacttgggcttccaggatctgtaatacaagcatcttctactccgcagctaagcttggaagagttacagtctcatataaaataggtaattttgtactaattgttttttattttccaaaaggtgtgccacttgcattagtatttttccagtgcagacgattaaaaactactgttttacatcacctctctatcataggaatagtttactaccctaatgcttattctattaacattgacaaaaagatatatcacttgaagacaggtatgtatttcaatcttctagatttatatttctttctttacatatataaaataggtaagtttgtaccatttgttttctttttaaaaagagaaaaggtacgacacttacgttagtatttttcccatccgaaaactattgtttcccgtcacttctctgtcataggaagtgtttcccgtcataggaagaatttactgtcctaatgctcatcctgttggctctgacaaaaaaatatctcactttaaaataggtacatatttcaatcttaattctagccttatgtttggctctttacatagtggtttcattttttctccccttgctctcatcatatgaacatttttactccattgattgttctatttactttaaaatcgtgccataaaatatatgttttactattaaaaaattatatcccttcacttatgtattagttatagaattacaattattttttattttcctaaaagtttagaaatgttttaggcgaaccatggatctttatgtttgtgataatgtgtgtatctatccggctacactattcaagtctcttgccattaagtgtttataaaatatgttgcgttgttcttaccttgatatgtggtaaggtcttcttacctcttgattatctatgtatgccttaattcatatactccgaaataatctttactgttagctatgaacagtggcggaggagccattatggcttagacgcttagtatggcaccagccatacctaaatttttaagatgtttatctttttttattatgaacaaagaagaaagtgtgttgtcgtggatgtgctggtttgattcaagtggcatgtcctgagttcaatttacatttcctgcattctctattttttcaaccatacctcattttttatttgtcctccgctattggctatgaattttttatcaaaactatcttcaagtgcaagtgcatctaacatcaattcattcaaacattttgttaaagaagaaaatgacgtctaatcttctctttatgtacatcgcgcgcaggacgcgcgtcatacactagttatagatttagtacgtgttatatgccggttatg

SEQ ID NO: 31504 - DNA, 2879 bp, Zea Mays
gtcggcacccgactcctaagctagaatcgcactccactccactccactctccagtcctcactcccacacccgtacgcttcgcggcgcgtcacttttgccagccatacgccagcctgagcgcccgacgtcgcgggattcgccgggaacgcccacaccaccggccgcagccgaccaggcagacgagtagggtggtggtggtggtagcggtagcgcgggggcggggcggcgctgcgtgaccgacgccacgggagatgaaggccaaggccctccctttcatcgccttcgagcacaagcgagacgcctatggcttcgccgtgcggccacaacacctgcagcggtacagagagtatgcgaacatctataaggaggaggaagaggagaggtccgacagatggaagaattttctggatcggcaggctgaggatggagaatcatctggagaggatgccaaggttgcgccatccaacgaggaagatggagttgctgccaaggatggcaggacagagccaagaccacataaaatccaaatatggtctgaaatcaggccctctttgggccatattaaggagatgatgaactcacgcgtgaaaaagcaatcttcttctgttaatgacgggtacacgagggatgaaccacaccctggtaattctgaagggagcaagccatcggaggattcagatgatgagttctatgatgtagagaaggttgatcctagccaagaagtgcctgcaactgacatagccaatgctgagtcaggtacaaatagaggtgcagaacaagaacattatccttggaaagaagaattagaatgcttagtccgtgatgggcttccaatggccctgagaggagagctgtggcaagcttttattggtattggagctcgtcgggtcgaagggtactatgagggcctccttgcagcggacagtgaaagtcaagacaacaaatatccgggatctccaacttcggaatgtggtgacggaaaaccaaaaccatctcaaacattttcttctgaaaaatggaaagggcaaatagagaaggatttgcctagaacatttccaggacaccctgcactagatgaggatggcagaaatgccttaaggcgcttgctcacagcttatgctcgacacaatccaccagttggttactgccaggcaatgaacttctttgctggcttgctacttctgctgatgccagaagagaatgcattttgggcattgacaggcattatggatgactattttgatggttacttctctgaagaaatgatcgaatctcaggtggatcagcttgttttagaggagttagtccgagggagattcccaaagttagtaaatcatcttgattaccttggtgtacaagttgcatgggtcactggtccatggttcctatctatttttatgaacatgcttccctgggaaagtgtgcttcgtgtgtgggatgttcttctctttgagggaaaccgtgtgatgctgttccggacagctcttgcactgatggagttgtatggtcctgcacttgtgacaacaaaagatgctggggatgcagtaacccttttgcagtctttagctggttccacttttgacagtagccagcttgttttaacagcttgcatgggatatcaagctgtaggtgaagcaagactgcaagaattgagaaataaacaccgaccatctgttatctcctcaatggaacagagagcaaaaggtcttcgtgtctggagggatacgaacaggcttgcatctaggctatataattttaagcgtgacactgaaccattggtgtcgttatcagaagaacagtcaaatgacttgacagatggcgataagaaccaagaagccaattgtagtaatgtggatgatatgtatcatggcctcactgtcaactctgagattgattctctgcctgatcctaaagaccaggtagtctggctgaagggtgagctgtgccaactgctagaggagagaagatccgctgttctgagggctgatgaattagagacagcacttatggagatggttaagcaagataacagacgcgaattaagtgcaaaggtcgagcaattggaacaagagttatctgagcttaggcaagctctatcagacaagcaggaacaggaacaagcaatgcttcaggttctgatgcgtgtagagcaagaacagaaagtcacagaggacgcccgtatctttgcagagcaagatgctgctgctcagaaatatgctgcacatatacttcaggagaagtacgagggagctatggcttcacttgctcaaatggagaacagagcagttatggcagaaactatgttagaggcaaccattcagtaccaatctagtcagcagaaagcacagcttccatcgccctctccttctccaaggaccccaactcgagatgcatcaccaggccaagggaaccaagattcatcgcaggagttccagcctagaagaataagcttgcttgccccattttcttccctcggatggcgagacaagaacaagggcaagcagaacggctctgatgagtcaacaaacggtaagctcaataatagcaccgatcaaggggttgaaacacccaaaaaggacgacgaaaagaaggccgactcgccaaaagagagtgaacagattgtccgaacaccggaaagagacaatgaactgagactagggacacccaagatggatagtgaggtaccaagtgtggaaatggcggcaaacagtacgaatgggctggaggaccagttggaggagataaaattggattgatatcctttggctggtcgctaagccgcaacataaggtctgttgatcgcctgtaagctatcataagtacacatgaaaaagacgtaccaaatagaagattaccacgaaagcaatttttggaacaga

SEQ ID NO: 31505 - DNA, 1341 bp, Zea Mays
taaaaaggtaaaacaaattttaatttgggacggagggagtatatattttgaaacgagatacctctgcttatattgaaatgagatacctctgcttatattaaaacgagataccatcttaataaattgtattatttattgagtctatgtggctgtatctagggtgcttccagaagatgattctcccaatttatagtactggactactggagctcgctggctatattattaatgtttgggcatgaatatgtcgcagcatgtaatgaagcaagtaaatttttgcttgttcagttttatgatccgctgcttgtgtacttactctattcaggagaagtacgagggagctatggcttcacttgctcaaatggagaacagagcagttatggcagaaactatgttagaggcaaccattcagtaccaatctagtcagcagaaagcacagcttccatcgccctctccttctccaaggtctggtcttgtttaatgctataattgctagatcagtactaacactggcaatgcaatagcactaaaggaccaatttatttagctactccatccttttttttcttgtctggttatctgtcattgcccccagttaggaaaacccttttgctttcccattttcaaatgcaaatagatgcgatttgactagtcttttcattaggcgtattccactcatttgctgttccaacgccaacttgatattgtttccaaacatttttcctcataggaccccaactcgagatgcatcaccaggccaagggaaccaagattcatcgcaggagttccagcctagaagaataagcttgcttgccccattttcttccctcggatggcgagacaagaacaagaacggctctgatgagtcaacaaacggtaagctcaataatagcaccgatcaaggggttgaaacacccaaaaaggacgacgaaaagaaggccgactcgccaaaagagagtgaacagattgtccgaacaccggaaagagacaatgaactgagactagggacacccaagatggatagtgaggtaccaagtgtggaaatggcggcaaacagtacgaatgggctggaggaccagttggaggagataaaattggattgatatcctttggctggtcgctaagccgcaacataaggtgccattaaattatgtattggtgtatccatcttccacctctattcttttaggtttatagattcttgtataacttgaggagagagaatgaataaactatgtttgccctcttataggtctgttgatcgcctgtaagctatcataagtacacatgaaaaagacgtaccaaatagaagattaccacgaaagcaatttttggaacaga

SEQ ID NO: 31506 - DNA, 1085 bp, Zea Mays
taaaaaggtaaaacaaattttaatttgggacggagggagtatatattttgaaacgagatacctctgcttatattgaaatgagatacctctgcttatattaaaacgagataccatcttaataaattgtattatttattgagtctatgtggctgtatctagggtgcttccagaagatgattctcccaatttatagtactggactactggagctcgctggctatattattaatgtttgggcatgaatatgtcgcagcatgtaatgaagcaagtaaatttttgcttgttcagttttatgatccgctgcttgtgtacttactctattcaggagaagtacgagggagctatggcttcacttgctcaaatggagaacagagcagttatggcagaaactatgttagaggcaaccattcagtaccaatctagtcagcagaaagcacagcttccatcgccctctccttctccaaggaccccaactcgagatgcatcaccaggccaagggaaccaagattcatcgcaggagttccagcctagaagaataagcttgcttgccccattttcttccctcggatggcgagacaagaacaagggcaagcagaacggctctgatgagtcaacaaacggtaagctcaataatagcaccgatcaaggggttgaaacacccaaaaaggacgacgaaaagaaggccgactcgccaaaagagagtgaacagattgtccgaacaccggaaagagacaatgaactgagactagggacacccaagatggatagtgaggtaccaagtgtggaaatggcggcaaacagtacgaatgggctggaggaccagttggaggagataaaattggattgatatcctttggctggtcgctaagccgcaacataaggtgccattaaattatgtattggtgtatccatcttccacctctattcttttaggtttatagattcttgtataacttgaggagagagaatgaataaactatgtttgccctcttataggtctgttgatcgcctgtaagctatcataagtacacatgaaaaagacgtaccaaatagaagattaccacgaaagcaatttttggaacaga

SEQ ID NO: 31507 - DNA, 1076 bp, Zea Mays
taaaaaggtaaaacaaattttaatttgggacggagggagtatatattttgaaacgagatacctctgcttatattgaaatgagatacctctgcttatattaaaacgagataccatcttaataaattgtattatttattgagtctatgtggctgtatctagggtgcttccagaagatgattctcccaatttatagtactggactactggagctcgctggctatattattaatgtttgggcatgaatatgtcgcagcatgtaatgaagcaagtaaatttttgcttgttcagttttatgatccgctgcttgtgtacttactctattcaggagaagtacgagggagctatggcttcacttgctcaaatggagaacagagcagttatggcagaaactatgttagaggcaaccattcagtaccaatctagtcagcagaaagcacagcttccatcgccctctccttctccaaggaccccaactcgagatgcatcaccaggccaagggaaccaagattcatcgcaggagttccagcctagaagaataagcttgcttgccccattttcttccctcggatggcgagacaagaacaagaacggctctgatgagtcaacaaacggtaagctcaataatagcaccgatcaaggggttgaaacacccaaaaaggacgacgaaaagaaggccgactcgccaaaagagagtgaacagattgtccgaacaccggaaagagacaatgaactgagactagggacacccaagatggatagtgaggtaccaagtgtggaaatggcggcaaacagtacgaatgggctggaggaccagttggaggagataaaattggattgatatcctttggctggtcgctaagccgcaacataaggtgccattaaattatgtattggtgtatccatcttccacctctattcttttaggtttatagattcttgtataacttgaggagagagaatgaataaactatgtttgccctcttataggtctgttgatcgcctgtaagctatcataagtacacatgaaaaagacgtaccaaatagaagattaccacgaaagcaatttttggaacaga

SEQ ID NO: 31508 - DNA, 869 bp, Zea Mays
cgaccgtagcttctattcagaagcacggatctcaaagcaagcagcaacaccgccaaaccctaaacaccaaagccccgcatataaataccttcccctcccatcttttcccctctcctgccgccgccgccgctcccgctcccagctcgtgttccgcttcttgcagccgtcgccgcgaagcgctccagagaacttccgtcaacatggggaagacaaggcatacaagaagagccatttgggcaatgagtggaagaaacccttcgctgggtcatcccatgccaagggcattgtcctggagaagattggtattgaggccaagcagcccaactccgctatccgtaagtgtgctcgtgttcagcttgttaagaatggcaagaagattgctgccttcgtgccaaatgacggttgtttgaactacattgaggaaaatgatgaggtcttgattgctggatttggtcgtaaggggcacgctgtgggagatattcctggtgtccggttcaaggtcgtcaaggtttccggtgtgtctctgcttgcccttttcaaggagaagaaagagaagccaaggtcttagattgctcttgctaccaaaatcagcaagcgtggagttgaaacgggagggcgttagatgattaagaagaatggttgcttgctatgtttgcagtgcattcgtgcaattgttaacctaagattttgttggtgaaaacgatttcttttcagacttgcttctgttgagtgctatcattccatatcaatgtacttcctcttctagaatttttgttgcccgcaagttcatttatttgttgtccgccagtttattttttaaactaaaacgatacaaataaaaaagaacagagtgtaattgctttgtacaa

SEQ ID NO: 31509 - DNA, 816 bp, Zea Mays
aagcaagcagcaacaccgccaaaccctaaacaccaaagccccgcatataaataccttcccctcccatcttttcccctctcctgccgccgccgccgctcccgctcccagctcgtgttccgcttcttgcagccgtcgccgcgaagcgctccagagaacttccgtcaacatggggaagacaaggcatacaagaagagccatttgggcaatgagtggaagaaacccttcgctgggtcatcccatgccaagggcattgtcctggagaagatcccaactccgctatccgtaagtgtgctcgtgttcagcttgttaagaatggcaagaagattgctgccttcgtgccaaatgacggttgtttgaactacattgaggaaaatgatgaggtcttgattgctggatttggtcgtaaggggcacgctgtgggagatattcctggtgtccggttcaaggtcgtcaaggtttccggtgtgtctctgcttgcccttttcaaggagaagaaagagaagccaaggtcttagattgctcttgctaccaaaatcagcaagcgtggagttgaaacgggagggcgttagatgattaagaagaatggttgcttgctatgtttgcagtgcattcgtgcaattgttaacctaagattttgttggtgaaaacgatttcttttcagacttgcttctgttgagtgctatcattccatatcaatgtacttcctcttctagaatttttgttgcccgcaagttcatttatttgttgtccgccagtttattttttaaactaaaacgatacaaataaaaaagaacagagtgtaattgctttgtacaa

SEQ ID NO: 31510 - DNA, 1636 bp, Zea Mays
aagcaagcagcaacaccgccaaaccctaaacaccaaagccccgcatataaataccttcccctcccatcttttcccctctcctgccgccgccgccgctcccgctcccagctcgtgttccgcttcttgcagccgtcgccgcgaagcgctccagagaacttccgtcaacatggggtatctcactgtcttctgttgaagttttttgatctatcctcgtgtccatctattttctggcttagcgattatgagtgtggttcggtgtgactgcataagtgcatctggttgcttgacgcgcagctttgcttgcgctaatgtgaagtatacatcgtgatctattttgatttcttctcagtatccacgtgaagcttattgacggtccagtgctgatcagatactacaacgtcagcgctaaacatattcataagcgacattaatccgttgctgctgtgtagcaatatctttcttggtccagttacttggatttgggaagctatgcatggtagcatacaccttcattattcttcgcgttttcaaagagtcgcctttttttgtgaaacttcatttgaagttttgcgaaactcccgatttggagccttgaagcgattacagttataatccatttatttaagagtcaacagtttagctgttcaggtactgcaggtgtagtgcacctagtgtttttctcacaaacattttagacgcttattctagtacacagtgaggtgacgaaaacttaattagaactaggaaaactgtatataagtgtgtcaatatatcgactaatatcttgattcagacattcggttacctgttttgttcatgtaatgtcgaattgttgtgtggtattagtccttttctttctagcactgttaaaaagggttttggcatgcattgtcagttgtaatgtggtagtctatcacatttggatagaccactacattaaaatgttaaaacgtgatctgctttcttatacaggaagacaaggcatacaagaagagccatttgggcaatgagtggaagaaacccttcgctgggtcatcccatgccaagggcattgtcctggagaagattggtattgaggccaagcagcccaactccgctatccgtaagtgtgctcgtgttcagcttgttaagaatggcaagaagattgctgccttcgtgccaaatgacggttgtttgaactacattgaggaaaatgatgaggtcttgattgctggatttggtcgtaaggggcacgctgtgggagatattcctggtgtccggttcaaggtcgtcaaggtttccggtgtgtctctgcttgcccttttcaaggagaagaaagagaagccaaggtcttagattgctcttgctaccaaaatcagcaagcgtggagttgaaacgggagggcgttagatgattaagaagaatggttgcttgctatgtttgcagtgcattcgtgcaattgttaacctaagattttgttggtgaaaacgatttcttttcagacttgcttctgttgagtgctatcattccatatcaatgtacttcctcttctagaatttttgttgcccgcaagttcatttatttgttgtccgccagtttattttttaaactaaaacgatacaaataaaaaagaacagagtgtaattgctttgtacaa

SEQ ID NO: 31511 - DNA, 1149 bp, Zea Mays
cccagatacctccgcttccaccatcgcacccacccggagcgcctcctcttctccagcgtccgatccccattccccacctctcctccctccgccgccagctcccgcccccttctctcccctcctcgcctccccgcgcgcgcgtttttataagggtttcggcggaggcgcccggtcgctggcgatggccgacgacggcgggagccacgagggcagcggcggcggcggaggcgtccgggagcaggaccggttcctgcccatcgccaacatcagccggatcatgaagaaggccgtcccggccaacggcaagatcgccaaggacgctaaggagaccctgcaggagtgcgtctccgagttcatatcattcgtgaccagcgaggccagcgacaaatgccagaaggagaaacgaaagacaatcaacggggacgatttgctctgggcgatggccactttaggattcgaggagtacgtcgagcctctcaagatttacctacaaaagtacaaagagatggagggtgatagcaagctgtctacaaaggctggcgagggctctgtaaagaaggatgcaattagtccccatggtggcaccagtagctcaagtaatcagttggttcagcatggagtctacaaccaagggatgggctatatgcagccacagtaccacaatggggaaacctaataaagggctaatacagcagcaatttatgaaaacaggaggcacttacaaagggtgttaatctctgcgatggctgcctctcaggtgtaaattggcttcggtttagcgctgcttttgtccgtatatttaggatgatttgactgttgctacttttggcaaccttttacatttacagatatgtattattcagcataaatataatatagtagtcctaggcctaaataatggtgattaacataccaagtcttttatcaggctactcgttttctggaacaggattcatgcttagctttccctcctgtctgaatgtgatggttgcctgaatcctaatttgcctgtctgtggtgtgagaccatctccaaccattcccctcatatttctcctcctatctgtactttctattatattttactactttacctcaaaagatactcctacatttagaaggtttccaaccattcaccgctccctttgta

SEQ ID NO: 31512 - DNA, 1177 bp, Zea Mays
cgcttccaccatcgcacccacccggagcgcctcctcttctccagcgtccgatccccattccccacctctcctccctccgccgccagctcccgcccccttctctcccctcctcgcctccccgcgcgcgcgtttttataagggtttcggcggaggcgcccggtcgctggcgatggccgacgacggcgggagccacgagggcagcggcggcggcggaggcgtccgggagcaggaccggttcctgcccatcgccaacatcagccggatcatgaagaaggccgtcccggccaacggcaagatcgccaaggacgctaaggagaccctgcaggagtgcgtctccgagttcatatcattcgtgaccagcgaggccagcgacaaatgccagaaggagaaacgaaagacaatcaacggggacgatttgctctgggcgatggccactttaggattcgaggagtacgtcgagcctctcaagatttacctacaaaagtacaaagagatggagggtgatagcaagctgtctacaaaggctggcgagggctctgtaaagaaggatgcaattagtccccatggtggcaccagtagctcaagtaatcagttggttcagcatggagtctacaaccaagggatgggctatatgcagccacagtaccacaatggggaaacctaataaagggctaatacagcagcaatttatgctagggaagtctctgcattgcttaccatgtgtattggcagaaaacaggaggcacttacaaagggtgttaatctctgcgatggctgcctctcaggtgtaaattggcttcggtttagcgctgcttttgtccgtatatttaggatgatttgactgttgctacttttggcaaccttttacatttacagatatgtattattcagcataaatataatatagtagtcctaggcctaaataatggtgattaacataccaagtcttttatcaggctactcgttttctggaacaggattcatgcttagctttccctcctgtctgaatgtgatggttgcctgaatcctaatttgcctgtctgtggtgtgagaccatctccaaccattcccctcatatttctcctcctatctgtactttctattatattttactactttacctcaaaagatactcctacatttagaaggtttccaaccattcaccgctccctttgta

SEQ ID NO: 31513 - DNA, 2542 bp, Zea Mays
ttctataaaaaaaactttgtatcagatcttcatttagttgcaaaagcagtcttggaggcggacaagttgtatacaaatacaaatattcagatcagtaaacagaccgggtcccaggtttcttcgtatagcgattattcacgatcgatgcaaccaaatcaatttgctccagtttcgatccacagctccccttgtcggagcagcaacagaccagtcatctgaacgtcttgctagacattccacgtggccggaggcgacgagagcgtcgtcggagccttttgtgcaattgccgttccactgacagcggaggcattgaaaaaaaaaaacatgcatcaacctattagattgcctttaatccctatcgacttcttacagtgttttgtctctataaattgtagtgcataatgtgaagcgaacaaggcgacctttggtctcgatcatacggttgccacgtgcttcgtctacgcttttcccgtactgaaaacaaagcatcgctgatcaagtggacaacacggggcgatcatcattatccgggatcagcgatcgacgtccgagcccaacggtaacatcagcaggcgttgaatctcctggcaaaaagaaaaggaaaaaagaaaaaaaatgccgaaaatcatcagaggatggcatcccactcccacaactccgtcggagcatgagatgaagggccgggcaagcaacggagaggaggagacgttaaggcatcttggtcgcgcagcgagtcggagtcctgtataggaatggctccttggaacaccccacccggacgtcctccctgggcggtaacaaggccggccggacggcgaggatggccgagtcgcccaccggcctcagccccaaggtcgaccgccgcacggcggtgagcgccgagagagagaaaaggaggccaccgacgacgaagctatcggagctggagtcccagctgtcgcagctgcaagacgagctcaagaaggccaaggagcagctccattcctccgagctctccaggaagcgggccctgcaggaggtggacgacgccaaggcgcaggccgccgcggcgtccgcgcaggcgcgcgacaccgaggctcagctcgccgagctctcgtcggccgaggagtcccgcctcctggagctgcgtcgtctgtcgcaggagcgcgaccgctcgtggcagtcggagctggaggccatgcagaagcagcacgccgcggactcgaccgcgcttgccgcggcgatgggcgaggtgcaccgcctccgcgtccagctcgccgccacggcgcgcgccgaccgccggcaggacgtggtggaggcgctggccaccatcaacgagctcagggccaagctcaaggcaagcgaggaggccgaggcgcaggcgcgcgcgatgcacgaggagtgcaagcagcagctggaggcgagccgggccaccatcgattcgctgctcaccgacgggtccaagctgatggactcgttcagcctcgtggtgaaggagctcgaggagtcgcgtgccacggtcaaggctcttgaggacgagatcgcggagacgtcgtcgaaggccgcaagcgaccgctgcaactgctcgggctcggagtcggaggccgccgagctgagggcggagctggaggccgcggaggagaggtaccaagaagagaagatccttagcaccgtcgagacgcagtgcgcgtacgagctcatggaccagataaagacagagtccgacctgcggcacggcaagcttgcggcggcgctcgagggcgccaaatccgaggtcatcttcctcaaggcgagcctgttcgacaaggaatccgagctacggagcgccctggacgcgaacaggaagctacaagcggaggcgagaacggacggctcggccgacgcgctgaagcagcagctgcagggcgcgctgcacgagaacgggctgctgaagcaggagctgcatcagtacgagtccgagaagggctccgcgaccgcgaggacggcggaggccgacgcggcggaggcggcgaagaagggcgagatggaaaccgagctgcgtcgcctgcgggtgcaggccgagcagtggcggaaggccgcggagacagccatggcgctgctgaccgttggcaagggcgggaacggcaaggtcgtggagcggagcgagtcgtgggagggcggcaagtacgcgggcctctgcgaggaattggacgacgacgcggccgccaggaagaacggcaacgtgctgaggaggatcagcggcatgtggaagaagtgagggcgatcggacagctaagaggctcgccgcggcaacggttttactgctctctagggagccctgggtttcttaactctctctgctgtaattgtttagttttgcaggttcttgtggtgtaaaaattaaatgaaacgtgctcatagctgtattatacaaggtggtacatggaggaacaattcgtctgagtgcgacagggttgtggtaggttaccaatggttgcatccgaaagtgtttagtcatcaagaattcgaatttgatacttcttttcgttaaagaaacggaagttcgattgattcctagccacat

SEQ ID NO: 31514 - DNA, 2105 bp, Zea Mays
gtcaattgtttagaaaccacacggctgtccctgtcgctggctaagtggttggagtgctgactagttagtgccagattagacgggcaagccatcagcagccaatgcctccgtgctgttgttgttgttgttgctgcatgttgttgtccattatttagctgctttgcgcgcgtgcagacagcgcgctacctataggccataggctatagcaagctccgccgtcgccattgctacacaccaatctttcctgccgcggtgccgcctctcgtccatggcaaagggagcgggagctagctgacggccgcgcgctttcgtcttttgtccttcaatttcgcagcattccgcgcgcttggtctctcggaggcgtggcggtagcctgtgccggtgtgcctcggagctccggcctccgggaataaacataggggtatcgccatgcaggcggcggccaagacgagaaaaggaggccaccgacgacgaagctatcggagctggagtcccagctgtcgcagctgcaagacgagctcaagaaggccaaggagcagctccattcctccgagctctccaggaagcgggccctgcaggaggtggacgacgccaaggcgcaggccgccgcggcgtccgcgcaggcgcgcgacaccgaggctcagctcgccgagctctcgtcggccgaggagtcccgcctcctggagctgcgtcgtctgtcgcaggagcgcgaccgctcgtggcagtcggagctggaggccatgcagaagcagcacgccgcggactcgaccgcgcttgccgcggcgatgggcgaggtgcaccgcctccgcgtccagctcgccgccacggcgcgcgccgaccgccggcaggacgtggtggaggcgctggccaccatcaacgagctcagggccaagctcaaggcaagcgaggaggccgaggcgcaggcgcgcgcgatgcacgaggagtgcaagcagcagctggaggcgagccgggccaccatcgattcgctgctcaccgacgggtccaagctgatggactcgttcagcctcgtggtgaaggagctcgaggagtcgcgtgccacggtcaaggctcttgaggacgagatcgcggagacgtcgtcgaaggccgcaagcgaccgctgcaactgctcgggctcggagtcggaggccgccgagctgagggcggagctggaggccgcggaggagaggtaccaagaagagaagatccttagcaccgtcgagacgcagtgcgcgtacgagctcatggaccagataaagacagagtccgacctgcggcacggcaagcttgcggcggcgctcgagggcgccaaatccgaggtcatcttcctcaaggcgagcctgttcgacaaggaatccgagctacggagcgccctggacgcgaacaggaagctacaagcggaggcgagaacggacggctcggccgacgcgctgaagcagcagctgcagggcgcgctgcacgagaacgggctgctgaagcaggagctgcatcagtacgagtccgagaagggctccgcgaccgcgaggacggcggaggccgacgcggcggaggcggcgaagaagggcgagatggaaaccgagctgcgtcgcctgcgggtgcaggccgagcagtggcggaaggccgcggagacagccatggcgctgctgaccgttggcaagggcgggaacggcaaggtcgtggagcggagcgagtcgtgggagggcggcaagtacgcgggcctctgcgaggaattggacgacgacgcggccgccaggaagaacggcaacgtgctgaggaggatcagcggcatgtggaagaagtgagggcgatcggacagctaagaggctcgccgcggcaacggttttactgctctctagggagccctgggtttcttaactctctctgctgtaattgtttagttttgcaggttcttgtggtgtaaaaattaaatgaaacgtgctcatagctgtattatacaaggtggtacatggaggaacaattcgtctgagtgcgacagggttgtggtaggttaccaatggttgcatccgaaagtgtttagtcatcaagaattcgaatttgatacttcttttcgttaaagaaacggaagttcgattgattcctagccacat

SEQ ID NO: 31515 - DNA, 2239 bp, Zea Mays
gcaccgggagcgtgcgtgaccgtcacgaggaaggagatcgggagcgcagccgcaagccggcaagcggaagggaacggctcgtcgccggcggggccacgtacccaggccggggtcaccgtccgggcggctggggtgggcgaatcgattctgcgtgcgcggctgggtcgaggtcgagatagcctttggacggggtgaggaaagcgagagataaaaggttgggccgcttgcttgcccttccacttctatctatccccacctccttctccctttccgcccccggtttattttttcttcgtcctggatgcgtcggtcgcgtgtttgatctgactaagccgcggaggagggtgctagatgtccgtgcggtgggcggtggctcccgagggcgaccggagttaggtccttgccgccttcagtgcggtggggaagcgagacattgaaggcgcagaacccaaagaatgggtaagagaggaaagtggtttagtgcggtgaagaaagtcttcagctcctccgatccagatggaaaggaagccaaggcagacaaatcgaaatccaagaggagatggccatttggaaagtccaagcactcggagccttccatatcgacggtgccaggcactgctccagcagtagctccgttgccatcaccaccagcaactcagccccactctctggagatcaaagatgtcaatccagttgaaacagacagtgagcagaacaagcatgcctactccgttgcgcttgcgtctgctgtcgctgctgaagctgcagcagttgctgcccaggctgctgcggaagttgtccgcctcacagcagttaccacggctgcaccaaagatgcctgttagttcgagggaagaacttgccgccaccaagattcagactgccttcaggggttatctggcaaggagagcattgcgtgcactaagagggctagttagattgaagtcgcttgttgatggaaatgctgtcaaacgccaaaccgctcacaccttgcaatgcacacaagcaatgacaagagttcaaactcaaatctactctagaagggtgaagttggaggaggagaaacaggctcttcaaagacaactccaattgaaacatcaaagggaacttgagaaaatgaagattgatgaagattgggatcacagccatcaatccaaagagcaaattgaggccaacctaatgatgaaacaggaagctgcactgaggcgagagagagcacttgcatatgcattttctcaccagtggaggaattctggtcgaactataacccctacttttacggaacctgggaaccccaactggggctggagctggatggagcgctggatgacagcaagaccatgggagagtcggttggcggcggcatcggacaaggaccctaaagaacgtgctgtgacaaagaatgcgagcaccagtgctgttcgagtacctgtatcccgtgccatctcgattcagagaccagcaacaccaaacaagtcgagccgcccaccaagccggcagtcactttcaaccccgccatcgaagaccccgtcagcctcaggaaaggccaggccggcaagtccaaggaacagttggctgtacaaggaggatgacctgaggagcatcacgagcatccgctccgagcgcccaaggaggcagagcacgggtggaggctcggtccgggacgataccagcctgaccagcacaccacctctccccagctacatgcagtcgaccgagtctgcacgggccaagtctcggtaccgcagtctactactgactgagaagcttgaggttcctgagagagcgcctctggcccactccgttgtcaagaagcgcctgtcgttccccgtcgtcgagaagccaagcgttgtgccgacagagaagcccagggaaagagtgaggcgccattccgaccctccgaaggtcgatcctgcgacgctcaaggatgcccctgctgcctgaccagtgaccaggccttatgtgattgttaggtttcgtgctcttttaacaccgtgatgtattatctgagttaggttgctttgttcgtgtcatcgtatgatctgtccgggttgattttgagacagttctaactgtgtttacagacaatgcgtgatgctaaatgtatgtgtggttggttggctttaaatgtactgatatgatagtatttgattttaactttgctaaggacttgaggtgcaatgtgaatagatttcagggtgcgggaacaaagtttttctacagtattgactcaacagacg

SEQ ID NO: 31516 - DNA, 1903 bp, Zea Mays
ctcagggcttttcgcgagacattgaaggcgcagaacccaaagaatgggtaagagaggaaagtggtttagtgcggtgaagaaagtcttcagctcctccgatccagatggaaaggaagccaaggtacgtcgaaattccttattcacaacaaaaaaaaaagtccacttggtgacatgtggctactatgaaggcccagaaggcagacaaatcgaaatccaagaggagatggccatttggaaagtccaagcactcggagccttccatatcgacggtgccaggcactgctccagcagtagctccgttgccatcaccaccagcaactcagccccactctctggagatcaaagatgtcaatccagttgaaacagacagtgagcagaacaagcatgcctactccgttgcgcttgcgtctgctgtcgctgctgaagctgcagcagttgctgcccaggctgctgcggaagttgtccgcctcacagcagttaccacggctgcaccaaagatgcctgttagttcgagggaagaacttgccgccaccaagattcagactgccttcaggggttatctggcaaggagagcattgcgtgcactaagagggctagttagattgaagtcgcttgttgatggaaatgctgtcaaacgccaaaccgctcacaccttgcaatgcacacaagcaatgacaagagttcaaactcaaatctactctagaagggtgaagttggaggaggagaaacaggctcttcaaagacaactccaattgaaacatcaaagggaacttgagaaaatgaagattgatgaagattgggatcacagccatcaatccaaagagcaaattgaggccaacctaatgatgaaacaggaagctgcactgaggcgagagagagcacttgcatatgcattttctcaccagtggaggaattctggtcgaactataacccctacttttacggaacctgggaaccccaactggggctggagctggatggagcgctggatgacagcaagaccatgggagagtcggttggcggcggcatcggacaaggaccctaaagaacgtgctgtgacaaagaatgcgagcaccagtgctgttcgagtacctgtatcccgtgccatctcgattcagagaccagcaacaccaaacaagtcgagccgcccaccaagccggcagtcactttcaaccccgccatcgaagaccccgtcagcctcaggaaaggccaggccggcaagtccaaggaacagttggctgtacaaggaggatgacctgaggagcatcacgagcatccgctccgagcgcccaaggaggcagagcacgggtggaggctcggtccgggacgataccagcctgaccagcacaccacctctccccagctacatgcagtcgaccgagtctgcacgggccaagtctcggtaccgcagtctactactgactgagaagcttgaggttcctgagagagcgcctctggcccactccgttgtcaagaagcgcctgtcgttccccgtcgtcgagaagccaagcgttgtgccgacagagaagcccagggaaagagtgaggcgccattccgaccctccgaaggtcgatcctgcgacgctcaaggatgcccctgctgcctgaccagtgaccaggccttatgtgattgttaggtttcgtgctcttttaacaccgtgatgtattatctgagttaggttgctttgttcgtgtcatcgtatgatctgtccgggttgattttgagacagttctaactgtgtttacagacaatgcgtgatgctaaatgtatgtgtggttggttggctttaaatgtactgatatgatagtatttgattttaactttgctaaggacttgaggtgcaatgtgaatagatttcagggtgcgggaacaaagtttttctacagtattgactcaacagacg

SEQ ID NO: 31517 - DNA, 1851 bp, Zea Mays
cttgactcgcttcgacgtgaaagcttgcctttctcgcgcgagacattgaaggcgcagaacccaaagaatgggtaagagaggaaagtggtttagtgcggtgaagaaagtcttcagctcctccgatccagatggaaaggaagccaaggcagacaaatcgaaatccaagaggagatggccatttggaaagtccaagcactcggagccttccatatcgacggtgccaggcactgctccagcagtagctccgttgccatcaccaccagcaactcagccccactctctggagatcaaagatgtcaatccagttgaaacagacagtgagcagaacaagcatgcctactccgttgcgcttgcgtctgctgtcgctgctgaagctgcagcagttgctgcccaggctgctgcggaagttgtccgcctcacagcagttaccacggctgcaccaaagatgcctgttagttcgagggaagaacttgccgccaccaagattcagactgccttcaggggttatctggcaaggagagcattgcgtgcactaagagggctagttagattgaagtcgcttgttgatggaaatgctgtcaaacgccaaaccgctcacaccttgcaatgcacacaagcaatgacaagagttcaaactcaaatctactctagaagggtgaagttggaggaggagaaacaggctcttcaaagacaactccaattgaaacatcaaagggaacttgagaaaatgaagattgatgaagattgggatcacagccatcaatccaaagagcaaattgaggccaacctaatgatgaaacaggaagctgcactgaggcgagagagagcacttgcatatgcattttctcaccagtggaggaattctggtcgaactataacccctacttttacggaacctgggaaccccaactggggctggagctggatggagcgctggatgacagcaagaccatgggagagtcggttggcggcggcatcggacaaggaccctaaagaacgtgctgtgacaaagaatgcgagcaccagtgctgttcgagtacctgtatcccgtgccatctcgattcagagaccagcaacaccaaacaagtcgagccgcccaccaagccggcagtcactttcaaccccgccatcgaagaccccgtcagcctcaggaaaggccaggccggcaagtccaaggaacagttggctgtacaaggaggatgacctgaggagcatcacgagcatccgctccgagcgcccaaggaggcagagcacgggtggaggctcggtccgggacgataccagcctgaccagcacaccacctctccccagctacatgcagtcgaccgagtctgcacgggccaagtctcggtaccgcagtctactactgactgagaagcttgaggttcctgagagagcgcctctggcccactccgttgtcaagaagcgcctgtcgttccccgtcgtcgagaagccaagcgttgtgccgacagagaagcccagggaaagagtgaggcgccattccgaccctccgaaggtcgatcctgcgacgctcaaggatgcccctgctgcctgaccagtgaccaggccttatgtgattgttaggtttcgtgctcttttaacaccgtgatgtattatctgagttaggttgctttgttcgtgtcatcgtatgatctgtccgggttgattttgagacagttctaactgtgtttacagacaatgcgtgatgctaaatgtatgtgtggttggttggctttaaatgtactgatatgatagtatttgattttaactttgctaaggacttgaggtgcaatgtgaatagatttcagggtgcgggaacaaagtttttctacagtattgactcaacagacg

SEQ ID NO: 31518 - DNA, 1966 bp, Zea Mays
agaagttgccacacgaagcttggtttctgtgccaacgcccctttcttcttctgtgaagaaattgccgtttacggcgaagacttgtgcgctggctcagtttcacctagttcgtgcttatttttactcgatccactccaatctttgcgagacattgaaggcgcagaacccaaagaatgggtaagagaggaaagtggtttagtgcggtgaagaaagtcttcagctcctccgatccagatggaaaggaagccaaggcccagaaggcagacaaatcgaaatccaagaggagatggccatttggaaagtccaagcactcggagccttccatatcgacggtgccaggcactgctccagcagtagctccgttgccatcaccaccagcaactcagccccactctctggagatcaaagatgtcaatccagttgaaacagacagtgagcagaacaagcatgcctactccgttgcgcttgcgtctgctgtcgctgctgaagctgcagcagttgctgcccaggctgctgcggaagttgtccgcctcacagcagttaccacggctgcaccaaagatgcctgttagttcgagggaagaacttgccgccaccaagattcagactgccttcaggggttatctggcaaggagagcattgcgtgcactaagagggctagttagattgaagtcgcttgttgatggaaatgctgtcaaacgccaaaccgctcacaccttgcaatgcacacaagcaatgacaagagttcaaactcaaatctactctagaagggtgaagttggaggaggagaaacaggctcttcaaagacaactccaattgaaacatcaaagggaacttgagaaaatgaagattgatgaagattgggatcacagccatcaatccaaagagcaaattgaggccaacctaatgatgaaacaggaagctgcactgaggcgagagagagcacttgcatatgcattttctcaccagtggaggaattctggtcgaactataacccctacttttacggaacctgggaaccccaactggggctggagctggatggagcgctggatgacagcaagaccatgggagagtcggttggcggcggcatcggacaaggaccctaaagaacgtgctgtgacaaagaatgcgagcaccagtgctgttcgagtacctgtatcccgtgccatctcgattcagagaccagcaacaccaaacaagtcgagccgcccaccaagccggcagtcactttcaaccccgccatcgaagaccccgtcagcctcaggaaaggccaggccggcaagtccaaggaacagttggctgtacaaggaggatgacctgaggagcatcacgagcatccgctccgagcgcccaaggaggcagagcacgggtggaggctcggtccgggacgataccagcctgaccagcacaccacctctccccagctacatgcagtcgaccgagtctgcacgggccaagtctcggtaccgcagtctactactgactgagaagcttgaggttcctgagagagcgcctctggcccactccgttgtcaagaagcgcctgtcgttccccgtcgtcgagaagccaagcgttgtgccgacagagaagcccagggaaagagtgaggcgccattccgaccctccgaaggtcgatcctgcgacgctcaaggatgcccctgctgcctgaccagtgaccaggccttatgtgattgttaggtttcgtgctcttttaacaccgtgatgtattatctgagttaggttgctttgttcgtgtcatcgtatgatctgtccgggttgattttgagacagttctaactgtgtttacagacaatgcgtgatgctaaatgtatgtgtggttggttggctttaaatgtactgatatgatagtatttgattttaactttgctaaggacttgaggtgcaatgtgaatagatttcagggtgcgggaacaaagtttttctacagtattgactcaacagacg

SEQ ID NO: 31519 - DNA, 2088 bp, Zea Mays
acattcggcttgtacttgcccgcacctaccggccgcgcccgcgcgttgctggtcagagccagcgggcagcggacgaggtcagctgcctccgcggctccctccttcggtcctttgacgcttcaaggagacatcgctccagcgcccctgagctgtccttggtcaatgggagtggctgaggctggcgtgcggacctaaaatccccactgatatcaaggcaactgcgcaagcaatctccctgcccctgctcattggtcagcaccagcagcaacagcagctgctggagtgctgttgcgttctcctcaagcgcaactgtgcaaggactgctggagtgcaagcacagttctgcttccactacttgaagtcgactccctcccactccagtctccaggggagagccgcattggcagcttgcctctgcccatgcccaggcattggagctcgtccccaatggcaatgcgtcaccagttcggggcttcggtgctgctgcatctactggtgttagcgggggcgggggccatggtcactgctgaccaggagagcgaccggatccgcgagctcccgggccagccgccgaacgtggggttctcgcagtactccggctacgtcaccgtcaacccggcgcgggggcgcgcgctcttctactggctcgtggaggcggtgccggcggccgggcccatcgcgccgctcgtcctctggctcaacggcggccctggatgctcgtcagtcggctacggcgcgtccgaggaggtcggcccgttccgcatcaggccggacggccagactctctacctcaaccccaattcttggaacaaggcggccaatttgctcttcctggagtcgccggccggcgtggggttctcgtactcgaactcgtcgctggatctgtacaccgcaggagatgcaaagacagcactggatgcctacgcttttcttgtgaactggttggagagattcccacagtacaagtacagggagttctatattgctggggaaagttacgcgggtcactacgttccacagttagcccagctcatatatgaaaagaacaagggcattcagaatccaacaattaatttcaaaggattcatgtcactgatgactaccatgattaccttggtacctttgagttttggtggactcatggtctgatctctgacaagacttatcacaacttgaaggcgacatgtttgcttgaatcctcacagcacccttcacctgactgtgtcaagaacctgaatctagccagtgctgaagaaggcaatattgatccttatagtctgaatacaaagccatgcaatgacaccgcctctctcaagcttggcttgggtggacgctacccttggttgtccagagcctatgatccttgtactgaaagatatgcaagtatttactacaacaggccagaagtgcagatggcattgcatgcaaatacaactggaattcattacccttggcaaacatgcagcgatattgttggatcctactgggctgattccccaagatctatgcttccaatctaccaagaactgatagcagctggtatcaagatctgggttttcagtggggacacggatgctgtagttcctgtaactgcgacaaggtactcaatagatgctctcaagcttccaacactggtaaattggtacccttggtatgaccatgggaaggttggaggttggagccaagtttacaaaggactaacccttataaccatagcaggtgcaggacatgaagtgccactgcaccggcctcgacaagctttgatcatgttcagacacttcttgcagaacaaaccgatgccagcacaatagccagtcgaagcagaaatatagtgtaaactaccacagtcatgtttaatattttttaaattcttttttacttgatttgattgttattgttacaacatattgttcaattatctcgattgaatgtatgtacgcccagtagcaaatagggatacctgaaatttgtactgctggagctaaagagctccgctgtatatgtaatgatgatctttagcattatcgtccttcgccttcagtgtttggatcattggaattgaatttcaatctaataatagtaatttag

SEQ ID NO: 31520 - DNA, 2566 bp, Zea Mays
ctacaacatatgtttattaaaaagctgtggtaatgtgggtcaaaatcactgtacctccgtcgatgtttccgtcacagcgaagagaaatagagggggttaaaccagactgaacatcaagccagtgctagaaatacgaaacaataataataaaagaaacactggaaaattgcacgaaccctgcgtgtgcgcgtacgatagttaccactcgcggcagctctccagtccagctgtactgtccatgacaggtggggacatatgaatctccacctatcacgaataccctattccgctaagctcacccgcccgcaaaaacaccacgggcgcgggcgcggagaccgaccaccacggcaccacctccacctcctccggttgccttcggcctcgcctcccctccgtcctccccgtctccagcctccgggaccggaagctccacgtggcgcggcagctcgtacccggcgtctatggcggcggcagaagtgtactcgccgaccgcggcggcggcggcgcagcagcagcgggagaaggcggcgtcgcaggcgtggcggacggtggtagggtggatcggcttccttgttcaggttctgctccagatccttcgaggcacgccgtcctgcgcccagctcttatccttcgtcggcgtccgctacccgctcctctccgggcccacagcctcgaacccgtcgccggaggtggccttcatgccgctccgctccgagatcccagctgacgcggcacctgccccgacacctgcgcctgagcccctgggccgcctcaaggtacggagcttcgattttttttattcgattcggtggagcttttgagatgtccggggtggggaaatggcgcctttgtgaagtaggagtagaagggtttcaatcaaatagtatttggtcttggacgtgctgatcaaattggattatgcttcggtatttggggatgattgggattagttggagtggctgatttaaggctaacggagatttggtggtttagttcaggtagtattgttgatttttggttatagaataattagtatttggactatatagcagaccttccccgatgatttggttactagcatgggcaattagttgctctgcaattgcaaaataaggccttgatcgttttagtagtacatacttacggctgcattatcatctcctctccatactggcggtgatatgtttccggtggccttcaagtgaagctgtgggtagttcccagaatactggttccctgtcattctgtgtaggtgagtagataaccttctatcattgttaaaaacatcttgattgtagctggattatgacatatatactatcttatcagctgatccagtacacgggctgttatactgtaaggtatgcccatagttagatttctgatagtttggatcggcaaagaagcttatagcttctcataaaaggagctgaaactgaaactggaagtcatatcgttgctaaacattactacttaagttccttgaaatgaagtcagactaaacatttgtctcttatgtttgcgcatcggatattctcacaacattagagctgtctgttcaggtagtgcttgacttggatgagactttagtttctgcatatgaatcatctagtcttcctactattgtacgtacacaagctgttgaagcaggattacattgctttgatatggaatgcatatcatctgataaggatgctgaaggaaaacagaaggtgaatcatgtgactgttttcgagcgtcctggtttgcatgagttcttgcagaaaactagtgaatttgcagaccttatcctttttacagcaggtttagaaggttatgctagacctttagttgatcgaatagatgttcacaatagattcagacttcgtctctatcgcccatcaactgttaccacggaatacagagaacatgtgaaagatctttcttgcgtgtcaaaagatttcggcaggattgtcattgtcgacaacaatccgttcagtttcattcttcagcctttgaatggaataccttgtgttccattttcagctggacaacattctgatgaccagctcatgatggttatatttccactcctgaagcatctttctctccagaaagatgtcagacctgtattgcatgaaaggtttcatatgccagaatggttccaaaagcatgggatcccccaaactaatcagtctgttttaactggcaggatcatcgacgagcggaggaggaggttgaagtctgatgtggttgagatgttgacatgcattaaaaattgggaggatgctgaagcaaggatgcaacacatggtggatgacaaagagcttgaagaaacatttgaaaatgtttatcttgattagtctctttgtgaccatttgtgcaatgggactgtaatattatgcacctgaactttgtttattgtaaggacagtgaactttttaatgagttgggttgtactcttttttcctgtctaaggtttctcacaagggtgagttttacctagacaggtttttaacgaggcagccattgcactacagctcataataaaaatgttttaataaacatagcagtttgaagttgtatt

SEQ ID NO: 31521 - DNA, 1163 bp, Zea Mays
ctggaatttcttgccaacagccctctgcgggctgcggctctgcccttcttcctgcagtagagagccgccgcccctcccaaatccccttctccctcacgtctctctctccccaagccgctcctcaccaagcccatctcagccgctccctccagccctcacctcgccggccctagctgctggtcgccgtcgaccgcgagctctccaacgcaggcggctcgctgcgccttcccctcgccggtcatccctgctccctcggcttccaaaccatggccgcctctcctccatctcctccctccccagcgcctccctctctgctcctgcactcggagcccagtactccagctcgccaacgctccctccctgctcaccggccaccaggaagctcgccccatcccctgacttgtcgtgtcttgggccgtcacggcactctcatcttgcgtcgtcgccttattgctgttctgttgggaggtggagaagaaaggaactctagtgcatcacacaccttgtgcttgacgaaatgtttgaatcagaatttatcatcgcatccgcaatttggtttaatcatgaagttggtccaagctcctgttctaggtcttcctaacgacttcagcaagggtttcgtgctagaaacagctgtcttcatgcaatcgaagaatctcgtggcttatttgaataagcacctttgtccaagaaaccaagcttcatcgaggagtgtttggcaatctttatggcaattattgacgaatggcggccatacttgcagcaccgtcaaatcgtgattgtactccatcttactgagcagagggtgaccttacgtttgtagcataaagtcctgctcaagctcattgacttgcattatcaaattcgcacaaacaggcaacggctgtaccgagcgactgatttggcacatatatatataagccgagacagtgggagaggagagctggacaacaggcaacgaattgtaattgaatcttctgaatactaaaggaaagcggtcacatcccattaatttgcacggtctctgtgggctgattccccacccttactcatccttatctctcatttcaaacttgtaaacagtacagtctcccatttatatgaatctatcattatgtatacgacgatatatataataatatagactattgcttaaatttaaa

SEQ ID NO: 31522 - DNA, 1316 bp, Zea Mays
ctggaatttcttgccaacagccctctgcgggctgcggctctgcccttcttcctgcagtagagagccgccgcccctcccaaatccccttctccctcacgtctctctctccccaagccgctcctcaccaagcccatctcagccgctccctccagccctcacctcgccggccctagctgctggtcgccgtcgaccgcgagctctccaacgcaggcggctcgctgcgccttcccctcgccggtcatccctgctccctcggcttccaaaccatggccgcctctcctccatctcctccctccccagcgcctccctctctgctcctgcactcggagcccagtactccagctcgccaacgctccctccctgctcaccggccaccaggaaggtccgagctcgcccatcctctgctcggtttcaacttcggtcgtgcctgcagaccgctcccttgctcctgcagctcgccccatcccctgacttgtcgtgtcttgggccgtcacggcactctcatcttgcgtcgtcgccttattgctgttctggtgaggccatgtcgttcttgtcctactcatttccctaccggcatcaaatccttactgttgtttatacgtatgtttttgtgtgagttgggaggtggagaagaaaggaactctagtgcatcacacaccttgtgcttgacgaaatgtttgaatcagaatttatcatcgcatccgcaatttggtttaatcatgttggtccaagctcctgttctaggtcttcctaacgacttcagcaagggtttcgtgctagaaacagctgtcttcatgcaatcgaagaatctcgtggcttatttgaataagcacctttgtccaagaaaccaagcttcatcgaggagtgtttggcaatctttatggcaattattgacgaatggcggccatacttgcagcaccgtcaaatcgtgattgtactccatcttactgagcagagggtgaccttacgtttgtagcataaagtcctgctcaagctcattgacttgcattatcaaattcgcacaaacaggcaacggctgtaccgagcgactgatttggcacatatatatataagccgagacagtgggagaggagagctggacaacaggcaacgaattgtaattgaatcttctgaatactaaaggaaagcggtcacatcccattaatttgcacggtctctgtgggctgattccccacccttactcatccttatctctcatttcaaacttgtaaacagtacagtctcccatttatatgaatctatcattatgtatacgacgatatatataataatatagactattgcttaaatttaaa

SEQ ID NO: 31523 - DNA, 1325 bp, Zea Mays
ctggaatttcttgccaacagccctctgcgggctgcggctctgcccttcttcctgcagtagagagccgccgcccctcccaaatccccttctccctcacgtctctctctccccaagccgctcctcaccaagcccatctcagccgctccctccagccctcacctcgccggccctagctgctggtcgccgtcgaccgcgagctctccaacgcaggcggctcgctgcgccttcccctcgccggtcatccctgctccctcggcttccaaaccatggccgcctctcctccatctcctccctccccagcgcctccctctctgctcctgcactcggagcccagtactccagctcgccaacgctccctccctgctcaccggccaccaggaaggtccgagctcgcccatcctctgctcggtttcaacttcggtcgtgcctgcagaccgctcccttgctcctgcagctcgccccatcccctgacttgtcgtgtcttgggccgtcacggcactctcatcttgcgtcgtcgccttattgctgttctgttgggaggtggagaagaaaggaactctagtgcatcacacaccttgtgcttgacgaaatgtttgaatcagaatttatcatcgcatccgcaatttggtttaatcatgcactacggcatgattaatggagttactgaagaagggcacccaattcaattgcccccggttgctgatcggacatttcatttgctcaaacagaagttggtccaagctcctgttctaggtcttcctaacgacttcagcaagggtttcgtgctagaaacagctgtcttcatgcaatcgaagaatctcgtggcttatttgaataagcacctttgtccaagaaaccaagcttcatcgaggagtgtttggcaatctttatggcaattattgacgaatggcggccatacttgcagcaccgtcaaatcgtgattgtactccatcttactgagcagagggtgaccttacgtttgtagcataaagtcctgctcaagctcattgacttgcattatcaaattcgcacaaacaggcaacggctgtaccgagcgactgatttggcacatatatatataagccgagacagtgggagaggagagctggacaacaggcaacgaattgtaattgaatcttctgaatactaaaggaaagcggtcacatcccattaatttgcacggtctctgtgggctgattccccacccttactcatccttatctctcatttcaaacttgtaaacagtacagtctcccatttatatgaatctatcattatgtatacgacgatatatataataatatagactattgcttaaatttaaa

SEQ ID NO: 31524 - DNA, 1228 bp, Zea Mays
ctggaatttcttgccaacagccctctgcgggctgcggctctgcccttcttcctgcagtagagagccgccgcccctcccaaatccccttctccctcacgtctctctctccccaagccgctcctcaccaagcccatctcagccgctccctccagccctcacctcgccggccctagctgctggtcgccgtcgaccgcgagctctccaacgcaggcggctcgctgcgccttcccctcgccggtcatccctgctccctcggcttccaaaccatggccgcctctcctccatctcctccctccccagcgcctccctctctgctcctgcactcggagcccagtactccagctcgccaacgctccctccctgctcaccggccaccaggaaggtccgagctcgcccatcctctgctcggtttcaacttcggtcgtgcctgcagaccgctcccttgctcctgcagctcgccccatcccctgacttgtcgtgtcttgggccgtcacggcactctcatcttgcgtcgtcgccttattgctgttctggtggagaagaaaggaactctagtgcatcacacaccttgtgcttgacgaaatgtttgaatcagaatttatcatcgcatccgcaatttggtttaatcatgaagttggtccaagctcctgttctaggtcttcctaacgacttcagcaagggtttcgtgctagaaacagctgtcttcatgcaatcgaagaatctcgtggcttatttgaataagcacctttgtccaagaaaccaagcttcatcgaggagtgtttggcaatctttatggcaattattgacgaatggcggccatacttgcagcaccgtcaaatcgtgattgtactccatcttactgagcagagggtgaccttacgtttgtagcataaagtcctgctcaagctcattgacttgcattatcaaattcgcacaaacaggcaacggctgtaccgagcgactgatttggcacatatatatataagccgagacagtgggagaggagagctggacaacaggcaacgaattgtaattgaatcttctgaatactaaaggaaagcggtcacatcccattaatttgcacggtctctgtgggctgattccccacccttactcatccttatctctcatttcaaacttgtaaacagtacagtctcccatttatatgaatctatcattatgtatacgacgatatatataataatatagactattgcttaaatttaaa

SEQ ID NO: 31525 - DNA, 1246 bp, Zea Mays
ctggaatttcttgccaacagccctctgcgggctgcggctctgcccttcttcctgcagtagagagccgccgcccctcccaaatccccttctccctcacgtctctctctccccaagccgctcctcaccaagcccatctcagccgctccctccagccctcacctcgccggccctagctgctggtcgccgtcgaccgcgagctctccaacgcaggcggctcgctgcgccttcccctcgccggtcatccctgctccctcggcttccaaaccatggccgcctctcctccatctcctccctccccagcgcctccctctctgctcctgcactcggagcccagtactccagctcgccaacgctccctccctgctcaccggccaccaggaagctcgccccatcccctgacttgtcgtgtcttgggccgtcacggcactctcatcttgcgtcgtcgccttattgctgttctggtggagaagaaaggaactctagtgcatcacacaccttgtgcttgacgaaatgtttgaatcagaatttatcatcgcatccgcaatttggtttaatcatgcactacggcatgattaatggagttactgaagaagggcacccaattcaattgcccccggttgctgatcggacatttcatttgctcaaacagaagttggtccaagctcctgttctaggtcttcctaacgacttcagcaagggtttcgtgctagaaacagctgtcttcatgcaatcgaagaatctcgtggcttatttgaataagcacctttgtccaagaaaccaagcttcatcgaggagtgtttggcaatctttatggcaattattgacgaatggcggccatacttgcagcaccgtcaaatcgtgattgtactccatcttactgagcagagggtgaccttacgtttgtagcataaagtcctgctcaagctcattgacttgcattatcaaattcgcacaaacaggcaacggctgtaccgagcgactgatttggcacatatatatataagccgagacagtgggagaggagagctggacaacaggcaacgaattgtaattgaatcttctgaatactaaaggaaagcggtcacatcccattaatttgcacggtctctgtgggctgattccccacccttactcatccttatctctcatttcaaacttgtaaacagtacagtctcccatttatatgaatctatcattatgtatacgacgatatatataataatatagactattgcttaaatttaaa

SEQ ID NO: 31526 - DNA, 805 bp, Zea Mays
ccggataaaggccgccctcctcgcagtacagcaaacggcggccaacaacaaccaccccggtacacgcttcccaccaaaagcaaccctgaccctgacctgcgctgcctgtgaccccgccgatccgagcgtctccatggccgcttcgtcctccgaggctgccacagccacgcccacgaccaccgtcggactcggagggagcgggaccccaggccctccgccgccaacgccatcgaaccaccacgcggcgccgtcctccgcggctggtgtggagcaatggcaagttgaagaaagtgagagggatggctcgccccacatccgcaccacccatggcggcgcagcatggcgagaccgaccgtctgtcgctgacggtccttatcactctgcctttggacaatatcgtctcgcccttggtcccgctctccaatgcggccggagaaggccgcgaggccgaggcaaacggtgccggagccgacgacgaggatggatggaggtttcactctttcctactggaggactatgcgtggagggtgtacaaccagcggcttcagttcaaggatccattggtccggtatcggatatgatatttgccgcgatgatctatagcgcttctttttttccttttggtgtgccaatatgcaactcatgtcatgtgtgacttcgtgttgtgatctactatttgccttcggagtggtttgagtacatcccgccttgggtttcaatgtatgttgctgacgttttgacctttgctcaaatacctgagccgctgagggattcggacaagcagtaggattctatacgaacttcc

SEQ ID NO: 31527 - DNA, 567 bp, Zea Mays
tctctcagatatttcatgaacattagtgtggagcaatggcaagttgaagaaagtgagagggatggctcgccccacatccgcaccacccatggcggcgcagcatggcgagaccgaccgtctgtcgctgacggtccttatcactctgcctttggacaatatcgtctcgcccttggtcccgctctccaatgcggccggagaaggccgcgaggccgaggcaaacggtgccggagccgacgacgaggatggatggaggtttcactctttcctactggaggactatgcgtggagggtgtacaaccagcggcttcagttcaaggatccattggtccggtatcggatatgatatttgccgcgatgatctatagcgcttctttttttccttttggtgtgccaatatgcaactcatgtcatgtgtgacttcgtgttgtgatctactatttgccttcggagtggtttgagtacatcccgccttgggtttcaatgtatgttgctgacgttttgacctttgctcaaatacctgagccgctgagggattcggacaagcagtaggattctatacgaacttcc

SEQ ID NO: 31528 - DNA, 708 bp, Zea Mays
tatcgtcttgatctggtcaaagtttatagaccattcatttagcgctctagtaaaggctagaggtagtagtgtcattgcaacagaacgtacagcatcgagcggcagagatggcgagcatccgttttgtttatgcagcggccagcgcccagcggcatcaaattctaaagtgtggagcaatggcaagttgaagaaagtgagagggatggctcgccccacatccgcaccacccatggcggcgcagcatggcgagaccgaccgtctgtcgctgacggtccttatcactctgcctttggacaatatcgtctcgcccttggtcccgctctccaatgcggccggagaaggccgcgaggccgaggcaaacggtgccggagccgacgacgaggatggatggaggtttcactctttcctactggaggactatgcgtggagggtgtacaaccagcggcttcagttcaaggatccattggtccggtatcggatatgatatttgccgcgatgatctatagcgcttctttttttccttttggtgtgccaatatgcaactcatgtcatgtgtgacttcgtgttgtgatctactatttgccttcggagtggtttgagtacatcccgccttgggtttcaatgtatgttgctgacgttttgacctttgctcaaatacctgagccgctgagggattcggacaagcagtaggattctatacgaacttcc

SEQ ID NO: 31529 - DNA, 943 bp, Zea Mays
cctcccgaacggcaacatttcttttctccaaaccatataccctagcccgtgcacaggtgggcgcccgccgccacctgcggctcggtggactccggcatcgacacccctggcccccagcgccgcagatcgcaagctctcagcaacgcgtgcttgttgctctgtcacatgctttaaaaagcacaaagaggaatcttgtcaaaagatattgcatcaggaagaaattagcaagtcagcattgcaggaggaagttacggaactgaaagggatccaagacgctctcagggatcctgaactgcagagaatgatacttcaaattgatgggtcttccgaatcagaaaaagaattggagaaagtgatggaaggtcaagcttttcgcgagttcactgataagattcttgacattgtcaacccacaagaataaccgtctaccctgtttggtgggattctgacgctagagtaaacagaagcatccgggcaaacaaagcaaaagtggagctcatctctgttttcctttttccaggatggtataattcataacatatcttgagtcgcctgtttttccatgatggggtagactttagaacacatactgtgtcgcctggtgaaaggaaattacgtctgctgaaaaatctctcttgccaaatatagtttttcttctgtattctagtgttgtattctagtgtggtagacagcgactctacactgactactgagggtgtgtttggtttggttttgacttttgctctctaaaaacgaaaagcaaacggcccgagccagaaagcagcttttttcaaaagcatgctttcttgcaatgcaaattgaaagcacatttgaatctatttttagcggcttttgaatggaaccatgtaaataatatggaagaacttgtagcgacttttagtggcttctaaccaacggtataatatgaaagaatttgtagcga

SEQ ID NO: 31530 - DNA, 1155 bp, Zea Mays
cctcccgaacggcaacatttcttttctccaaaccatataccctagcccgtgcacaggtgggcgcccgccgccacctgcggctcggtggactccggcatcgacacccctggcccccagcgccgcagatcgcaagctctcagcaacgcgtgcttggtaggaacccgtgccgaccgactcttcctctgcgggacggtctcgagtttggtcgggagatgggtgacgggagctgctgcgtctgcaaggaggcgccgcccaagtacaagtgcccttcttgtcgcacgccctaaggaatcttgtcaaaagatattgcatcaggaagaaattagcaagtcagcattgcaggaggaagttacactgcacaccacatgcactgcagaatctccaaatacagcgtgccctacaaaagctcttgaagttgaggacctaagctggcttgttgacaacaatagactaaggtccttagcggaactgaaagggatccaagacgctctcagggatcctgaactgcagagaatgatacttcaaattgatgggtcttccgaatcagaaaaagaattggagaaagtgatggaaggtcaagcttttcgcgagttcactgataagattcttgacattgtcaacccacaagaataaccgtctaccctgtttggtgggattctgacgctagagtaaacagaagcatccgggcaaacaaagcaaaagtggagctcatctctgttttcctttttccaggatggtataattcataacatatcttgagtcgcctgtttttccatgatggggtagactttagaacacatactgtgtcgcctggtgaaaggaaattacgtctgctgaaaaatctctcttgccaaatatagtttttcttctgtattctagtgttgtattctagtgtggtagacagcgactctacactgactactgagggtgtgtttggtttggttttgacttttgctctctaaaaacgaaaagcaaacggcccgagccagaaagcagcttttttcaaaagcatgctttcttgcaatgcaaattgaaagcacatttgaatctatttttagcggcttttgaatggaaccatgtaaataatatggaagaacttgtagcgacttttagtggcttctaaccaacggtataatatgaaagaatttgtagcga

SEQ ID NO: 31531 - DNA, 1426 bp, Zea Mays
cctcccgaacggcaacatttcttttctccaaaccatataccctagcccgtgcacaggtgggcgcccgccgccacctgcggctcggtggactccggcatcgacacccctggcccccagcgccgcagatcgcaagctctcagcaacgcgtgcttggtaggaacccgtgccgaccgactcttcctctgcgggacggtctcgagtttggtcgggagatgggtgacgggagctgctgcgtctgcaaggaggcgccgcccaagtacaagtgcccttcttgtcgcacgccctattgctctgtcacatgctttaaaaagcacaaaggtactgtcccaaccttgcagtttgtcaactttaaatttgtcaatgatttaatgtattctgacaggactaaagaatagattggaatgctttttgtactgtgatctccgacttagattgtttctcttgtcctgggagcagtggccacatgcttacaagctgtataacaatcaagtataggagttccagctgccttacatgaatgtgttgttatttggtgctaaatattgctttctttgcagaggaatcttgtcaaaagatattgcatcaggaagaaattagcaagtcagcattgcaggaggaagttacactgcacaccacatgcactgcagaatctccaaatacagcgtgccctacaaaagctcttgaagttgaggacctaagctggcttgttgacaacaatagactaaggtccttagcggaactgaaagggatccaagacgctctcagggatcctgaactgcagagaatgatacttcaaattgatgggtcttccgaatcagaaaaagaattggagaaagtgatggaaggtcaagcttttcgcgagttcactgataagattcttgacattgtcaacccacaagaataaccgtctaccctgtttggtgggattctgacgctagagtaaacagaagcatccgggcaaacaaagcaaaagtggagctcatctctgttttcctttttccaggatggtataattcataacatatcttgagtcgcctgtttttccatgatggggtagactttagaacacatactgtgtcgcctggtgaaaggaaattacgtctgctgaaaaatctctcttgccaaatatagtttttcttctgtattctagtgttgtattctagtgtggtagacagcgactctacactgactactgagggtgtgtttggtttggttttgacttttgctctctaaaaacgaaaagcaaacggcccgagccagaaagcagcttttttcaaaagcatgctttcttgcaatgcaaattgaaagcacatttgaatctatttttagcggcttttgaatggaaccatgtaaataatatggaagaacttgtagcgacttttagtggcttctaaccaacggtataatatgaaagaatttgtagcga

SEQ ID NO: 31532 - DNA, 1104 bp, Zea Mays
cctcccgaacggcaacatttcttttctccaaaccatataccctagcccgtgcacaggtgggcgcccgccgccacctgcggctcggtggactccggcatcgacacccctggcccccagcgccgcagatcgcaagctctcagcaacgcgtgcttggtaggaacccgtgccgaccgactcttcctctgcgggacggtctcgagtttggtcgggagatgggtgacgggagctgctgcgtctgcaaggaggcgccgcccaagtacaagtgcccttcttgtcgcacgccctattgctctgtcacatgctttaaaaagcacaaagaggaatcttgtcaaaagatattgcatcaggaagaaattagcaagtcagcattgcaggaggaagttacactgcacaccacatgcactgcagaatctccaaatacagcgtgccctacaaaagctcttgaagttgaggacctaagctggcttgttgacaacaatagactaaggtccttagcggaactgaaagggatccaagacgctctcagggatcctgaactgcagagaatgatacttcaaattgatgggtcttccgaatcagaaaaagaattggagaaagtgatggaaggtcaagcttttcgcgagttcactgataagattcttgacattgtcaacccacaagaataaccgtctaccctgtttggatggtataattcataacatatcttgagtcgcctgtttttccatgatggggtagactttagaacacatactgtgtcgcctggtgaaaggaaattacgtctgctgaaaaatctctcttgccaaatatagtttttcttctgtattctagtgttgtattctagtgtggtagacagcgactctacactgactactgagggtgtgtttggtttggttttgacttttgctctctaaaaacgaaaagcaaacggcccgagccagaaagcagcttttttcaaaagcatgctttcttgcaatgcaaattgaaagcacatttgaatctatttttagcggcttttgaatggaaccatgtaaataatatggaagaacttgtagcgacttttagtggcttctaaccaacggtataatatgaaagaatttgtagcga

SEQ ID NO: 31533 - DNA, 744 bp, Zea Mays
cttgattacatttctaggcacttcatattgcgttaacagagctgtcatatagcggaactgaaagggatccaagacgctctcagggatcctgaactgcagagaatgatacttcaaattgatgggtcttccgaatcagaaaaagaattggagaaagtgatggaaggtcaagcttttcgcgagttcactgataagattcttgacattgtcaacccacaagaataaccgtctaccctgtttggtgggattctgacgctagagtaaacagaagcatccgggcaaacaaagcaaaagtggagctcatctctgttttcctttttccaggatggtataattcataacatatcttgagtcgcctgtttttccatgatggggtagactttagaacacatactgtgtcgcctggtgaaaggaaattacgtctgctgaaaaatctctcttgccaaatatagtttttcttctgtattctagtgttgtattctagtgtggtagacagcgactctacactgactactgagggtgtgtttggtttggttttgacttttgctctctaaaaacgaaaagcaaacggcccgagccagaaagcagcttttttcaaaagcatgctttcttgcaatgcaaattgaaagcacatttgaatctatttttagcggcttttgaatggaaccatgtaaataatatggaagaacttgtagcgacttttagtggcttctaaccaacggtataatatgaaagaatttgtagcga

SEQ ID NO: 31534 - DNA, 211 bp, Zea Mays
  misc_feature (1)..(2): n is a, c, g, or t
nnacaaggggaaaaattcacgcagccggattatatccaagggcatctctgcagggaagtcaaggaattgctaccgtggcttggtcctgatgaactctagtgcagagaatgcttataattcttcacagtgtgactcattgttgatcggggataatgcggctgcgaacacctatcccaccattcagtatggtttgcgcctttgcggcaagtaa

SEQ ID NO: 31535 - DNA, 768 bp, Zea Mays
agaaggggctccgctcggctcgttcgaggattgggaaacggggtagctgtaatcagagttcagaaatctccacaatgttcataaccggaatacattcgaggaagaacatcatatatcagtggggaagagatagatgagcttgggaaacaagtgagttctggtaaaatggtaattgatgccctctcctcaccggttggcaccaatatagctacacacattcctccagcctattcacattgccaacctgtcacgtgcctcacatatcagtgtactataaaagggagacagtagctcccatctagggcagatcataagcaatagccatcgatatacaagcaccaatatactagatgtagggtattatctcgcattgagacctcggacttgtctaaactcgtgtcgtttgtgcgtttaccgtcgtcggttctcgatcttgcgatccacctcgtacaaattcactgtcgaaatttcctcgacaaatttcactaaagaagtttcagtaccaaagtaactttatttccataccattctagagtttagacccattgttagtacattctactacctccatccaataatataaggaaccgaatttgtactaagtccactatcctaagtttgacgaaaacatatagagagaaatattaacatctaccacatgaaagaagcggtttatgaaataatatttcataataggtctagatctaattgtgctcatttgatgctataaaaatattattcttttccgttccatccgttctaaattat

SEQ ID NO: 31536 - DNA, 1884 bp, Zea Mays
atagcacgaaatggttttgccttcgcttttgcttatgcgtacgcgcggcgaatcacggcgcccaccttccaaccggacttgagtcacttgactccgccgcgggattccccgccagatctcattctcgccccaaccctaaccgccgacggtggccatgatggccaccgagcccttgtccccggggaatctcgtcgaggacgtcgaaacactacccctggactcctcctccactctcgcggctacgacggacccgctgctccgcccacctcccccctcgtccaccttctctcccaccgccggtgagaaccatggcgcgtttctggacgaggaggatgaggacgtggtggatgacttcacgcctccgctggctccccatgccgctacggccgcgacgaagtcccgcgaggcgtcaccgtggttcgctgagatcactgtctccgagcctaggaagcacgcggagcccgcgaccggagccgtgggcgtcattcccggctcggccagctacgtctcctacctcatcgccactcaggtgcccgacggaggcgagttccgcgtgcgtcggcgattccgtgacgtcgtggcgctcgccgaccgcctcgcggagacccaccgcggcctctttgtaccggcgcggcccgacaagagcatcgtcgagggccaggtcatgcagcggcacgacttcgtgaaccagcggtgcgtcaccctccagcgctacctccgccgcctcgccgcgcaccccgtcgtcggccgcaaccccattctccacgccttcctcaccgagcccagcggcatccccacttccgacggtgagtctcccaggtggagccctgcgatgagtgctgctacgtccatggctgcttccgctccagtgacgcctaccaagagtgggagagacttttttggggtgttcaagggcctgaagcagacagtgacgaatgggtgggtggcggtaaggccgcctctagtggaggaggagattgacacaaagtaccttgtgcacaaggccaagcttgaggacttggagaaacatctggtgacagcatctcagcaggtctcttgggaatgtcattcatcaaactggctatgtttgaaaaggagcaggctgcgtgtagttctcagaaaagacgagctgctgacatcagtaattttgccagtgctgttattagagttagcagatcacagacaaaactaaacactgaaattgtaaaacatctgatctatatttcttgcatacccgggcaggaaaacttgaatctgtatcagcgagaggaatggatcaggagagatcaaggtatcaaaagatagaagaattgaaagaaacagtaagagccacggaagatgcaaaaacacgtgcacttaaagaattggaacttatcaaggaaaataacatgaatgaaattaaaagatttaacaaggaaaggcgccaggatttggtggagatgctaaaaggctttgtattggatcaggccacatactcggatcattttgctaccatatggacaaaggtagcagaagaaacaaaaggatatgcaaacagcagcagttgaagtaggatgtacatattcaggtgaatttgagctgttactgtgcagcgtgaatagctacactcattgagaatcatgcgactggcttatacacaaacaggaccacactcttcattcccgaaggatacatttctatggatttttctggggattggtatctcaagttgtgtacctgaattttttcagaaaatatagcaataccattttccacggcttcgtttccgcagccttggcttcatacagggtttacattttcgttttgtactttcaaaaaacttttttgttgaccaaagtttgaattttatattttcaaatttgaaatcgaatacactacaaatcg

SEQ ID NO: 31537 - DNA, 1981 bp, Zea Mays
atagcacgaaatggttttgccttcgcttttgcttatgcgtacgcgcggcgaatcacggcgcccaccttccaaccggacttgagtcacttgactccgccgcgggattccccgccagatctcattctcgccccaaccctaaccgccgacggtggccatgatggccaccgagcccttgtccccggggaatctcgtcgaggacgtcgaaacactacccctggactcctcctccactctcgcggctacgacggacccgctgctccgcccacctcccccctcgtccaccttctctcccaccgccggtgagaaccatggcgcgtttctggacgaggaggatgaggacgtggtggatgacttcacgcctccgctggctccccatgccgctacggccgcgacgaagtcccgcgaggcgtcaccgtggttcgctgagatcactgtctccgagcctaggaagcacgcggagcccgcgaccggagccgtgggcgtcattcccggctcggccagctacgtctcctacctcatcgccactcaggtgcccgacggaggcgagttccgcgtgcgtcggcgattccgtgacgtcgtggcgctcgccgaccgcctcgcggagacccaccgcggcctctttgtaccggcgcggcccgacaagagcatcgtcgagggccaggtcatgcagcggcacgacttcgtgaaccagcggtgcgtcaccctccagcgctacctccgccgcctcgccgcgcaccccgtcgtcggccgcaaccccattctccacgccttcctcaccgagcccagcggcatccccacttccgacggtgagtctcccaggtggagccctgcgatgagtgctgctacgtccatggctgcttccgctccagtgacgcctaccaagagtgggagagacttttttggggtgttcaagggcctgaagcagacagtgacgaatgggtgggtggcggtaaggccgcctctagtggaggaggagattgacacaaagtaccttgtgcacaaggccaagcttgaggacttggagaaacatctggtgacagcatctcagcaggtctcttgggaatgtcattcatcaaactggctatgtttgaaaaggagcaggctgcgtgtagttctcagaaaagacgagctgctgacatcagtaattttgccagtgctgttattagagttagcagatcacagacaaaactaaacactgaaattgtaaaacatctgggtattatccatgagtacatggagacaatggcttctgttcataatgcttttactgatcgttccaatgctttgcttcgtgtgcaaaatttgtcagcagatctatatttcttgcatacccgggcaggaaaacttgaatctgtatcagcgagaggaatggatcaggagagatcaaggtatcaaaagatagaagaattgaaagaaacagtaagagccacggaagatgcaaaaacacgtgcacttaaagaattggaacttatcaaggaaaataacatgaatgaaattaaaagatttaacaaggaaaggcgccaggatttggtggagatgctaaaaggctttgtattggatcaggccacatactcggatcattttgctaccatatggacaaaggtagcagaagaaacaaaaggatatgcaaacagcagcagttgaagtaggatgtacatattcaggtgaatttgagctgttactgtgcagcgtgaatagctacactcattgagaatcatgcgactggcttatacacaaacaggaccacactcttcattcccgaaggatacatttctatggatttttctggggattggtatctcaagttgtgtacctgaattttttcagaaaatatagcaataccattttccacggcttcgtttccgcagccttggcttcatacagggtttacattttcgttttgtactttcaaaaaacttttttgttgaccaaagtttgaattttatattttcaaatttgaaatcgaatacactacaaatcg

SEQ ID NO: 31538 - DNA, 1804 bp, Zea Mays
atagcacgaaatggttttgccttcgcttttgcttatgcgtacgcgcggcgaatcacggcgcccaccttccaaccggacttgagtcacttgactccgccgcgggattccccgccagatctcattctcgccccaaccctaaccgccgacggtggccatgatggccaccgagcccttgtccccggggaatctcgtcgaggacgtcgaaacactacccctggactcctcctccactctcgcggctacgacggacccgctgctccgcccacctcccccctcgtccaccttctctcccaccgccggtgagaaccatggcgcgtttctggacgaggaggatgaggacgtggtggatgacttcacgcctccgctggctccccatgccgctacggccgcgacgaagtcccgcgaggcgtcaccgtggttcgctgagatcactgtctccgagcctaggaagcacgcggagcccgcgaccggagccgtgggcgtcattcccggctcggccagctacgtctcctacctcatcgccactcaggtgcccgacggaggcgagttccgcgtgcgtcggcgattccgtgacgtcgtggcgctcgccgaccgcctcgcggagacccaccgcggcctctttgtaccggcgcggcccgacaagagcatcgtcgagggccaggtcatgcagcggcacgacttcgtgaaccagcggtggagccctgcgatgagtgctgctacgtccatggctgcttccgctccagtgacgcctaccaagagtgggagagacttttttggggtgttcaagggcctgaagcagacagtgacgaatgggtgggtggcggtaaggccgcctctagtggaggaggagattgacacaaagtaccttgtgcacaaggccaagcttgaggacttggagaaacatctggtgacagcatctcagcaggcagaggcatttgttaaagcttttgacgatctaagatcaacgacaggtctcttgggaatgtcattcatcaaactggctatgtttgaaaaggagcaggctgcgtgtagttctcagaaaagacgagctgctgacatcagtaattttgccagtgctgttattagagttagcagatcacagacaaaactaaacactgaaattgtaaaacatctgatctatatttcttgcatacccgggcaggaaaacttgaatctgtatcagcgagaggaatggatcaggagagatcaaggtatcaaaagatagaagaattgaaagaaacagtaagagccacggaagatgcaaaaacacgtgcacttaaagaattggaacttatcaaggaaaataacatgaatgaaattaaaagatttaacaaggaaaggcgccaggatttggtggagatgctaaaaggctttgtattggatcaggccacatactcggatcattttgctaccatatggacaaaggtagcagaagaaacaaaaggatatgcaaacagcagcagttgaagtaggatgtacatattcaggtgaatttgagctgttactgtgcagcgtgaatagctacactcattgagaatcatgcgactggcttatacacaaacaggaccacactcttcattcccgaaggatacatttctatggatttttctggggattggtatctcaagttgtgtacctgaattttttcagaaaatatagcaataccattttccacggcttcgtttccgcagccttggcttcatacagggtttacattttcgttttgtactttcaaaaaacttttttgttgaccaaagtttgaattttatattttcaaatttgaaatcgaatacactacaaatcg

SEQ ID NO: 31539 - DNA, 1996 bp, Zea Mays
atagcacgaaatggttttgccttcgcttttgcttatgcgtacgcgcggcgaatcacggcgcccaccttccaaccggacttgagtcacttgactccgccgcgggattccccgccagatctcattctcgccccaaccctaaccgccgacggtggccatgatggccaccgagcccttgtccccggggaatctcgtcgaggacgtcgaaacactacccctggactcctcctccactctcgcggctacgacggacccgctgctccgcccacctcccccctcgtccaccttctctcccaccgccggtgagaaccatggcgcgtttctggacgaggaggatgaggacgtggtggatgacttcacgcctccgctggctccccatgccgctacggccgcgacgaagtcccgcgaggcgtcaccgtggttcgctgagatcactgtctccgagcctaggaagcacgcggagcccgcgaccggagccgtgggcgtcattcccggctcggccagctacgtctcctacctcatcgccactcaggtgcccgacggaggcgagttccgcgtgcgtcggcgattccgtgacgtcgtggcgctcgccgaccgcctcgcggagacccaccgcggcctctttgtaccggcgcggcccgacaagagcatcgtcgagggccaggtcatgcagcggcacgacttcgtgaaccagcggtgcgtcaccctccagcgctacctccgccgcctcgccgcgcaccccgtcgtcggccgcaaccccattctccacgccttcctcaccgagcccagcggcatccccacttccgacggtgagtctcccaggtggagccctgcgatgagtgctgctacgtccatggctgcttccgctccagtgacgcctaccaagagtgggagagacttttttggggtgttcaagggcctgaagcagacagtgacgaatgggtgggtggcggtaaggccgcctctagtggaggaggagattgacacaaagtaccttgtgcacaaggccaagcttgaggacttggagaaacatctggtgacagcatctcagcaggcagaggcatttgttaaagcttttgacgatctaagatcaacgacaggtctcttgggaatgtcattcatcaaactggctatgtttgaaaaggagcaggctgcgtgtagttctcagaaaagacgagctgctgacatcagtaattttgccagtgctgttattagagttagcagatcacagacaaaactaaacactgaaattgtaaaacatctgatctatatttcttgcatacccgggcaggaaaacttgaatctgtatcagcgagaggaatggatcaggagagatcaaggtatcaaaagatagaagaattgaaagaaacagtaagagccacggaagatgcaaaaacacgtgcacttaaagaattggaacttatcaaggtgaatacaaaaatattggtatgctgtatgcattacaccatcaggaagggcaggtctggtgtaatggaaaataacatgaatgaaattaaaagatttaacaaggaaaggcgccaggatttggtggagatgctaaaaggctttgtattggatcaggccacatactcggatcattttgctaccatatggacaaaggtagcagaagaaacaaaaggatatgcaaacagcagcagttgaagtaggatgtacatattcaggtgaatttgagctgttactgtgcagcgtgaatagctacactcattgagaatcatgcgactggcttatacacaaacaggaccacactcttcattcccgaaggatacatttctatggatttttctggggattggtatctcaagttgtgtacctgaattttttcagaaaatatagcaataccattttccacggcttcgtttccgcagccttggcttcatacagggtttacattttcgttttgtactttcaaaaaacttttttgttgaccaaagtttgaattttatattttcaaatttgaaatcgaatacactacaaatcg

SEQ ID NO: 31540 - DNA, 2990 bp, Zea Mays
gacaaatttgatagaaacatgcctcaaagttcaaactactgttgagaagcgaaataaccgagatttccaagtccgttcaagagtctatttccaactgcttcgtgctttcccaggtcctccatttcacccccatcgccgtgcaccggcaccagcgcgggcgcgcctcgccgcccccaccgccgtatcaacgcacgaggatgctgccgcacgcgccatcccgaacctcgggggccctcaggttcaaaccgcacctccccaccaagccgccgctcctcacctcttcctccaccgccacccccgcctctgcctccgcctccacgcgcggccgcctctgcgccgccgccgccgccgccgccacacgccgggacctcctcgtcctcgtcccctcgctagtcgcagcgtccaccgtcctccagtcccttcccctcgccgcctccgccgcggcaggcgatgacaagccggccccaccgacgccggctcaggcgcaggcgcccgcctctccggcctcgcctccgcctccgcctccagcggacgagcctgctctgtcgagggtatacgacgccacggtcattggggagccccaggccgtcgggaaggaagcgcggcggagggtgtgggagaagctgattgcggcccgggtggtgtacctcggtgagtccgagctcgtgcccgaccgcgacgacagggtgctcgagctcgagatcgtcaggaagctcgcggccggctgcgccgaggccgggaggagcatctccctcgcgctcgaggcctttccctgcgacctccaggagcagctcaatcggttcatggatggcagaattgatggcaataccttaaggctttatacatctcactgggcaccagagcgatggcaggagtatgaaccacttctgaattactgccgtgataatggaataaagcttgttgcatgtgggactccacttgaggtggtaagaactgtgcaagcagaaggaattagaagcctttcaaaagctcaaagaaagctttatgctcctccagctggctcaggcttcgtttctggctttacatccatctcaggtcgatcattgatagacaaaatttcatcaactcgtggttccccttttggcccaagctcatatttatcagcacaggcaagagtagtcgatgattataccatgtcccagacaataatgaaagaaattagtaatggagatccttcaggaatgctcgttgttgtaactggtgcgagtcatgtaatgtatgggccacgaggaattggcgttcctgctaggatatctaaaaagatgcaaaagaaaaatcaagttgtgatacttcttgatcctgagaggcaaagtataaggagagaaggtgaaatccctgtagctgatttcttatggtactctgctgccaagccatgcagtcggaattgctttgatcgtgctgaaattgctagagttatgaatgctgctggcaggaggcgtgaagctttacctcaggatcttcagaaaggaatagatcttggtgtagtttctcctgagatattgcagaacttctttgacctcgagaaataccctgtcatggctgaactgattcaccgtttccaaggttttcgtgaaaggttgctagcagaccccaagtttctgaatagattagctattgaagaggccatatcaataactaccactcttctagcacaatatgaaaaacgaaaaggacgtttttttgaagagatcgactatgttctcactgatacaattaggggttctgttgttgacttctttacagtgtggcttcctgcacctacaatttcactcttatcttttgccgacgatggctctggtgagagtgtggagcttctgaaaggaattttaggatcactgccagataatgcatttcaaaagggtattgttgggcagaactggaacattaaccagaggtttgcatcggtgcttatgggtggtctaaaacttgctggagttggattcatttctagtattggagctggagttgcttcagatgtcttatatggtgcccgtcggattcttaaaccttctgcaaatatggaagtggggcgcaaaagatctccgatctggaaatcagcagctgtttatagttgcttccttggaacatcagcaaacctgcgatatcaggtcatagctggtctgattgagcatcggctaggagagaatctgatggcctactatgaccagccacttattgctaacctgttgtcctttgtttcaaggacagttaactcatactggggaacacagcataggaccaaagactgtagaataagcaatggatcgatcttgcacgagttacaggcgtgcaaagaactaacaaagagctgccttctcctgaggtttcgagcgcatctgaaatgccactgctagaatgtggcacggcagaggtacagaatgcggacgacagcagtaaccagtcaaatgacttgacataagttatcgcgcagtggccatacaaaacacagagcagcttccttccatggcacaccgtatactagacaaaccgtacatgcatataaatgggactgtcttcttagagccaggctgtgaagcttagccatcgcgtcatgtggagagacgaatctgaaatcctgaagagtaaagcttttgaagactttcgacttgttatgatcacagccatttttacacaccatcatggggtgaataccgtttgtacattcatagaggagacggccgaagaattctttggagcacgtacagcattttacacgtgaaatttgttcagaaaacattactggagattgtcacatggcaaaaaggatcaggatcgttgcttgtgaattgtgatgcaccttgtatgcaatgcacttgaatccagagtgcacgtgtgattttattgtctgaacgaaccgtgcgacggcctgatgtttcctgtggtattgctgtggtgtgatcaaactagtccctatgtttccagtattccacgtttgcctttccaacgctggtgagtcagtgagtggtgaa

SEQ ID NO: 31541 - DNA, 2200 bp, Zea Mays
cgttcaagagtctatttccaactgcttcgtgctttcccaggtcctccatttcacccccatcgccgtgcaccggcaccagcgcgggcgcgcctcgccgcccccaccgccgtatcaacgcacgaggatgctgccgcacgcgccatcccgaacctcgggggccctcaggttcaaaccgcacctccccaccaagccgccgctcctcacctcttcctccaccgccacccccgcctctgcctccgcctccacgcgcggccgcctctgcgccgccgccgccgccgccgccacacgccgggacctcctcgtcctcgtcccctcgctagtcgcagcgtccaccgtcctccagtcccttcccctcgccgcctccgccgcggcaggcgatgacaagccggccccaccgacgccggctcaggcgcaggcgcccgcctctccggcctcgcctccgcctccgcctccagcggacgagcctgctctgtcgagggtatacgacgccacggtcattggggagccccaggccgtcgggaaggaagcgcggcggagggtgtgggagaagctgattgcggcccgggtggtgtacctcggtgagtccgagctcgtgcccgaccgcgacgacagggtgctcgagctcgagatcgtcaggaagctcgcggccggctgcgccgaggccgggaggagcatctccctcgcgctcgaggcctttccctgcgacctccaggagcagctcaatcggttcatggatggcagaattgatggcaataccttaaggctttatacatctcactgggcaccagagcgatggcaggagtatgaaccacttctgaattactgccgtgataatggaataaagcttgttgcatgtgggactccacttgaggtggtaagaactgtgcaagcagaaggaattagaagcctttcaaaagctcaaagaaagctttatgctcctccagctggctcaggcttcgtttctggctttacatccatctcaggtcgatcattgatagacaaaatttcatcaactcgtggttccccttttggcccaagctcatatttatcagcacaggcaagagtagtcgatgattataccatgtcccagacaataatgaaagaaattagtaatggagatccttcaggaatgctcgttgttgtaactggtgcgagtcatgtaatgtatgggccacgaggaattggcgttcctgctaggatatctaaaaagatgcaaaagaaaaatcaagttgtgatacttcttgatcctgagaggcaaagtataaggagagaaggtgaaatccctgtagctgatttcttatggtactctgctgccaagccatgcagtcggaattgctttgatcgtgctgaaattgctagagttatgaatgctgctggcaggaggcgtgaagctttacctcaggatcttcagaaaggaatagatcttggtgtagtttctcctgagatattgcagaacttctttgacctcgagaaataccctgtcatggctgaactgattcaccgtttccaaggttttcgtgaaaggttgctagcagaccccaagtttctgaatagattagctattgaagaggccatatcaataactaccactcttctagcacaatatgaaaaacgaaaaggacgtttttttgaagagatcgactatgttctcactgatacaattaggggttctgttgttgacttctttacagtgtggcttcctgcacctacaatttcactcttatcttttgccgacgatggctctggtgagagtgtggagcttctgaaaggaattttaggatcactgccagataatgcatttcaaaagggtattgttgggcagaactggaacattaaccagaggtttgcatcggtgcttatgggtggtctaaaacttgctggagttggattcatttctagtattggagctggagttgcttcagatgtcttatatggtgcccgtcggattcttaaaccttctgcaaatatggaagtggggcgcaaaagatctccgatctggaaatcagcagctgtttatagttgcttccttggaacatcagcaaacctgcgatatcaggtcatagctggtctgattgagcatcggctaggagagaatctgatggcctactatgaccagccacttattgctaacctgttgtcctttgtttcaaggacagttaactcatactggggaacacagaagaatttacagactctttct

SEQ ID NO: 31542 - DNA, 1585 bp, Zea Mays
aagaaatattgttatgaacctatggatcttcagaaaggaatagatcttggtgtagtttctcctgagatattgcagaacttctttgacctcgagaaataccctgtcatggctgaactgattcaccgtttccaaggttttcgtgaaaggttgctagcagaccccaagtttctgaatagattagctattgaagaggccatatcaataactaccactcttctagcacaatatgaaaaacgaaaaggacgtttttttgaagagatcgactatgttctcactgatacaattaggggttctgttgttgacttctttacagtgtggcttcctgcacctacaatttcactcttatcttttgccgacgatggctctggtgagagtgtggagcttctgaaaggaattttaggatcactgccagataatgcatttcaaaagggtattgttgggcagaactggaacattaaccagaggtttgcatcggtgcttatgggtggtctaaaacttgctggagttggattcatttctagtattggagctggagttgcttcagatgtcttatatggtgcccgtcggattcttaaaccttctgcaaatatggaagtggggcgcaaaagatctccgatctggaaatcagcagctgtttatagttgcttccttggaacatcagcaaacctgcgatatcaggtcatagctggtctgattgagcatcggctaggagagaatctgatggcctactatgaccagccacttattgctaacctgttgtcctttgtttcaaggacagttaactcatactggggaacacagtgttctctttctttgaacagaagaatttacagactctttcttatagcataggaccaaagactgtagaataagcaatggatcgatcttgcacgagttacaggcgtgcaaagaactaacaaagagctgccttctcctgaggtttcgagcgcatctgaaatgccactgctagaatgtggcacggcagaggtacagaatgcggacgacagcagtaaccagtcaaatgacttgacataagttatcgcgcagtggccatacaaaacacagagcagcttccttccatggcacaccgtatactagacaaaccgtacatgcatataaatgggactgtcttcttagagccaggctgtgaagcttagccatcgcgtcatgtggagagacgaatctgaaatcctgaagagtaaagcttttgaagactttcgacttgttatgatcacagccatttttacacaccatcatggggtgaataccgtttgtacattcatagaggagacggccgaagaattctttggagcacgtacagcattttacacgtgaaatttgttcagaaaacattactggagattgtcacatggcaaaaaggatcaggatcgttgcttgtgaattgtgatgcaccttgtatgcaatgcacttgaatccagagtgcacgtgtgattttattgtctgaacgaaccgtgcgacggcctgatgtttcctgtggtattgctgtggtgtgatcaaactagtccctatgtttccagtattccacgtttgcctttccaacgctggtgagtcagtgagtggtgaa

SEQ ID NO: 31543 - DNA, 2445 bp, Zea Mays
attcgctcctcccccaacgcgactatgctcgttgaggacggagaccggtaatattcgccgcggagtgttcgagaatcggaggcttggacttcgagtgcctcctcggtggcctcgcgtaaagcacggcggcgcgaagacggctgcggaattcaggtgctttccctgctttcaacgccggctggtttcgtctgacccgggaacattgcttggaactgaagttgcagacttcctccgaaggaatagtttttcttcctttcaccggactacaattcggtgccattcgtcaggaattgagggtttacgatggatctaggaaactccttgcaggttcacggtggatctaggtgaaggtgccgttagtcgagtgtgtggctctacggatcctgatcagtctagcgcagctttccctctgaccatttcgaggggactcctttctctggtttagctccattcaatagagatgctgtaatttctataataaagtggtccgagtgaatcatcctgtgcccttgcacaagcctcagtcactccataaatggctcggaccactgaagatgatatagaagatgtgccgtgctcagatccaggttcaccgtttctggctgaatatcatatcgcagttcctgctcttcatgatggaccaacgcaaggtgcagctcgtcatgagcgacggcttcttgatttcctggaagccactccctcggtgcagtggctaaagaagatcaacctttgctccccgttgataaaactccggcttccatccactggcgcccatggcagccttcatgctcagttcatcagaacgatccactggagttcagttttcactgtatgcaagaaatggctcaagcatcctatgaacatagctctcctaatatggctgctctgtgttggtgcctctggtggcatgctagtcttactaatgttgggactgctgaacgacgcattcccttccaagcccttaaggaaccagtggatagagatcgacaatcaaatacttaacgccctcttcaccctcatgagcttatacgagcacccaaatttcatccaccacactgttctcctctgccggtggctgccagaggacgctgctaagctcaggaaagtttactgcaagaatgagatgccccgtcgaaatgagcgagcacacatatcctttgtggttgccctcctccacatcacttgcttatgccagtatgctgattgtgggctgtactggggctaccccagcacatcacgctctgattttgccgacaacttcttcttcatcctaggcatagctgcaccagtctttgctgggctatacgcagtgtacagtcctcttggcagaggcaacgatgctctgtctgatgaagaaaccaatgaatcaggcacggttcgggtcgtcgagtcgcctgaaacaggaactgtggtgagcaatcccgcatgggctggcgggctgtttgactgcagcgaggaccccactgcatgctacctctctttcctctgcacgttctgcgtgtttgggtggaacatggagcggcttggattcggcaacatgtatgtgcacacggtcatcttcctgcttctgtgtgttgcgccgttctgggtgttcaatgtcacggcaatgaacatccacaactacgtcctcggtgatttcatcggcgctgcagggatcgtgctgtgtttctttggtctgctgtacggtggtttctggaggatccagatgaggaagacatttgggctgcccagaagcaggtggtgcttcggatcggcgtcactaacagactacacgcagtggctattctgctggccttgcgtgcttgcacaggaggtgcgcacggggaatctatacgacgcgaagaacggcagcttctatgagaaagttatggacggcgatggtgtggagactgatgcgggatcagtggatacggccgaattgccggtctcttgtggagtagaagaggcgaacggtatcgatgtcaaactcacggtggatggtgaaatgatcccacccacccaaccagtaatagaatgtggggagagggaagggatcgattcagaagtcgtggcaaatgaaggacccgcaactgaaggatggtttgagttatggtatttagctgttcagttgcttagtgatttagcttgttttatattaaaaggacgatggaacgaataggcgataatgccagagatatctaaactgatgttttagaggtgcaggctaacaggaaaaaaatttcatacactttattacaccgattgatttcaacagcaggcttgagcctcttatagagcaattgtgcaagtcggctaatgtaatcagtaactttatattattggttggtgacagttgaaaaggatattcttatcttctctagtcctgtagtggcctttggctgttttccagtgctccttttagagtgtgaagtgctgtccgattttgtgttttcaccttatcattaa

SEQ ID NO: 31544 - DNA, 2135 bp, Zea Mays
cgctcctcccccaacgcgactatgctcgttgaggacggagaccggtaatattcgccgcggagtgttcgagaatcggaggcttggacttcgagtgcctcctcggtggcctcgcgtaaagcacggcggcgcgaagacggctgcggaattcagatgctgtaatttctataataaagtggtccgagtgaatcatcctgtgcccttgcacaagcctcagtcactccataaatggctcggaccactgaagatgatatagaagatgtgccgtgctcagatccaggttcaccgtttctggctgaatatcatatcgcagttcctgctcttcatgatggaccaacgcaaggtgcagctcgtcatgagcgacggcttcttgatttcctggaagccactccctcggtgcagtggctaaagaagatcaacctttgctccccgttgataaaactccggcttccatccactggcgcccatggcagccttcatgctcagttcatcagaacgatccactggagttcagttttcactgtatgcaagaaatggctcaagcatcctatgaacatagctctcctaatatggctgctctgtgttggtgcctctggtggcatgctagtcttactaatgttgggactgctgaacgacgcattcccttccaagcccttaaggaaccagtggatagagatcgacaatcaaatacttaacgccctcttcaccctcatgagcttatacgagcacccaaatttcatccaccacactgttctcctctgccggtggctgccagaggacgctgctaagctcaggaaagtttactgcaagaatgagatgccccgtcgaaatgagcgagcacacatatcctttgtggttgccctcctccacatcacttgcttatgccagtatgctgattgtgggctgtactggggctaccccagcacatcacgctctgattttgccgacaacttcttcttcatcctaggcatagctgcaccagtctttgctgggctatacgcagtgtacagtcctcttggcagaggcaacgatgctctgtctgatgaagaaaccaatgaatcaggcacggttcgggtcgtcgagtcgcctgaaacaggaactgtggtgagcaatcccgcatgggctggcgggctgtttgactgcagcgaggaccccactgcatgctacctctctttcctctgcacgttctgcgtgtttgggtggaacatggagcggcttggattcggcaacatgtatgtgcacacggtcatcttcctgcttctgtgtgttgcgccgttctgggtgttcaatgtcacggcaatgaacatccacaactacgtcctcggtgatttcatcggcgctgcagggatcgtgctgtgtttctttggtctgctgtacggtggtttctggaggatccagatgaggaagacatttgggctgcccagaagcaggtggtgcttcggatcggcgtcactaacagactacacgcagtggctattctgctggccttgcgtgcttgcacaggaggtgcgcacggggaatctatacgacgcgaagaacggcagcttctatgagaaagttatggacggcgatggtgtggagactgatgcgggatcagtggatacggccgaattgccggtctcttgtggagtagaagaggcgaacggtatcgatgtcaaactcacggtggatggtgaaatgatcccacccacccaaccagtaatagaatgtggggagagggaagggatcgattcagaagtcgtggcaaatgaaggacccgcaactgaaggatggtttgagttatggtatttagctgttcagttgcttagtgatttagcttgttttatattaaaaggacgatggaacgaataggcgataatgccagagatatctaaactgatgttttagaggtgcaggctaacaggaaaaaaatttcatacactttattacaccgattgatttcaacagcaggcttgagcctcttatagagcaattgtgcaagtcggctaatgtaatcagtaactttatattattggttggtgacagttgaaaaggatattcttatcttctctagtcctgtagtggcctttggctgttttccagtgctccttttagagtgtgaagtgctgtccgattttgtgttttcaccttatcattaa

SEQ ID NO: 31545 - DNA, 2217 bp, Zea Mays
aaacgcagccggtgggcggagccggtaattatcactcgcccctcttcaatcctcctccggtcggaaccctagcccttcctgccagcggtgggcggcgcttggccatgtacccgtcaggggccatggtgggggcggcgcccgcggcgcgcccgagcgcgtcgtcgcgggtggagaaggccacgagccacctgctcatggggcccgactgggccgtcaacctcgaaatctgcgacatcctcaacgccgacgtatggcaaacaaaggatgtggtgaaggcagtgaaaaagagattgcagaacaaggacccaaaggttcagttttttgctttaacgcttttggagacaatgatgaagaactgtggtgaatatgttcagtttgaagttgctgaacaacatgttctgcaagaaatggttaaaattatccagaagaagaatgatatgcaggtaagggacaaaatattattgcttttggactcctggcaagaggcatttggaggacctggaagtaaatacccacaatatcattgggcataccttgaagtaaagacgacaggtgtggtgttcccaaaacgtcctatggatgccccaccaatatttactcctccagctacacataattctgagacctatggttcacccagatattctgcgggaagtctaagtgacagaatgtcctcagatgttgagactctgagtttaggagatttgaataagattcgaaatgtgacagacctactgaatgatatggtgtatgctttaaacccatctgatcgaatggctattaacgatgaaattatcacagatcttgtgacccagtgtcgctcaaatcaacaaaagcttctgcagtttgtcagttcatcaggttactaaagcaaggactggagacaaatgatctcttacaaagcgtactttcaaagtatgatgctgtggcctctggtgctcctttggcggttgaagcatctgtgagagaggcaatcgaggctcctgcagtaaagtcatatgcaccccctgaacataatgataatgttaacgaagaggaagatgagtttgcccagctagctcaaaggaaaaacaaatccgtcgtaagtagtagcgacgatgcatcatccagcactttgggggaccttgcccttgtacccattgatcaagcagtttcagaatcgccatcttctgttgcaagcaatgcgctggttcttcttgatcctgctcccagtactagcactgaatcaaaagagctggacatgatcgaccttctaagcctcaccttgtgcagccctactcctgaaacttcaacagattcttcagcacaggatcaaaatggaccccagcaacctgcagttacacataatcaaaaagggcttcaggaacctacagttacaaatgggcaacaatatccttctagtgtgccacagtatccttcaaactaccagcctcacactgcaaaccaggcatatgctccacagaccagcaactatgtggcaccttgggcccagaccggagcatatccacctcagcctccggcatatgcatctggctatgcctaccctgcaccgccatgggtggcgcctacacatcctgttgattctaacccttttctttcggtcaattaccaagatccacgccctgctgccacttctgttgctcaaacagcaacatatgcacctcccccagcttcatatcccccttcaatatcttatgcacagtttgcaaccccccagtcaattcagcatagcaattctgtggcttcaccgagcaatggtcagattgcaaatcaagcacaaatgaatgtgaatcaacaaccaaaagattcttcggcagcatctagcagaccatactacatacctgataatctattcagtgatttgatcgatgcaaaaagttttggcggtggaaacaagatgggcgggcccactacaatgggtagctcaaatggtggccagcctatgattggtggaaagaaatagggttatttgtctatatatatacagctgatggtgatcggtagctgccttgttatttattatgattactttgtctggtgtacatttgtacttgtatatcgccattcccccttttgacagatttggctgcattggttgattcgtgggtgcaactgttaagtttaacagagatatggacaattgctcatgtacataaatgattagcatttgctccactgaggtggatggttgtgatgaaatctgttggtattgaattc

SEQ ID NO: 31546 - DNA, 2221 bp, Zea Mays
ctgcttgcctgctcggctaacagcctaacagcaagccacatatctggcttgcggccacacccatcgttgtcgggcattgatgaatggtgccggttcgccttaaccgccggagctagctctgcataaatataatacgaacagctcgatctcaagtgaagtggcagcagcaagcaccacggagagggacacgactcctctccctccctccctcaccatgccttccccttcctcggcccactggctgagcctcgtcgggagcatctggctgcagaccatcaacgggcccaacgcggacttccccgtctactcgtcgcagctcaaggacctgaagcacatcacgcaggtgcagctcaacttcctggccttcgcgtccgacgcgggcaagctcttcggctggttctccggggtggcggcgctgcacctgccgctgtggctcgtggccttggtcggcgcatccttcggcctcgtcggctacggggtccagtacctcttcctcgacagcgccgccctccgctactggcacctgttcctgctcacctccctggccgggaacggcatctgctggatcaacaccgtctgctacctcctctgcatccgcaacttcggcagcagccgcagccgcgtcgccgtgagcctcgccgccagctacctcggcctcagcgccaaggtctacaccagcctggcggactccatacccggccaccaggccacctccaaggccaagacctacctcctcctcaatgccgtcgtgcccatgctcgtcaccgtcgcggtggcgccgtcgctcagggcggtggacctcacggtcacgggcgagggccaggcgggggccagcacggacgcggcattcctcgtcatgttcgccatcacgctcgccacgggggcctgcgccgtggttggcagcatcggctcctccacgtccggcggcgggctgtcgtcgagggagcacgtggtcagcctcgccgtgctgctggccacccccgtgctcatcccgctggcgctcagggtccgggagagcctggacaggatacgggagaccaagcgggagaacaggatctacgacctcggcaccgacgacgatggcgtcgtcgtcgacgtggccgccaccgccgagagcaaggacggagacggcggcgtcacggagaaaccgcaggaggaggtcgacggcctccggctgctgaggaagctcgacttctggctctacttcttcagctacatgttcagtggcaccctgggcctggtgttcttgaacaacctgggacagatagccgagtcgcggcggctcggccagacttccacgctcgtctcgctgtcgtcttcgtttggattcttcggccgcctgctcccgtccttcttggactactactccgcgaagagcggctactccatctcaaggacgggatccatggcgtcgctgatggcgcccatgtccggcgccttcctcctgctcctcaaccggagccacttcatcctgtacctgagcacggccgtgatcggcacgtgcacgggcgccatcacgtcggtggccgtgtcggcgacgagcgagctgttcggggccaagaacttcggcgtgaaccacaacgtggtggtgagcaacatccccgtgggctccctctgcttcggctactccgccgcctacctctaccagcgcggggcgcggggcggcggccaccactgcgtcggcgccgcctgctaccgggagacgttcgtcgtgtggggcgccacgtgcgccgtcggcacgctgctctgcgccgtcctctacgcgcggtcgcgccgggaggctaccgggaccggcggcggatgatggacaagtaaggacgtcacgtctcgcccgcttagctaattgcctgccgtcatcgaggtacggtaggtggtactagctagcttagcacgcaggctagctccagaagtttgtcatctgagggccggcctgcgattaatcggtcatacacccatgacccatcaatcggccaagcatcatctgcctgtaggcgatgtgtaacttttgatccttgtttttttttttcactcttcgagtttctcttgactgatcccggtggaagggggtacagaaaaaaaaaatccttggtggaggctcatcatgacatgagtagatattgtgcagcagcatttgtggatctctttctcttcggatgctagctggaccacgtagagcgagaggttgttggatcgcgcgcgcgcgcgtgcctacgcggacccg

SEQ ID NO: 31547 - DNA, 1048 bp, Zea Mays
agtgtgcaccgggccggccatggcggagagccgggtgtggttggcgacgtgtcctgtatcgctctctctctctgtgtgtgggttcagatttgatgtgctagcggctggtccatgaatgcggttctcggagcagactacgaacaacagaacaaggcaacagctaatcaagccggtttgatctaaacgcggtctcatcggtacgtgctcagtagatagaggagaagaagaggtagcagagagagatggataccaacctgattaccgcaagatgctgccgctcgtcctcgtctcaaggactctgaacggagcaacacagtactccccctgcagccgctgccgctgccactgcaagcccaggaccgaacgccgcacaggcagatggcaacggcgacgcacaaccccgccagctttagcatggatctgccacaccacctccacctctgcatctgcctctgcctcccccgggagcactccatggtctgcagggaaactcctctttttcaagccgccgcagcaaactgtgtagaggcggacgtcggcaggcaaccaaatctaggaaaccgagaggcacgggggagggcgtgcgctcgcgctgcgcaccttcactgctgcattgtaatatagagccccccgcctctagctgcgtccctctcccgctcaaacctcagcgcggctacctcaggcaacctgatcgtcaagtttaatggatcagcgagaagccgagaaggaggcactgtgcacggccatactacaggaggctagtacagaagaggccggagagcacgcaggcagaggggcagtagccagtagctgcgtacactgactcaagtagtgcacgtgctagcagcctcgcatcctccacctctcggctctcgcctcctcacccgtcacttcaggtagacttctaggagtagttgtgtgtgtctggggtggggtgactgctcggtgccggctactgctagagatccatgtcaatcggcgtcaccaaatgctactactgccgctgccggaccggatggatactcatcactcagtcacagttactcgc

SEQ ID NO: 31548 - DNA, 1716 bp, Zea Mays
cctctgccactaaataagcgagagccccatcacgtcgagtcttggatccttgaagattctgcgccatctcatcatctctctcgctgggtcctattcttggcaggcttttgcgcttcctgggtccgtccagatgcgcaataccagcagttcctgaagtttcaggacccgccggctaaaagactgaagatcacagacgctcggagtcggacgccgcggctgactacggaatcttaagagatggagccggcgaaggggaagccgaggagggcgtcatccagcctgcttctgcgaatcacggacatctgcaaggtgcattccgtcgctgtggcggagaacgtcggcgagaagcccaacgccggcagcacaaccggcgggggcagcagcgaagacggcgcgcacctgaaagtatatccacaccaagtctctgaccacgagagctgttccggaacttccaccgcccgctacgaggaagcggttgtcgagaggcttcttggcgcggtctctggtctgaagctggcctatgtgaaggttcagcaggcacatgtgccgtatgatcctgaaagggttgcggtcgccggtgagcgttttgcgtcggagcttgaagagacggctgggcttaaagatctctacttcggtgccgataagtggagcaatccaatgcaccagtctcgtgtcagctcacggatccatgagcgtcaaaggctcgccctggagctgcaggccgacatatgcaagaaagactctgagcttgttctgctgcgagcagagctcgaagaactggaaaggagaaatctggagctgaaggaggaggctgaccagagagcgtcgcagatgaataaagaaataagtttcggcattggcaaagtgggatcggttgatacgttcatcgagttgtttgagaactcgtcgaagtgtatacatgatttcacaaagctcgtcgtcagctggatgaaggtttcagctggatgggacctcgactgctcaaagtttccagccgatagatcccttgtgtttgagaaaagggctcacaggaagtattgcgttgaggcctactttgctcgggcgatgctggcggcgaccaaagaggagtatttctccatggattccttctaccgtgttatgagttcaaaggacccattcgacgctcttgtggagtcaccaaattccgcctttgggagattctgccgggagaagtatctggttgctgtgccaagtactatggaggtatccttcctgggaactctggaccacagagcatttgtcgaggcgggcggccatccaaggacgcagttttaccagacatttgcgaggatggctagatctgtctgggcattgctcacggttgctcgcctcttgaaaccaagggccgagatgttcttcgtcaagagcggcgttcggttccaaaggaagcacatggaaagcgtaccagctaggctgaccgcggaggaagcaaagatcggtgttgggtttacagtgatgccgggctttaagatcggatgcactatcgtcaggtgcagggtgtacctgtctatgctcaacgcaagaggcatctagacacattattatataaataactacataattaggtaagcaaaacgcaatagctttgtaagtgctccacagttctataaataagcctgcagttggaagctcctcttgtattatgacaaggaacacgagctaataatagatgacctccagagcagtgttctaaat

SEQ ID NO: 31549 - DNA, 809 bp, Zea Mays
gagcccgcgactgccctttcctcttatttccattaccccgagcgtacattctctcctctctctcttggcggcgactcggcgaccggcgctgctgccccacgtttggtgcccaggtcttcgtgggccccttagccggcgacgagcatcaccagctgaaagatggcgaggataccgtctttgaagagcctcaatgcgtttccacatgcggaggaacacttgttgaagaagacttactctggtgctgttgtgacaattcttgggctacttataatgattacactgtttgtacatgagctgcagttttatctcaccacatacacagtgcatcagatgtctgtagatctaaaacgaggagagactctgccaattcatgtcaacatgtcatttccttctttgccatgtgaagtattgagtgtggatgcaattgacatgtctgggaaacatgaagttgatttgcatacaaatatttggaagcttcgcttggacaagcatggccatatcatcggtacagagtacttgtctgacctagttgaaaaggagcatggggcacatcatgatcatgttagcatgtggtgttattggttaccctggtgattcaggcttcaacgcagtgcctacctccatagaagctgaaagtccctagctgtttccttttccagaagagaaaaaactgcacctttttggtaatctataattgacggagaagcatatgttctgtcttgattgtcatggtaaaacctgtataaaatataacaaactgaattgatggaccaaagatgtttcagttggaatatctcatatgatggttg

SEQ ID NO: 31550 - DNA, 668 bp, Zea Mays
  misc_feature (667)..(668): n is a, c, g, or t
gagcccgcgactgccctttcctcttatttccattaccccgagcgtacattctctcctctctctcttggcggcgactcggcgaccggcgctgctgccccacgtttggtgcccaggtcttcgtgggccccttagccggcgacgagcatcaccagctgaaagatggcgaggataccgtctttgaagagcctcaatgcgtttccacatgcggaggaacacttgttgaagaagacttactctggtgctgttgtgacaattcttgggctacttataatgattacactgtttgtacatgagctgcagttttatctcaccacatacacagtgcatcagatctaaaacgaggagagactctgccaattcatgtcaacatgtcatttccttctttgccatgtgaagtattgagtgtggatgcaattgacatgtctgggaaacatgaagttgatttgcatacaaatatttggaagcttcgcttggacaagcatggccatatcatcggtacagagtacttgtctgacctagttgaaaaggagcatggggcacatcatgatcatgaccacgaacaggagcatcatgatgaacaaaagaagcatgaacaaaccttcaacgaagaagcacagaaaatgatcaagagtgtcaaacaagcactgggaaatggtgaagggtgtcnn

SEQ ID NO: 31551 - DNA, 669 bp, Zea Mays
  misc_feature (668)..(669): n is a, c, g, or t
gagcccgcgactgccctttcctcttatttccattaccccgagcgtacattctctcctctctctcttggcggcgactcggcgaccggcgctgctgccccacgtttggtgcccaggtcttcgtgggccccttagccggcgacgagcatcaccagctgaaagatggcgaggataccgtctttgaagagcctcaatgcgtttccacatgcggaggaacacttgttgaagaagacttactctgtgacaattcttgggctacttataatgattacactgtttgtacatgagctgcagttttatctcaccacatacacagtgcatcagatgtctgtagatctaaaacgaggagagactctgccaattcatgtcaacatgtcatttccttctttgccatgtgaagtattgagtgtggatgcaattgacatgtctgggaaacatgaagttgatttgcatacaaatatttggaagcttcgcttggacaagcatggccatatcatcggtacagagtacttgtctgacctagttgaaaaggagcatggggcacatcatgatcatgaccacgaacaggagcatcatgatgaacaaaagaagcatgaacaaaccttcaacgaagaagcacagaaaatgatcaagagtgtcaaacaagcactgggaaatggtgaagggtgtcnn

SEQ ID NO: 31552 - DNA, 694 bp, Zea Mays
  misc_feature (693)..(694): n is a, c, g, or t
gagcccgcgactgccctttcctcttatttccattaccccgagcgtacattctctcctctctctcttggcggcgactcggcgaccggcgctgctgccccacgtttggtgcccaggtcttcgtgggccccttagccggcgacgagcatcaccagctgaaagatggcgaggataccgtctttgaagagcctcaatgcgtttccacatgcggaggaacacttgttgaagaagacttactctggtgctgttgtgacaattcttgggctacttataatgattacactgtttgtacatgagctgcagttttatctcaccacatacacagtgcatcagttgatattgtctgcagatgtctgtagatctaaaacgaggagagactctgccaattcatgtcaacatgtcatttccttctttgccatgtgaagtattgagtgtggatgcaattgacatgtctgggaaacatgaagttgatttgcatacaaatatttggaagcttcgcttggacaagcatggccatatcatcggtacagagtacttgtctgacctagttgaaaaggagcatggggcacatcatgatcatgaccacgaacaggagcatcatgatgaacaaaagaagcatgaacaaaccttcaacgaagaagcacagaaaatgatcaagagtgtcaaacaagcactgggaaatggtgaagggtgtcnn

SEQ ID NO: 31553 - DNA, 572 bp, Zea Mays
  misc_feature (571)..(572): n is a, c, g, or t
ctaacttactctcgtgctcggatctgatctgattactagttcatatctgaaagatggcgaggataccgtctttgaagagcctcaatgcgtttccacatgcggaggaacacttgttgaagaagacttactctggtgctgttgtgacaattcttgggctacttataatgattacactgtttgtacatgagctgcagttttatctcaccacatacacagtgcatcagatgtctgtagatctaaaacgaggagagactctgccaattcatgtcaacatgtcatttccttctttgccatgtgaagtattgagtgtggatgcaattgacatgtctgggaaacatgaagttgatttgcatacaaatatttggaagcttcgcttggacaagcatggccatatcatcggtacagagtacttgtctgacctagttgaaaaggagcatggggcacatcatgatcatgaccacgaacaggagcatcatgatgaacaaaagaagcatgaacaaaccttcaacgaagaagcacagaaaatgatcaagagtgtcaaacaagcactgggaaatggtgaagggtgtcnn

SEQ ID NO: 31554 - DNA, 429 bp, Zea Mays
  misc_feature (428)..(429): n is a, c, g, or t
ttataaatcaatttccttgttcaactactcatgtgttttctgatgttgtagtttctgttaattatcattgatgagattatgatgtctgtagatctaaaacgaggagagactctgccaattcatgtcaacatgtcatttccttctttgccatgtgaagtattgagtgtggatgcaattgacatgtctgggaaacatgaagttgatttgcatacaaatatttggaagcttcgcttggacaagcatggccatatcatcggtacagagtacttgtctgacctagttgaaaaggagcatggggcacatcatgatcatgaccacgaacaggagcatcatgatgaacaaaagaagcatgaacaaaccttcaacgaagaagcacagaaaatgatcaagagtgtcaaacaagcactgggaaatggtgaagggtgtcnn

SEQ ID NO: 31555 - DNA, 1576 bp, Zea Mays
aggacgccctggccctgaacaagatgctaggggtccatttcagatttttgaagggtcaagccatgtaaacgtcagtcatgttatccacgagctctcatttggcccaaagtatccaggaattgacaacccactggatgatacttcaaggatacttcatgacacaagtggaaccttcaaatactatatcaaggttgttccgactgagtacaaatatctgtcaaagaaaatattgccaacaaatcagtattctgtcacggagtattttcttcccattcgcccaactgagagggcctggccagcggtgtacttcctgtatgatctctcaccaattacagtcaccatcaaagaggaaagaaggaacttccttcattttataactcgcctttgtgcagttcttggtggcacatttgccatgacaggaatgcttgaccgatggatgtaccggcttgtcgagtcagtcaccaactcgaagaccagaagtgtactgcggtaactgcacaattcatgataggcggaaaacagctggtaccgtggctaagagcatctctaagagactttttatttttggctctctatttaactctctatttattttttcataaagattacattatatatatagcatctcactccaacagactatctatctagttttgctagtcaggtggctagtcaaatttggctagtgagagagctgatttggagagtcagatagcttagcgagttagataactagtctgttggaaagttattttattgttgagtagctaaaatttggcttgacgagtcatttaactagtctcttggaggtgctctaatgaagccaatagacggacctttgcccccaagctaacggatgaagccatgctgatttgcatgttttattttctccgtacatgactaactttatcatcagttatgttaaattgacacaaagtccacggactacagttttgtaaaacttgatgaggaatatgtatgcaaagaaagcgtgggtccagaatagttttctgtgaaaaatcaatacaaatgtagcttcagtgtgctctgtaatagcaacctgatgctttatttataggacgactttcgtcgcatgtgacatgtgttgcgagctgcattcgctcctgtcctcaggtagatgcatgccctgcgatgcttcaaggctgtccgggggagtagcagtatttgaggaaaggtcgatgaaatgaagtagtagcgaggaaagatgtcatgcttcaactgccaaggatcagaagagttcgtgagtcgttactgttgtgaagcacgtcgctgttgtagtgctgtatgatttatttctccgtcacgagtcatgattaacacaaacgaggtacagagactttttttaattcctctgaacattgatcattgtgatatagagcttctccatatatatagagagctattatatatatagtgctgtcaaggacgaacatttgtataaacgggactgggattagaatccctcatttcctctttttttattataaaaaatagagtttgtatttttttattttatgatatttcttggaggattactatgatatgcatattttat

SEQ ID NO: 31556 - DNA, 1031 bp, Zea Mays
ctttttcaactggttatttaatacagcttaccgagtactgtttttatgcagatttttgaagggtcaagccatgtaaacgtcagtcatgttatccacgagctctcatttggcccaaagtatccaggaattgacaacccactggatgatacttcaaggatacttcatgacacaagtggaaccttcaaatactatatcaaggttgttccgactgagtacaaatatctgtcaaagaaaatattgccaacaaatcagtattctgtcacggagtattttcttcccattcgcccaactgagagggcctggccagcggtgtacttcctgtatgatctctcaccaattacagtcaccatcaaagaggaaagaaggaacttccttcattttataactcgcctttgtgcagttcttggtggcacatttgccatgacaggaatgcttgaccgatggatgtaccggcttgtcgagtcagtcaccaactcgaagaccagaagtgtactgcggtaactgcacaattcatgataggcggaaaacagctggacgactttcgtcgcatgtgacatgtgttgcgagctgcattcgctcctgtcctcaggtagatgcatgccctgcgatgcttcaaggctgtccgggggagtagcagtatttgaggaaaggtcgatgaaatgaagtagtagcgaggaaagatgtcatgcttcaactgccaaggatcagaagagttcgtgagtcgttactgttgtgaagcacgtcgctgttgtagtgctgtatgatttatttctccgtcacgagtcatgattaacacaaacgaggtacagagactttttttaattcctctgaacattgatcattgtgatatagagcttctccatatatatagagagctattatatatatagtgctgtcaaggacgaacatttgtataaacgggactgggattagaatccctcatttcctctttttttattataaaaaatagagtttgtatttttttattttatgatatttcttggaggattactatgatatgcatattttat

SEQ ID NO: 31557 - DNA, 975 bp, Zea Mays
ctttttcaactggttatttaatacagcttaccgagtactgtttttatgcagatttttgaagggtcaagccatgtaaacgtcagtcatgttatccacgagctctcatttggcccaaagtatccaggaattgacaacccactggatgatacttcaaggatacttcatgacacaagtggaaccttcaaatactatatcaaggttgttccgactgagtacaaatatctgtcaaagaaaatattgccaacaaatcagtattctgtcacggagtattttcttcccattcgcccaactgagagggcctggccagcggtgtacttcctgtatgatctctcaccaattacagtcaccatcaaagaggaaagaaggaacttccttcattttataactcgcctttgtgcagttcttggtggcacatttgccatgacaggaatgcttgaccgatggatgtaccggcttgtcgagtcagtcaccaactcgaagaccagaagtgtactgcggtaactgcacaattcatgataggcggaaaacagctggtagatgcatgccctgcgatgcttcaaggctgtccgggggagtagcagtatttgaggaaaggtcgatgaaatgaagtagtagcgaggaaagatgtcatgcttcaactgccaaggatcagaagagttcgtgagtcgttactgttgtgaagcacgtcgctgttgtagtgctgtatgatttatttctccgtcacgagtcatgattaacacaaacgaggtacagagactttttttaattcctctgaacattgatcattgtgatatagagcttctccatatatatagagagctattatatatatagtgctgtcaaggacgaacatttgtataaacgggactgggattagaatccctcatttcctctttttttattataaaaaatagagtttgtatttttttattttatgatatttcttggaggattactatgatatgcatattttat

SEQ ID NO: 31558 - DNA, 698 bp, Zea Mays
cttcccattcgcccaactgagagggcctggccagcggtgtacttcctgtatgatctctcaccaattacagtcaccatcaaagaggaaagaaggaacttccttcattttataactcgcctttgtgcagttcttggtggcacatttgccatgacaggaatgcttgaccgatggatgtaccggcttgtcgagtcagtcaccaactcgaagaccagaagtgtactgcggtaactgcacaattcatgataggcggaaaacagctgatgcatgccctgcgatgcttcaaggctgtccgggggagtagcagtatttgaggaaaggtcgatgaaatgaagtagtagcgaggaaagatgtcatgcttcaactgccaaggatcagaagagttcgtgagtcgttactgttgtgaagcacgtcgctgttgtagtgctgtatgatttatttctccgtcacgagtcatgattaacacaaacgaggtacagagactttttttaattcctctgaacattgatcattgtgatatagagcttctccatatatatagagagctattatatatatagtgctgtcaaggacgaacatttgtataaacgggactgggattagaatccctcatttcctctttttttattataaaaaatagagtttgtatttttttattttatgatatttcttggaggattactatgatatgcatattttat

SEQ ID NO: 31559 - DNA, 1811 bp, Zea Mays
ctaagacatcgcagtcgcagacccgatctgcttatatatactcccatccgttccattcctgcttgttcttccaatcccccctcccccggcgtgcgctccctcctgtctctcttggcgacgactgggcaacggtcgcagctgtatgttcgagcccttcgccgacgacgttcaccaccaggaattttctcagctgtgccaatgatgggttgcttcactgttctcagatccaagaagaagaaaagccattttgataatcctcttgtcccaagcaagaaatcagttgatgcaagggaaagtacgtcctctagacttccggagccagaagttcatgtgccatctttgcaatcagctcctcctagttttaggaacagggtcaagatatccgagtcatcaaatgaagtttcaaacagaaacagcagggctcgcgtgctgtctgctccatcagcccttattgtggttgatcagtttggctttccatattcggaataccgagatcaagatgactccagggataaggaaggtttgacaaaggggcatcgcttttcaaatcctttgccccttcctcttccttcacgcgaaggacattcttttaggaactctggtagcttcaaagccagcaacgtaagcgggccattggagatgtctggccctctcccattgcctctaaagaaatgtgatggacttagaatcttctcttatgaggagatttcatctgcctgccaacgattttctagtgatcagtgtgtttcagaaacacttggttcaacatcatacaaggcaacatttagagatgaatttattgatacgaggaccactgaagcaacagtagctcgattactcccctccactcagagtttgaaggagtttaaaacgcaagcgaccacattggcatcgcttcagcatcccaatttatgtaaactgattggctattatgcaaaagaagattctaatgaaaggatgttggtctatgaacggctttatcatggaagcttagataagctactctttggaagatcagatggtcgtttcatggactggtctaaacgtttgaaggttgccctgggtgctgccagaggtctagctttcttgcatgatgaaggaccctttcaggccatgtacagcgagttctcaactttgaacatccaaatagataaaggtttcactgctaagctttcaggatatggttgtgttggcttcaataccgaggagatatctaatgcacctgtgtctgcagcaaacctttcggtggagaccttggagaagggtttactcactcccaagagcaacgtctggagctttggagtcgtgttactggagctaataactggaaggaagaaccttgatcccaattattccaaagaagaacgcaatattgtcaactggagtaggcctttccttactgatgacagtcgcttgtctcttatcatggactcccgtataaaagggcgctttcccactaaggctgctcggatagtagcagacatcattttgaaatgcctgcgtaaggatccatcggagaggcctaccatgagggatgttgtggaggccctagcaagagtccaggaaataaaggttccgtgcagatatcctctgcaagaaccttctgctgcaccaagaaaagtgatgttgaaatctacatccctcaatgggattgtgcctcaccatcctgtcataaccttctctccatcgccgccttcacataaccagcacttgatttcaccaaggtcgtcgacatctgccttgtttcatccaagggcatgctcttctaccctggacgatccgagtgcaggcggtggcaggacgataaaaat
